United States Patent Application Publication US 2019/0348154 A1 - sequence listing, part 101

SEQ ID NO: 375460 - DNA, 5943 bp, Salmonella enterica
atgaataacccactggaaacatttgaatcgataagagatttttatatttcgtatcttgaaacggccttccgtattgattcatcagatatacagtctgaacggcgagcgttactggaacagcaagggacattatgcgccgatctatttcttgagccgatgccccgatatcagcactatggcttaactatcagtgaattacgaaatgatgctcatggtcagacatggttgcctgggtttaatgcgcaacaaagggcggcattcatcgacctctgtttaggtgggcttctgccctgcaataaaacagatccggctaagggacgttttaatctttatacccatcaactggacatgctgaaaagaggggtacagccagggaagccgggcatcgtcacctccggaaccggctccggtaaaacagaatcatttttgctgccggttttggcgcagatcgcaaaagaagccacaggctggccgcaaagtccggcgttgaagcactggcaaccgtggtggcagaaggtagcggataaacagcccacctttatgcgcgagcatgaggccgtcgcacgtccgaaagcggtacgcgcgctgattctctacccgatgaatgccctggtagaagatcaactggtacgtatgcgacgggcactggattccagcgaagctcatgatgtcatggatgcacattttggcggtaaccgaatcttttttggccgttataccagcgcaactaaagtaactggctggctcaaacatccccgactcagtgaagaaaaaaatgagaaaaagcgcgtggctaaaaaaatcactgagctacgtgagtatatgcaattaacggaagagacccatcaggaggctgtacgacaatcacagcagggtaaagataaagaattatcgtttaacttccccagaactgttggtggagaggttctcagccgctgggaaatgcaaaagacaccacccgatattctgatcaccaacaccagcatgctctcaacgatgctggttcgtgaggtggacgatcctatttttgaacaaacccgacagtggattgagcgtgaccctgatgcctatttttatcttatccttgacgaacttcatctacagcgaggaaccgccggtaccgaagtcagctacttgcttaagcatttgatcagtcggctggggctggatcaggaaaaacaccgacacaaattgcgtattctggcctccagcgcctctttacccgttgaaggtcctgaaggcgaacaaagcgtcgaatatttatggggaatgtttggtcagcggggactaccttcaggtgctacgtctagcgactggagggaatgtattatcaaaggcgacacccttcccccgggcaacatgtctcttttccatggggacctggaggcgttttatcacgcagtgcttcagttacagcaagcaccacttacatcattacaacactggcaaaatgtcgcccgcagcatgggaatgacaaccagtgaagtttctacagagcaattggcgcaacgtgtcgtcttacaggctgccaacttgcttgaaagtggctgctatacggacgatctctctccgagagccacgtcaattaaaatgctcagttcacgcctgtttaacgcccaaccccatagtgaaaaagcgctccgggcattaatctggttgcgctcgactgagggagactggtcgcaatggttttcacatgattttcctgatgatatcggcgcgccgcgtttccgcgcgcatgcttttttacgcgcactggaagggttatatgccgcgccattgcccgcctccagcgccgcatctacgcaagaaatcaatcaccgctattttggcgatcttaccgtagagtccggcttacgttacggcaaagataaaacatcgcggcgtgtcgagttgctctattgtgaatgttgcggcaatctctttttgggcggtaaaccttcagtcttttctggttcagaaagtcgaattgaacttttacccaacgacccggatacggaacagctaccggaacacgcaaaatcagtcatgatagaacgccgatctgctgaagaatacgcgctatttatgcccgtcgttgaacgtttctggccgaaaggcaacgaaacgttaaatggtgatgatgctttcggtacatggggcaaagccagttacgatccatttaccgccaccattcaacacccagtatcgctcttaaaaccgctacctgaaaaccatatcgcgggctggttctattacgtcaaacccggtgaatttgcctccccggaaagaggccagtcatccagccagtcaccgggaacggcgctaccttttcagtgtccggcatgtggtacatcctacaaatacggcaaaggtaagctctccccaatccgtagctttcgcgtcggtttttcgaaaacgacacagctactggccagctcgctaatggcggaactacagcgctcgggtaaccgtgagcaactggtaacgttttcagacagtcgtcaggatgccgccagggcggcgctcgatctggaatcgggtcatcatgacgacgtcagacgagaaattgttgtccattcgctacagtctattgcggctgataaaccgtcccataaccaactaaaaatacgccaggcagagatagaggaccggaacaaaacactgattaacctcaacgtaaggtcagatgaggaagaggatgagatggatcgactcgctgatgaacggaagaaaatcagagggttattatcaaaacctgaaactgacagcatacctctgcgtgaaatcctcgaacctgaatcaccggatgcaggccaaccgcttggcttgctgttaagggcgcaggtagatgccggtattcacccttccgatcgtactggcatcgcgcctgttcccgatcctgaaaaacatgaagaaggtacgctgacctttgcatggcaacaactctttgaaaagaatgcgcagggggtgtggtgctggaaggcgcttccatcctatgaagataacctgctggtagcacgacaggagatttcacgcgatctgaaacggctggtgggggaaagcgtattcagtaaaacctacttcgcgttggaagagtccggctggggttatccctgccttccgattaccggaaacgactcacgggaacatctcgcgatttatgacgcaatgtttcgcgtgttggcggacgcgtaccgggttactccttcacaatatacaaagccagaaaccccatggagttcagcgagcgatgtcaaatctagaaaccgcctgtaccgctttactcaggcaatatgccagcgctcgggaggcgagcctttatctttaattgatagttttctccggcgactggagctggcgggtcatcagggcggcattattgatattggcaaaatgcactttaagctggcggaacctgccgatcgcgtctggcgttgctcccgttgcgggcgtatacacatgcacaccggcgcgggaatctgtactcgctgctactctcctttaccagaaacgccatgtagcgacgcaaaaacgctccagatgcaacactatctcggcaaacgcctctcacattcttctggtattcaccggatgcgctcagaggaactgactggaatgaccgaaaacccggcggcaaggctacgccggtttaaaggtattctgattgctgacgatgatgatattttgccggaaggaatgaaagattttgcgcccgatcgagatcttgaccgggcagctcgcgtggtagatgttctttccgtaaccacaaccatggaagtgggagtggatattggtgatttacgtgcggtctttcaggccaacatgccgccacagcgctttaattatcaacagcgtgtcggacgagccggacgacgtggacaggcgttttcattcgtattaaccgcgtgtcgcagcaagagtcacgatctgttttacttccgccatccggaaaaaattaccggcgatctccctccgccaccgtttttgaccacaaagctggaaatgatctgccagagactggtacgaaaaatttggctggtgtcggcattcaaatggttaaggcagcaaacggaaaaagccgatcacccatggccggttgacgactacgcgcatgcccctgataaccacggtgagttttttccggtgcactggctgaaagaaaaccaaacggactggctgccaaaaatccggcaggccatcgaagcagccatcctggcacgcgatgaatttgcccggacttgcacgcagcaagaccatcatttgttccagagagttattcagcctttgacgccggaacaactgattcaggatattaacgccgtactaaacgacagtgcaatggaggcgaaaggactggcagaagcgctggcggaacacggtaaattcccaatgtatggcatgccgacccgctctcgccttttgctgacaaggcccgtcagcacaggcgaaaaagaaatcgaatttgccagcatggatcgcgatctggatattgcgatacaggaatttgcccccggaaaaattctggttcaagacaaacgacgctactttacggcaggttatagtggaatgcttaaacagagcagaaaaaatccacgatcattttattcaaatgcccccgaaccgggtgaactcagaacaatgaccgcctgtccggtatgcaacatctgggctccggcaaactctctggccaccgaatgtactatctgtggtgccgttatggataaggcggaacgctatcaatgctatgttccttacggatttatcaccacgctggaaccaaaatcggccaaagaggattttgatcaaatcctgaccacggccagtcgtgtatcaattgcagaagcctacactttttctgcaatgccagagcctgacgttaatgtggcgatacagctccagccacagacatgtctgcaccgcctgaatcggggaatttacactgataaaacatggcgtggtttcagcgcaacacaggggagcctatcggtccctttcagaaagcaggggacttaccagccgctttgggcgaaccgggtttggatggataatcaaattattgaggccgacctgttagttaaaaaccgctttaccgatcggggagaaacccgaaacacattttaccttgccgcgcctaaagtgactgatctacttgcgctgatggttgcccaaaccccgccgggtctccggctacagtattccactctaacgccggcattcagagctgctgcgctctcggcgtcttttatcattgtcaactatgcatcaaaagagctactggatattgatcctgaagaaatcgaaattctggaaccccgcgttcaaatgctgaaaaacggtaagtcggtaccggttctgcaaatggccgatcgtctggttaatggttcagggttatgtgaacggctacagcagaagggcgcatccggttctctcattatccttgaggtcatgaagaatattttaaataacaaaacggcctacccgctggctgagttcctgcaatccgatcatcgcgaacgatgctttcaagggtgttatcactgcctgcaccgatacggaaaccagccgtatcacggattgctggactggcgtctgggactggatgttattcaacttcttctggatcaaacctataacgccgggctgaacagtgattttacatctccgggcgtgtctgactggccggaaaatgccctacgattagccaaagaggccgcttcgctatacagcgacagtgacgtaaaagtgatagggaatatacccgtgattcgcaccggggacgggcgctgggccgccgtactacatccattctgggatcccgatgctgtatttgctgcaaaccccgaacttgaggcattttcatatgaggtggacgtagacgcgacgaatacttttgcattgtcccgccgcatggggactgaaatggcgaaattacggactcaggcgttctcatctcaggagtga

SEQ ID NO: 375461 - DNA, 2781 bp, Salmonella enterica
atggctaaaaagaaaagtattatcagcgaccggctgggccaaatgtactacttcggtacagaatctcatgaattgagcagatgcttgcaagagtgcaaacaacgactcaccagaaatggcgctaaagcggataatttaccgaaaggaccagagaaaaggttacattttctccgtacgttaccacttaaggccaaacctgttgtgtctgattggcttcgtgaaaatttaacgtttcctgaacaaaatgacccacaaatcgttcttagggatctgttagaagcagaaagtaatgcggaagatattgaactctgtaaaccgttatggcgcactattcttggattctatatttcttctgactgtcctgaaattataacgagattcctgaatggtgaaaaaattgatttaccccaacaaggtgtttctgactccttgacaattaatgtcactgatgaagacattgaacaatgtgctttaattagccagggtaaagaaattcctataccggagcgtactattccactgtttattggaggattggttgacgtactcaagggaacgcatacagctgataatcgatggcggacaaagctatcagaacattctttaccgctggcacgaaaactgggtgaacttatcgatcagtttgaagctagtaacgacattaaagcgatggatagtaccagtattatacaggctcctcccgttgtatccaaagaaatcgacggtacgatggatgaggttatgttcattggtaaagtgttagcgctaactgcgtccggtgctttttttgttacaccgattagtctgttaattgatggcaacctacgagacctccctgaggcactggtaaaagatctttaccctcatagcggtgaagccattggttttgagaaccatttcagcaaaaaatttgctcggggtgaaatggcaatatggaaagcccgatatcagccgtctgataaacctgcgcagtatgtcattactgactacctgtcgcgcgtttatcctgtagtcgcgctaccccatgcctccgatgagcctgacgctgtcagggagtggctactcaccaactaccagccgcaaaacgatacgccggtcatttttcagctaagtgatggcgtatccctgagattaccgggtgacttgcttgatcctaaaaaatatgactttgatatgccgctggagagttatcgtcaggttcctcagacactacttaattctcatgccctaacggtgatcactgaacttcctcaggtgagtgaaaaatatgattgcgctgaagccagcacgtggatcaaacgcctgcttaaacgaactgattcagcaaaatatttccctcaatttagtaaagggcagctacaaaatttaactcattttattgctgaacatgagtctgataacgaggcgtcctatcttcgcgcagtatctcatctggaacagatagcagatatgagatcctttcttaatgatacgactcaacagttactggctttacctgaggttgagacgcaaattaatattgagaaacaggaaatattggctcgttacgaagacgaacagcaccagattaaacaatcaataacggtattatctgaaaagaaaatacagcttgaaaatgaaatagccgatcagaagaaaaagttgaaaaaagaaactgatcgcattaataaagcgctacgtcagcaagaaaatgaactggaacaacggataaaaaagaccttcgaagccgcatctcaagcgggagtggaaacgctggcccagacagcgctactgcgggcaataatcaaaaatgaaacagcacaggagcaacctgtccaacaacgaataacctcagaacctgtagccgaatcagcaaattctaatttcccattagcagagacgaatgctctgactcgcaagcatcaactgatatcggctatcgaaaaacaggcactggcgacgggactaagtgaatctttattatccagcctgattgctactgcgagtattacacccgcggtcggattgatgggaaaacagacaaaacaggctgtcgcctcattagcgaaccttttagctggtaatgtttggggggaagtgtcggtacatagcgatcattttagcttcagtgatttaatgaactcccccacactgatccgcttatctggcgatgctcttaccatgacgctgggtgattttttgacccaacaacaagaggcagggctggcgagcatcgttgaattgcgtggttttaaccgcactccgccagaaactctactccctgaactccatgagtgtttattcagaactccctatcctgccgcatgcagttggacggatcggcggcaggctctacgacatttacccattcggcacccgatgctttttttactcacattcaccaccgggaaaagcacgtttccattgcaggctcctcttgctcaccagttacccctgtttctggcagagaatatatggtcggatgaacgaccatttgcgcaaaatactgacatcacgccttctcgtattactccagaactatggcagacaatgtatgtgggcaaccaccagccagagcatctggcttgtgctccatgggaagcgctaaaagcagcgctactctctttacttcctgatgaacaagcgcaagccgttgcccgtctggcttacggtctcggccgtagtacaacacaagatattgcgaccacgattgacgctcttgccccagaattagggccatatgttcaggaaatgactaccggcgaatcggcaagcgtacttgagcaccttttccagttataa

SEQ ID NO: 375462 - DNA, 2766 bp, Salmonella enterica
atggatgattctttcccggttactttagagcaatggaatgctgaactagtaaatatcgtcttttttgagtcttcgcatacgggctcgactttaagccgaattgatgccacggggcgcgtttttgagcaacttgcaggttcacgtagcaaagaggatgctaagcgaagttttctggattcgtttggaaaaaaggcgtctaaaatccaggatgcactcagggatgagtcgcggttagatattttagcgcaaagaaaaagataccctacttattttgccattttatatttaacattacttgctgccagtgctgatgatgagacgtatgacgaaggggattttcgggttcgattttctgtactgctcggttttgataaaaataaaaaatttgtttttactgaattacccaatttatgggaaagattagaacgatggagtagtagaaaacaaaactgtacccgtttagtcctcccagaaccatcaaaacatgaaagattgattgggtattctaagagaattgcttttccctgctataaggatgaggtttttttacgggatatactcgtcaataatgaattagatagccattcaacttttgagtcagttaataagctagtacatcaatatctatcttattttggcgagatttttaatcaggagtttattgagttcagaacattactttcaaaggctgccatgcggcaggcttatgactctcctttttggggcgcggttcgtgatattactgtacatactgagagagaacaactcaaagagaatggtaagtattgtattcacatggagcttaatgattcaggtcatccagagatttatcttcttatggatgacgctgctgttactgcctcagaaattaagcattattactccttgtctaatgaaatagagaactataataatatatattacgaacgagacataggtactacattaaattccctggatttattattaaaaagacggaagggttatttctataaatcacgagcgggggctgcactgcggtctgggtgtttgccgctttttcgtgatgatttttttcatattagttcagaaggagattattatgataattctccactctatttaattcttcaccataaatatgcagacagtattttcatagccttgaagaatgctggtgaaagagcacaacgtcgggatattaaatctaccaagtggtcggtagtttcttccgataacgttggcaggcaaacgctggataagatagctcatttgttaccagaggaagcccgtcgttttctaatacagggatggcgccctgcccggcctcgtatgtcaggcgcagctcggtttggacaggctatactgcttaaccctgccagtacgcctattattcatatgcctgaagtattaagaggatgctatgtcattagaaataaaaacggagaagaattaacccatggctcgctatcgcagggggctgaaggattattcattccaccagaggaactgatggaaatatctggtcaggcattttgtcgctatgaacttacgttggcgtattcagatatcccagtaaattttgatgtacacgtgttagatcatgcgccttacgccacttattgtaaaattacagagccacatgattggttgactgatggaccatcgggagtattaatggcgttaggggatacggcagtgctccccccactgaaacgcgaagaaataacgccaatgagtggtgctcagatgttatggcagtatgaaaattgccttcctgtaacatgtcaatataccgaattacataatatacccgcagcatttgactggatcgctgaggcgctggccttgcgttttcagcgccgtagcacattgccttttggtgaattaaaacaacacattgaaccagtatcacaggtaacaaggatacccgaatggcaattgcgtcgcatgctctttgccgctggctggctttgtgtagtacaacgacgttattcgccatattcgttagtctcattggctgaaagaaccatttccgttgatgtcactgaacagggaattattgcccgaattatgggaatgtttacaagaagtgaacgtaatcttctacaagaagcacttaatgacggtgagcgaatagggcgccggttagttgaggataacggctgttcaatggggtgtattgaattgcatctgtcagccagagaacgtgtccatactttcattgagcagtttgggttacgtttgattaattacgacgatttacccgtcaatgctttgagtggagtattgttaccgtcgtctcaaatgcagtttatcccgactttacccccggatctccatgtatcgctttggcaagctgaaaaataccaatggtcagaagaacaacggctaactcaaacggctaataacctattgttacgatgtcaggaaaaacagcgttatcgttattttattcggcagaatgccggatactggcaaaccgatagcttctcctgggccttaatggctcagatgatatgttcaggagtaacgtttggtgtgcgtaaaggcgatagtgactggtcctggtcaacgaagttcattgcgttaccgccctccgttttacagtggtggatccacgttgctcatggctgtttgtcgataacagataatggtagctacttatttgcaggcggcaaagtaccactctgggacaatgtaatgaccttcccttcctgccaacgagcgttggcacgacggagcagagcgctgacaatacgcaagctgcgcagaaccttacagtaa

SEQ ID NO: 375463 - DNA, 1086 bp, Salmonella enterica
atgagcagtgttttcgagagagaaaacgataatattcgggtactttcactattctccggttgtggtggtatggattttgggattacctcagccggtggagacatcgtctttgccaacgatgttgtagagaatgcctgcaaaacattagggaactatttccccgatactgatatcaggcatagcgatatctctcaaattcagtcttttccagatgttgatattgttgttggtggctatccctgccagtcattttcaatggcaggtaacagaaaaccaaacaatgacgacagaacaaacctttataaacactttctacgggtattagagactgttcggcctaagtattttgttgctgaaaatgtttctggcttgaaacatttaggtgcaggtagctttctggaacaacagctcacggcatataaagctgccgggtaccaggtcagctatcatatggtaaacgcaagggcttacggcgtgccccagtcgcgcaagcgtttgtttattattggcgtcagaaacgatcttgggcaatgctttgaatttcctgctgaaacacatggcaaagcgacaaaaaagaatcctcatttaaaaccctatgtttcacatggtgaggccattagggatttaccactatggcctgaaggtgagttttacgaacgaccacatgatcctgaagggcatttctcatggtatttcatgtcccgaaatcgtaaagctctatgggacagccctgcttataccgtcgtagctaactggcgtcatgtgacattacatcctgccagtccggtgatgaagttaacatggtcaaacctggaggatggctggaagcagcgctgggacttttctgatgaatatgaacatctaattgttgatacttctcgtcccaaactggaacaggcaaggcggttatcatggcgggaatgtgcacgaatacaaacttttccacagggttttgaacctgtaggtgacgtcgagtcaaaatttacccaaattggtaatgctgttcctcctctactggctgaggttctttttcggcatttgttttctggtgccggtttgaaaaagatgacagcgaacggtaattag

SEQ ID NO: 375464 - DNA, 1095 bp, Salmonella enterica
gtgtgcgaacggttcgctttcgtcaacgaccgtaacttcaccgatcagaatcttggtggtttctggtacggagaagcctgccagttcagcgattttgtaggctggctggccgacgatagcggcgttcagagcgccatttttcaggataacgttttgaaccgctttcagctcctggccctgcagcatgtagccgccgtggctggcgaaacgttcgcgaacggcatcatagacggaatcaacaacgacaacagactgttcagaagcacagattacgccgttatcgaaggttttagacatcagaacagacgccacagcgcgtttgatatccgcggtttcatcaatgactaccggggtgttgcctgcgcctacgccgatagcaggtttaccggagctgtatgctgctttaaccatgcctggaccgccagtggcgaggatcaggttgatatccgggtggtgcatcagcgcattagacagttctacggaaggttgatcgatccagccaatcagatctttcggcgcgccggcagcgatagccgcttgcagaacgatgtctgccgctttgttggttgcttctttagcgcgcggatgcggagaaaagatgatggcgttacgggtcttcaggctaatcagcgatttgaagatcgcggtagaggtcgggttagtggttggaacgataccgcaaataatgccgataggttcagcaatggtgatggttccgaaggtgtcgtcttcagacagcacgccgcaggttttttcatctttataggcattgtaaatatattcagaagcgaagtggtttttaatcactttgtcttccacgatacccataccggattcggcgacggccattttggccagcggaatgcgggcgtcagcggctgccagagcggcggcgcggaagattttgtcgacctgttcttgagtgaaactggcatattcacgctgggctttttttacacgctctacgagtgcgttcagttcagcgacattagtaacagccataatgctctcctgataatgttaaacttttttagtaaatcatctgcgcgatacgtgagtatagacagatcgacgatactttgtataaatgcctga

SEQ ID NO: 375465 - DNA, 1632 bp, Salmonella enterica
atgtctaacatcacgaaaaaaagtttgattgcagcgggaatactcactgcgctcatcgccgccagcgccgcgactgcggcagacgtgcccgccggcgttcagttagccgacaagcaaacgttggtacgtaataacggatcagaagtgcagtctctcgacccgcataaaattgaaggcgtgccggaatcgaacgtcagccgtgacctcttcgaaggcttattaattagtgatgtcgaggggcatccttcaccgggcgtcgcggaaaaatgggaaaataaagattttaaagtctggacattccatctacgtgaaaatgcgaaatggtcagatggtacgcccgtcaccgcccatgatttcgtttatagctggcaacgcctggccgatcctaatacggcatcgccgtacgccagctatctgcaatacggtcatatcgctaatatcgatgacattatcgccggtaaaaaacccgccaccgatctgggggtaaaagcgcttgatgatcacacctttgaagtgaccttaagtgagccagtaccttatttctacaaattgttggtccatccttcagtgtctcctgtaccgaaatcggcggtcgaaaaatttggcgataaatggacgcaaccggccaatattgtcactaacggcgcttataagttaaaaaactgggtggtgaacgaacgtatcgtgctggagcgtaacccgcaatactgggataacgccaaaaccgtcatcaatcaggtaacttatttgcctatctcttcggaggtgacggatgtgaaccgctaccgcagcggcgagatcgatatgacttataacaatatgccgatcgaattattccagaaactgaagaaagagatcccgaatgaagtccgcgtagacccttatttgtgtacctattattacgaaattaataatcaaaaagcgccgtttaacgatgtccgcgtgcgtaccgcgctgaaactggcgttagatcgcgacattattgttaataaggttaaaaatcagggcgatttacccgcttatagctatacgccgccgtataccgatggcgcaaaactggtagagcctgagtggttcaaatggtcccagcaaaagcgtaatgaagaagcgaagaaattgttggctgaagccggctttacggcggataagcccttaacattcgacctgctgtataacacctccgatctgcataaaaaactggccattgccgtggcgtctatctggaagaaaaatctgggcgtcaatgtgaatctggagaatcaggaatggaaaaccttcctggatacccgtcatcagggcacctttgatgtcgccagagccgggtggtgcgcagattataatgaaccgacctcgttcctgaataccatgttgtccgacagttcaaataacaccgcgcattataagagcccggcgtttgataagctgattgccgacacgctgaaagtggcggacgatacgcagcgcagcgaactctacgctaaagcggagcagcagttagataaagactcggctattgtgccggtgtattactacgttaacgcgcgcctggtgaaaccctgggtgggcgggtataccggtaaagacccgctggataatatttatgtgaaaaacttatatattatcaaacattaa

SEQ ID NO: 375466 - DNA, 909 bp, Salmonella enterica; identical to SEQ ID NO: 368391

SEQ ID NO: 375467 - DNA, 762 bp, Salmonella enterica
atgttatccaaaaaatttggcttatcgatgatagtgttgggaataatgtcgtcttcagcgtttgctgatagcatcgttgaagggagaacactcaatgtcgcagtatcaccagcctctccccctatgttatttaaaagtgctgatggcaaattgcaggggatagatctggagcttttttcgtcttactgtcagtcacggcattgtaagctaaacatcaccgaatatgcctgggatggaatgcttggcgcagtggcgagtggtcaggcagatgtagcattttcgggaatttcaatcacagataaacgtaagaaagttattgatttctctgaaccttattacatcaactctttttatctggtcagtatggccaatcataaaataacgctcaataacctcaatgaattaaataaatattctattggataccctcgaggaatggcttactccgaccttatcaaaaacgatctggagcccaaaggatactactcgttaagtaaagtaaaattgtatccaacctataatgagacgatggctgatctaaaaaatggcaatcttgatctggcttttatagaagagccggtttattttaacttcaaaaataagaaaaagatgccgatagaaagtcgttatgttttcaagaatgttgatcaacttggcattgcctttaagaaaggctctcccgtgcgcgatgattttaacttatggcttaaagagcaagggccacaaaaaatatctggcatcgtcgataactggatgaaatag

SEQ ID NO: 375468 - DNA, 207 bp, Salmonella enterica
atggaggcggccagtaatattggttatgatacggaaaacccttatactcaccacggctatgtacatgttcccggggctaaagaccctcagctagatatatgtccgcaatacgtcttcaacgaccttgtccatccaacccaggaagtccatcattgttttgccataatgttagaaagttttatagctcatcattattccactgaataa

SEQ ID NO: 375469 - DNA, 1149 bp, Salmonella enterica
atgacaacgtctgacaatcaattaccctctgcaaagcgcggggaactagccacagctatacagcgcggcactgacgagttaagaactattggccatgagatgacggtaacgaaagcattcgggaagctaggaatgctggcggtaaaaggtattcctgttgttggccctgtcatcgacgcggcgaaggaactgtcgcagggattgatagatcgtgagaacagagaacggcagcgacgccttcaggattacgtactgggtgtggtccgggacgaacagtacaacgacaccgtggaattccgggaggaggacgtgatcccggtgattcgtaaacttgcggccgacgatgagaccgctaaaactgaatactatacccgcctgaccgtatcactgggccgtactcccctcagtgtcatgccggacgatctgcgctaccactttatccgtctggtgagctcgctaacttgctatcagatagcgtttgcccgggagcttaaaatccgaaaaacggtaccagtgagcggtaccgcctcatttgaggaggcggagctggcactgaccggtctggacagcggcatggcgatgcaggcagtacgggccttgcagaacgcggggctgctcaaggaaaagacctatcttcctcgggagcaaaaaccggagggtatcctgtacgaaaccacatccgactttaccaccctgatggggctgctgtttcacccgtctgattttgagccggagacggtggacctccagcgtaaggagataagcgacatcattattgtcggaaaaatagggtttatcgataacctttatgtgacatatctgccggcagcgctgaagaaagccggactcaacgcaaaattcgtggagagtaatgacaagcacttcacaacagactgggcaccgctctatcttcaaacaggcatagagggagagggttatgacagaaggatcaagctatatcttacgcgggaaagcctccctccctggaagagtaaggcggataattacctgagttgcagctttgaaacaaggacctatgtgcgggataaaagcagcagtaagaaagaagcagactatttcagagaacagatggatcgggtcgttaccagtatccagacgcaatttatggagagaagcgtagggcagtag

SEQ ID NO: 375470 - DNA, 246 bp, Salmonella enterica; identical to SEQ ID NO: 368240

SEQ ID NO: 375471 - DNA, 456 bp, Salmonella enterica
atgggggacgaaaagagcttagcgcacacccgatggaactgtaaatatcacatagttttcgcgcccaaataccgaagacaagcgttctatggagagaagcgtagggcagtaggcagcatattaagaaaattgtgtgaatggaaaaacgtacgaactctggaagcagaatgttgtgcagatcatattcacatgcttctggagatcccgccgaagatgagtgtgtcgagcttcatgggatatctgaagggtaaaagtagtctgatgctttacgagcagtttggggatctaaaattcaaatacaggaacagggagttctggtgcagagggtactatgtcgatacggtgggtaagaacacggctacacaaggcaccagcttgaagaggataaaatgggagagcagttatcaatcccttatccgggcagcccgtttacgggccgtaagtaacgaattttga

SEQ ID NO: 375472 - DNA, 459 bp, Salmonella enterica
atggatacagttgaagagcttaatagcacttatttttatgccggacgttcaaatctgactgctagccagttgctgtttatgattttctgcgaaaacactgccaatcagttgggtgttcaggattttggggcgatagtgtctattgtggctggattgaatgttttgcctacgcggacaaaaccgcgtggtgctattgagggtacatcgttagcttcccgtggttctcgtaaagtatttggtactgctaaatttccttggggaatacagttgccatctgtgataggtggatacccgccatcaacgttaaaaataaaaatggttgcgaaaattagcgcgtttaccggtcgtgctatacctgttgtcggatggattattctggcctctgacgtgtcgcagattgcatatcgtacagtcagggattacaaccgtattgccagaggaagcgataaaatatggtaa

SEQ ID NO: 375473 - DNA, 189 bp, Salmonella enterica
atgaaagaaggctactactggattcagcatgtaggtgttgtacaggtggcatattacacgaatgacactgtagatgacctggagtcagggcaggttatcgtaggtgtatggcatctgacaagaggcgatgatatctgccataacggtgaagcagaagtactgtcggggccgttacaaccaccagcttag

SEQ ID NO: 375474 - DNA, 2652 bp, Salmonella enterica
atgcggggtatcggagctgttatccactttcgcccaccgacaggcagcagcgcaccatcccccgacgtcagcgagaggtggaacagtatcagagactggttctccctgcccgttcaggatgaggccgcacagtgctttcgcgttttttatcagccggatgaagccatgactccctccgacaggttgaagaactttttaaaactgaaagcactggcctctccgggacgccaggataatttcaccacagagcgaatactcggtaccggtgaaaccatctgcatgattgcctccggtaaaaacagcgacttcccccccgtcacacttcacctgagcgaccaggaatggcatatgacacaatctcaggaagagacggctgactgcacagtattgccgcttagcgctggtaacccggcagcgaccaccgcagaagagagcaccggagcaagccgaaaaggaagccgcattacaaatactcagattcaggcatggcgggacctgtcaccggaggcgaaacgagaggccggcggctggaaaacatgggcgcagcctcaggggatatccatcagttgtgctaaacaatatctgacaaatacagggctgacctcccgcggagtggagcggctgcagccgccaggagagaagggttcctccatcacaaatgcacagattcaggcatggcgggacctgtcaccggaggcgaaacgagaggccggcggctggaaaacatgggcgcagcctcaggggatatccatcagttgtgctaaacaatatctgacaaatacagggctgacctcccgcggagtggagcggctgcagccgccaggagagaagggttcctccatcacaaatgcacagattcaggcatggcgggacctgtcaccggaggcgaaacgagaggccggcggctggataaagtgggtacaagcacagggaatatccatcagtagtactaaacaatatctgacaaatgcagggctgacctccctcggagtggaacggctgcagccgccaggagagaagggttcctccatcacaaatgcacagattcagacatggagggacctgccacaggaagtgaaacgcgaggcaggcggctggataaagtgggtacaagcgcagggaatatccatcgcaagtgccggaaaatttctgacaagcaccgggctgaccccctttggtacaaatcgcctgaaacaaccaggagaaagaggtacccctattacaaatcagcagattcgagcgtggcagcacctgccacaggaagcgaaacgcgaggcaggcgggtggatgacgtgggcacaggctcaggggataaccatcgacagtgccggagcctttctgaccaacagcgggctgaccccctttggtacagagcgcctgaaaccgcccggggtaagaggtacctctattacaaatcagcagattcggacgtggcgggacctgccgcagaaggagaaacacatagctggcggctggatgacgtgggcacaggcacagggcatagacattagtagtgcaagtgcctatctgacaaacacaggactgaagccccggggagtggtacgactgcaacctcccggggagaggggctcccccataacagaggcgcaacttctggcatggttgaacatgtcacaggaggaacgccggacatcaggtggatgggccacatgggcgcaggctcaggggatatcttacagaagcgcaagaaagtatctggcaccgaccgacattgagatgccattcagaggcacatcatgtccgtcgccgtcctcaaccgtcacgagtgacagcccacaggcatcaacatccgcagcaacaaccacaggcgataagatagccgtcagcatgagtacccccccggagcgcagcggggaaaaacggtcgcttccctcgactaaagaggatacctccgccccgccggcaaaacagattaaggaagaggaagatgacgttacctggcgaacacaccagataaacaataaactgcccattctgcaacactggcgtgacccgacaatatcggttatggcccaggcggaaggcaggattgaaaccctgcaggtcacacgctggggtcctctttttaacctgttatcccggcagatcaaagctaggattaatcaggagattcgctggtttctgcaaaatgaaggaaggcatgatgcgcggatgaatgaaatgatgtccgtcgctatcccccttgatgacagcgacggttacagggggcgtacagtctacgcacgaaccgttctggcggcgtttaccgtactgggcccctactccggccgcctgctggacagtgaaaaggtacggtgtaaatacgaaaaagaatatgggaaggaagccggtaattattattttgccacgcgaagccaggaacgcctggtatccgcctggccggaaggaaatatcctcagcctgattaacagtccggcatttacccaccggacagcggagacagaagcaagacagaacgtcagcgcggtgcttgtcgggaagaatatcaacttttacgtcaccacacgcgacatcagcgccggggaagaactgtggtttgattacggaccagactaccggcattttgagtcaggtgaagagctacgttcagcgcaggttaaggaggagccgtcttctccagaggaaggatag

SEQ ID NO: 375475 - DNA, 363 bp, Salmonella enterica
atgcgggatattcataaggttcttgaattatggggggcatgggtagccaataatcatgaagatgtggtctggtcacatatcgccgcaggctttaaggggcttattccgtcgaaagttaaattccgtccgcaatgctgtgatgatgatgcgatgatcatttgtggatgcatggcccgcctgaataaaaataacagcgacctgcatgatttgctgatggactattatgtgatgggaatgacgttcatgatgctggcccgaaagcatggatgctctgattgccggataggtcgactgcttcagaaagccgaagggataattgatggtatgctgatgatgcttgatatcaggctggaaatggaataa

SEQ ID NO: 375476 - DNA, 309 bp, Salmonella enterica
atgctcttatctgaaatgaatatttaccgcagtaaaaaatggcttgcttccgtcgggcagattgaacagtgcgtgttgtgcgggcggtggggagcgcaggttgcacacatgaatgagggcaaaggcatgggaatgaaaacggatgactgcgctacggcggctatttgtcaggaatgccatcatgaaatcgataacggcagtcacctgagcagagaagagcgccggtgtctgatgaacagggcgatcgtactgacagtgattaaactggtccgttgtgggctgataactccggcaactattaaggggtaa

SEQ ID NO: 375477 - DNA, 600 bp, Salmonella enterica
atggcgcatttacaactggtcaagcaaacctcatcagggcttctgctcccggcgacgccggagagtggggatttcctgcgctcagtaaaaatcggtgagtggatacacgccgattttaagcgtgtccgcaactacgcctttcataaacgcttttttaaactccttcagcttggtttcgactactggacgccaactggcggcacggtcacatcgcgggaacagaaacttatctccggattcgttaattttctttgcgactccgcaggccaggaatataccccggcccttaacgaggcggcggaacagtacctccataacgtagctaccctgcgaaccggggacgtcgcccttcttaaatctttcgatgccttccgggaatgggtaaccgttcaggccgggttttataccgagcatttttatccggatggcagccgcgggcgccgggcgaaatccatagcgttcgccagtatggacgaaaccgagtttcaacaggtctataaggctgtgctgaacgtcctgtggaactggattctgtttcgtaaattttcctctccggaagaagttgaaaacgtggccgcgcatctgctggagttcgcatga

SEQ ID NO: 375478 - DNA, 156 bp, Salmonella enterica; identical to SEQ ID NO: 374614

SEQ ID NO: 375479 - DNA, 753 bp, Salmonella enterica
atgaaaaatatcgcagatagcggaattctggacagaatcaggaaactggcgccacagtctgccgaacgcgcagcaccgttccggacgccggaggagtggcgggaatggcaactcgccgaagggcgcaggagttgcgaagaaattgatcgtcagaatcgtcaggcgagggcagaaaaaatcttcggtcgggccgggattcaacggctgcatcgcggatgctcgtttgcaaattaccggatacagaacgacggccagcgccatgcactcagtcaggctaaatccattgctggtgaactggatactggctgcacgaacttcgtgttcagcgggaatcccggtaccggaaaaaatcatctggccgctgccattggcaatcgtctgatgaatgccggacgtagtgtgattgttatcaccgtcgccgatgtgatgagtgcgcttcatgccagctacgatgacgggaaatctggcgagaaatttctgcgtgaattgtgcggggttgatctgctcatcctcgatgaggttggcgtgcaacgtgagaccaggaacgaacaggtaacgctgaatcaaattatcgatcgccggacggcatccctgcgcagcgtcggaatgctgacaaatcttaaccacgaggcgctgacgaatctggcaggccagcgggttatggacagaatgaccatgaatggtgggcggtgggtgaattttgactgggggagctggcgcccgaacgtcagctatctcaggacggtgaaataa

SEQ ID NO: 375480 - DNA, 870 bp, Salmonella enterica
atgcgtgattacggaaaggtgaattcatccttctggaccagcgaaagcatacgctcgctttccgatgatggccggatgctctcgttatatctgttaaccagtccccacgccaatatgaccggctgtttccgtctccccgacgggtacgtttgtgaggatttgcaatgggataaaaatagggtatcagaagggtttgaagaattatcccgtaatggttttgccatacgggataaagctacccgatgggtgttaattcccggttatctggaatggaatggttttgaaaacccgaatgtagccattgcggcgttgaaattattccgtgatgtaccggataaaatagccattaagtcacagttagctgatggtatgaggcaggctatatcaaggtttgaaccgggtaaattaaacggtttcgaaagggttcttgaagggtttcaaacggtcgttgggactccagagccagagccagaaccagaaccagaaccagatccgatctctcctggttcatcgccgaaaaaaaacgatgagccaggcgggagttatccggctgagtttgaactggtctggcaggaatatccgaagcgggcaggtgccaatccgaaaaaatctgcattcaaagcctggaatgcccgacgacgggagggcgtcctccccggcgatatgctcgacggtgtccggcgctacgtggcgtatctcggtagtacgcacaaggctggttctgaattcgtgcaacaggcagcgacatttttcgggccggacaggcattttgaaaatcactgggatattcctgtgaggggaggcagcggtatgcctggtatcccggtttcgccgccggataaaaccattccaccgggtttcagggggtga

SEQ ID NO: 375481 - DNA, 333 bp, Salmonella enterica
atgggacgactggctaagctatgtggctggtcggggtcgtcacgcattgcaaattacgaggctggaacgcggagtattggagctgaggatgccattacgcttggccaagtgcttggcatttcccccgcagaactaatgttcggtaagcaggaaaatgccaactcatggctgagtgataaccaacaaaagctactcgaattgtttaatcaactgccagcatcagagcaaacacgtatgattgatctgtttgaaatcagattaaaagaaattgatgagtatgtagaacaataccttagaagcagacagcataaaaaagatactccatcctcttga

SEQ ID NO: 375482 - DNA, 375 bp, Salmonella enterica
atgtctgatacaaccagcccttttgtttttcctgaaaaagcagctcacgaagtggttcttgagttaatcagagcgggcaaaattagttacgcaagtgatgcttcggatgttttacacatatgcttaaccactaccgcgctgagagggatcgacctcaacaggaagataaagcttcgtaaacgcctctctcacctcatgagccagtttctcgactggctctttatctgctcgctggtcattgattttcatttttctacgcagagtagaagctgcgatagtctgaacctctactggaagttcttgcatcttcatctttcacctcatccgcttaacgcccggcggcggaacgttttatctactgcgcttgttacttaa

SEQ ID NO: 375483 - DNA, 285 bp, Salmonella enterica
atgatacctgtcattacacctcgttccgactggatgcgcagtccggctaaacagcagactgcaataaacagaaaaccgggattgattcgtaaaatttatactctactcacccagaaaggagacccgacattaattaactgcgcatattgtcagaaagcaataccggaagagaccgcatacgaatatgaactgatatatatgcacggaacgcttatttcacgtaaaaaacaaaaatattgcagtaaacgctgtgccagccatgaccagatggcacatgaactttaa

SEQ ID NO: 375484 - DNA, 831 bp, Salmonella enterica
atgcctaaacagccacctattgcaaaagccgacctgcaaaaaacacagggagcacgcaccccgacggcagtgaaaaagaacaacgatgtgatcagctttatcaaccagccttccatgaaagaacaactggcggcggccatgccccgccacatgacagcggaacgcatgatccggatagccacaacggaaatccgaaaagttccggcgctgggtgactgtgacaccatgagttttgtcagcgccatcgttcagtgttcccagcttgggctggagcccggcggcgcgctcggtcatgcctatctgctgccgttcggaaacaaaaacgaaaagtcaggcaaaaaaaacgttcagttaattattggctaccggggaatgatcgaccttgcccgccgttccggacagattgccagcctttccgcgcgcgtcgtccgcgaaggtgacgatttcagcttcgagtttggtctggaagagaagttggtacaccgtccgggtgagaacgaagatgcaccggttactcatgtctatgccgttgcccgccttaaagatggcggcacacagtttgaggtaatgacccgtaaacagatagagctggtccgggcacagagcaaagccggtaacaacggcccgtgggttactcactgggaggaaatggcaaaaaaaaccgccatacgccgcctgttcaaatacctgcctgtatccattgagatccagcgcgcggtatcaatggacgaaaaggagacgctgactatcgatccggctgatgcgtctgtcatcacaggtgagtacagcgtcgtcgaaaacgctggcgtggaagagaacgtgaccgcataa

SEQ ID NO: 375485 - DNA, 321 bp, Salmonella enterica
atgaaaaaaatcactgcattacccgtagagcgcgataattacggctactggacacatccgttatacgatgatttttgtgctgatcgcgaggttatatctctggacgagtttaatgcctggctggaggccaatagtctggaatggaaagtctcttatcgggatgatgaggaaattgatcctgacgttgacggatacgacatttctgcctggcaaccagaagcccctgaaggtgaaggatggtttgtcggttccattcacgacaccgaagacggcgcggtctgtatctggttacgcaacgtgcaggacggtcattatgagtaa

SEQ ID NO: 375486 - DNA, 333 bp, Salmonella enterica
atgagtaacaaaattgtctttgtgaacggcaaatcaaagtgtggttgtgtaatggcattcagtgacggcggcggcgaatactcagacgttcacacaataatcccgtgtgccgaacattccatgcctgaatcggcacttactcagcgtgatgatatgcgacaggtgcgcgaacaactggaagaagcagaaaagcaagtggaagaattaacgatgtggattaagcgtctggcccactcgcttagaaacgccaggccgaacagcaagttacacggcaccgcaatgaactatttgagccgtaaagggttaatcagtgtggaggatgtattgcgatga

SEQ ID NO: 375487 - DNA, 513 bp, Salmonella enterica
atgagcaataacaaactaacagacaggaaaatagctgaaattctggcgcgcgctgaaatctgcgacgattcagttttgactgactacaccgatattgcagcggcgatgcgagagctacaggaacgccgcaggctggacgggatacagcatgctgtctgtgaggtgtgtggagtgccgtgtaataatcctaatcacccacaaatggctgtggcacatgagtatagcgcccagccagtgccggtagtgtcattttatcgtgatggcattgaggccgcggcttcctgggtagataagcagagacaagcattcgataacgaacacggacggtacgactctgacaccggtgcgtttgagtttggtaatgacacccaacacgattggtcatacgcattagctgagttagcagatggcatccggggattgcatccaaacgcggggggcaattctccggtaattccggatggctggaaactggcccccgaaaaggcagacgaagacatgattgctgaatga

SEQ ID NO: 375488 - DNA, 1032 bp, Salmonella enterica
atgtcgaaccgggtaatgaccacactcgaggagatggtgccgcgggtagaaatttacagcattgatgaggctttttgtgatctgacgggggtacgaaactgccgggatctgacagatttcgggcgcgagataagagcgacggtcctgaagcgcacgcacctgactgtcggtgtaggcattgcccagacgaaaacccttgccaagctggctaatcatgctgcgaaaaagtggcagcgccagaccggcggggtggttgacttgtcgaacatcgatcgccagcgtcggctgctggccctgatacccgtagaggatgtctggggtgtcggcaggcgcatcagtaagaagctcaatgccctgggcatcaagactgctctcgatctctctgaacaaagtacctggatcatcaggaaacacttcaatgtcgtgctggagcgtaccgtgagagagcttcgcggagagccatgtctggagcttgaagagtttgcgccggcaaagcaggaaatcgtttgtagccgctctttcggcgagcgggtcacagactatgaggaaatgcgccaggctatttacagctacgctgcgcgcgcggcagaaaaactccgcggcgagcaccagtactgccgtttcatctcaacattcgtcaaaacatccccctttgccctgaacgagccctactacggtaacagcgccgcggtgacgcttctcacccccacgcaggattcacgcgacattatcaatgcggctgtgaagtgcctggataaaatctggcgcgacggccatcgctaccagaaagcgggggtgatgctgggtgacttcttcagtcagggcgtagcgcaactcaaccttttcgacgataacgcgccgcgcgccggtagtgcgaagttgatggaagtactggaccatcttaacgcaaaagacgggaaggggacgctgtacttcgccgggcaggggatgtcgcaacagtgggctatgaagcgagaaatgctttcgcctcggtacaccacaagatactctgatctactgcgtgttaagtaa

SEQ ID NO: 375489 - DNA, 1086 bp, Salmonella enterica
atgaattggcatttgtattctctttcgacagaaaaactacagacgatggttatcgcccagcatgggaaaataggtgatgcaataccagcgctggatgttttccggagcggtatcaaaactgcttatacaatgtactgggaaagtcgtcttacatcacttcatcgagtagttgtcactcgtaaccgatacgctcagcttgttgaatacgtcattaaagggcataacgaaactttcaaactgtattcaggaattgaggcaacccttagccagcgttcaaaattgttaagggagattgttgatgagacctccatcgtaaatgttgatgatgttctaactgctcgagcccaacgcttatcgaactgtaaccgccaggcaatggccattattcagcgtgttgctgcgctacaggatattgttagttggatcaggagcaatcatgcgcctgaaagcacaattatggggttggcagaagaatatgaacgagcagtgctgctgggaaaactaacttgtggggaaatattcactctttatgctgattctgccgccgcgatgaactgtttaaaagtactttctgaacaggtggaaggcgctactgaagaagagcgccagacgattacagaaccacttagagaggaaatcaactggagatcctttcagcgtagccttatcagtgcgacgaaagagcattgcctcagcccgcaacttatcgtactgcagcatatgctggaaagggctaatgtcgaacgcaacagaagtaattcggtttttactgcttcagttaagcagtcggaccgtataaaaatgacgctattatctgaaccgcggtgtgcgttagaattccctgttagtgtatcttttgagaatactatggtctgggttgaactggcagatggaaggatcgtaggggctccacttaaatggtttccgaaactacgcgaagcagggcggttggaacgtgaacaataccagatgactcccgtaagcctcatatggcgaaccttggacactcaaatccatatggatgacctctttgacggagacaacaatccgctatacctaatagatgacactgaccaaacaaattga

SEQ ID NO: 375490 - DNA, 600 bp, Salmonella enterica
atgaagcttactgagcatcagcaaaatctcctgaaaaggattaacaaccttgcagtttcgctcatgcctgagtttgaagacagaaaccaagctataaaggcgcttaccatgaatgatagttctctgatgcaactgctctgctctatcctgatggaacagagtacccatgaatcagattacgcagtacgtacagttcgtcgacgtcgagagaatctggaagatttttacatgagccttgaagagcttggtggtgtactgaaaatcaacgatgttgccgatattcttggaatttctcgtcaatcggtaaaagtacgcgtgaacaataatcaacttatcgcatttaaacaaaacgaggattttatcttccctgctttccagtttaccgatagtgggttactacacggttttgaggaagtcatggcagcatttgataaagatactcatccgatgctgcgtctaggggtactaaaagcaccgattagcctcggtcagggtgtggtgaaaaatcctattcaaatcatgcaggacggtgctaagccgaacgagatgatactggctattcgcgcggccaatcaatttggtagtcacatcgcaagttga

SEQ ID NO: 375491 - DNA, 315 bp, Salmonella enterica
atgcattttaaaactatcgttatcgtcgcagctttcttgttttcagtaagttcacaagcagattcttatgacatacatcgcacgatcgtgggagacagcacttcaactgataacattgcgcaaatcaaaatgctaccccaacaacggtcctcatctggtgctacaaatgtttacgccaggaattctccaaccttgctgccttcctcgcccaaaagcgttaatgacgtaacagataacgtcaactcgcacgatgcgcttgagcatgaaagcgtggtatttttagcgcagggcatgagtggatttattaccttttag

SEQ ID NO: 375492 - DNA, 870 bp, Salmonella enterica
atgagcataatcgacactgacaggttgcagctctttttatggcgtaaatatttaccctggttacaacgcaatagtgcagcgaaaggaacgccacacgactatttttccgtcttttttaaagattcggataataatcgctatatcctcaaggacgtgcagggtttagataacgggcaggatggaaagttatcattatcctctttgtaccagagcagtgacgttgataaaaaatttgtacacgttactgacatggaaacagagatagtccattacaaaaaaaatcatacattacgttataaaagcatattccagtttgtcattgatcacacgctaaaaatcattacgctaaaaacacagattgcacgtttaaaaggtcgactggtttctggagcaaaatctgacacagagactataagccgcgatcgttttaacttactccggcttctggtggctagctatgtaaatcaacggccatcacgagcctcttccggtttcagtcgggatgaaatgatcgccttactttatggaacattgtggtataagcacattaaaaatgaggcattcagaagaaaaataacgctgctgctggagtcactggtgattagcggcgatttaactgaaagtcagggtaactattacgttcagggtcaggcgataaccaccctcgtagagtatgaaaaagaggatcgccgcgtttcccaacaacaaaaaatgcacaaaaatattgtccgctttatgtttgttatcacagtggcaaccctactgatcattctggttttgctggcgatggctgggatcgtggatttacaggtcatctggcaaaagatcttgcaaataaaacccgtcagatttctgctgaagttcatctaa

SEQ ID NO: 375493 - DNA, 897 bp, Salmonella enterica
atggaatataaattggatatcaagatgttaaggaccattcatacgctatgcgcctgcggtagcgtagtgcagacggcgaaaatcttaggcgtttcacccggagctatcagttacaccatcaataaagcgagaaaaatcaccggttcagccctcttttatcgttccagaaccaggatggcaccgaacagtctggccgaagaactcagccacaaatatcagaaaatagcgaaagatattgatgtggacaatgtcctttccatgaaagataaaacagtttttaccgttagctgctattcggtgcttgagttgctgctttcgaccacgttaattgctaccacagaatcgctaccccgcatcaatttttgcacatctgtcgagaacgatgaggccagaatagccagaatcagaaataaagaagtggatattgatattggaacccgcttaccgattaataactctatcattcaactgagattttttagcagcggaatatctgccattgtgcgacacgatcatcccgtcataggtgaaacttttacgatgtctgactggacgcagcatcagcatgcaatctggtcccgaggtatgcatctgattagcgacaacgtagagcaaacaaatcgatttaacgccctgtttcaaacacgcaatgtcgcctttgtcgccagcagtacgcttaatctggtgatgctttgcgcccacagcgaccttatcattttattgccgacggtgatcgcacaaaatcttcgggctttgttgccaataaaagtactggctgtaccaccggagcttgaaatgtcttatgagtgttacgtccattaccatcattcgctttccaccaacccgctgcttggtgaattaatccagcactttcaggcctcagtaagtgaaagctaa

SEQ ID NO: 375494 - DNA, 555 bp, Salmonella enterica
atgtaccttataagtcacggcattattatgagtgctattttattaagcgataattactacctgtgctcaggcgtgcagggatcacacgtcgagaccttatttattcgcggcgaactcgaaattgaaaaactccggggcgcaagcaccttcagcgatattatcattgcgattgaacacgacagtcttcggaataacgtcatcagagccatcaaaaaagccaaatcgcggtatatcgttttactgagcgccattgagtcagactgttatgtcaaaattgataatatcatctattcctcactacgttttaacctgcaacccctgcagtacctggtggagttttatcataccctgcgccagcacacgctcactcgcagagaatgtgaggtgttaaagctggtgcaccttgaaaatcataaaattgctaaacaccttaaactgtcgcagaaaaccaccagtacctatcgcgtcaaaatccaggaaaaattcaatatgcgcgctaaaaattcactggcaatgcaaagagtaaagtcggccatcctcgatcagaaaatataa

SEQ ID NO: 375495 - DNA, 1188 bp, Salmonella enterica
atgagaaaatttacactgattggtcttggtctgtttttatctccggtaacccatgccagtgggctctacttttatgaaattggtacggaagacacggcgcttgcaggggcggggcaggcggcgcgagcacaggatgcgtcaaccatcgtcaccaacccggccgggatgacccgtctgccggaccacatgtttaccggcggcgtgcagttgatggacggggatatctcctaccggctggaggatgagtcaggtaggcaaagtcctggcgatattatgagtgtatttcccaacgccagcggcttttacacccaaaaaattaatgacgatctctatgccgggattggcatgtacggtaactatggcctggccaccgactacggtgagtgggcaggcgatcggttgcttaagaagagcgcgatggtggccctgactttaagcccttcgctggcctggaagctgaacgaccgggtctcggtagggggatcgatcaacgtgaactacggtcttctttcactcacccgcaacgtcgacggcgatgatgagaccgaaaaagatcacgactgggcgatgagctatcgccttggcttattaatggatctcaccgaacagacgcgagcgggtattacctggaccagtaaaaccgagtatgactttgatattgatgcgaaggcccgtttcccgaacttaccgaatgttgaatacgatctgccgatatcggcacaggtcagggcaccgcagcaaattatgttaagtctggtgcacgacctcaaccagacgtggtcggtgatgggcgatctgggctggcaggactggagccagtttggcagtccgcagatcagggttgtggggcaggatcttgataagaaaaaccgccttaaggactcctggcatacggcgctgggggggcagtatcgcccgacagagcagtggcgtcttaatgcgggggtagcgtttgacagcaccatttataaatcgcagggcgacgctgcgctgtctttacccaccggggatgagtggcgtttcgccacgggggcgcaatatcaggtcacgccgcaaagtaatatcggtttcgcggtatcttatctgcatatgcaatcttcccgggtacagtcgccagcgctactgaaaggcagctacgacgatccctatctgtggtttgccagcctgaactacagctatcagttttaa

SEQ ID NO: 375496 - DNA, 1107 bp, Salmonella enterica
atgggtaaatggctgatgcttttatggatggtggcagggttcgcctgtgccgacgaggaactgttgcccgttaagcaggcacggaaggtctaccccgtcgtcagccatctttcgccgccggaatcactgcgcccttgctgcgcgtttggctatgaccttcacgtccgcgccgtaggcgtccccattcctgtctaccagattggcaacgtcctgtcgctggatacgctgggcagccatcactataacgacagcgcacttggggccgtgaaaaacattgtcgggttaagcgaagagaaaaacggcctgatctacacccaccgcggcggatttatcgacgtcgcccacgttcgtgatacggcagacaatacgttttatctcttctcccgcatccttcctgaactggggcgaggcggtcgccttttttacagtgaagagcttggcgttcgccgggtgcagctccgggcattcacgccgccatcagccatgcctcagcgctacagccttgcggcctggctcgccggtcatctggcgtttgaactggcccagtggcacgagatagcgcagtggtacggttttcagtccgtgcccggtttttcagaagagatttccgccttctcaccggaagacttgtattcaaacctgttgggcgcacggctggccatcaatgtcattttacaggggaaggccgactccgttgcgcggtataacgccgccctggacgaggctttacgccacgcgctgctgcaacttggcgttaccacggtaaccgaaaccgaaagaaagtttcgcgagctggacggcgactggtggaacagcaagcgccgggtgccggataaattcctggtgctaaagcgcaactacaatcttgaacataaccgcctgccgacaccggtcgcttatgaagaaacggatccttatatgctcacgatgcctgccgtggtggcggggtatcagctctcccgtctcggagagctacagatttatccgggggcagatatgcagtctcttccggcgccaaaggcattttatggcccctcgcaatttcagaggctggcggatagggcgaaagaggcggataaaacgcagctcgaacgatttcagaaataa

SEQ ID NO: 375497 - DNA, 1131 bp, Salmonella enterica
atgaaaccctgtcgcagcatgctgatattgtccctgacgctgacggcatggccgtcgggggccatggtgctggatcagaaatcggtggatgcgctgcttgcaaaactgggggccgacaaccagtacgatccgcagaaaggcatcgactggagcgtgctgcctggcccgttctataccccggagctaaagctggggttgggcatggcggtggcgggtatttaccgggttgacccaaacgataccaccacccagaactcgtcactctcttttaccggctacgtgagcgccagcggtgcgttaggacttggcttaagcagttacaccttcttcaccgacgatcgctggcgtttatttgtcgacggttcgctgaacagagtcccgaccggtttctgggggattggctacgatgccgcccagggtaatgaacagaagtacaccagtcacgcctttcgggtgcatccggtgctgatgcgcgaagtcgtagaagatctctatctcggtgtcggctgggatttttccacgctacaggcggacattgacgatccgcacccgggagatacctttacgcgctatgaggcgcagacatcgcctgtctcatccggcgtcacggtcagcctgaattacgacacccgtgacgtggtgacccggccgcaacgcggacaattgtttaaggtggaatacacctggtttgacccgtcagtgggggccgacacccatttcaacgcgagcgagtggcaatacgattattaccatctgctgaatgaaatgagcatgctggcctttgatctctgggggcgttttacgcagggcagcgtcccctgggacaggctgtcgatggccggggatgaccgccgtctgcgcggttactttcaggggcgctatcgggacaacgatgtggtaagcggacaggtggagtaccggcgaaaactgacctggcggcacggatatgtgctctggctgggagctggcgcggtgggaaaacgcatcagcgatctggacaatcatccgctattgtcgacggcaggggtagggtaccgattcgaagtcaaaccggcgatgaaccttcgactggatctggggttcggcaaaaagagtgcaggtttctattttcaggttgcggaggctttctga

SEQ ID NO: 375498 - DNA, 939 bp, Salmonella enterica
atgagatggaataacgtgatggtgccgtttctgctggtctcgggctttgcatcggcagcggatacagaagaacggacttttcccatctggggtgacgaggccagggctcggggatattccattccgctgccttttggcgtcaacctcagctatatgaacatgcgtcagaacatcgatgtcgacagcattggtttttcaggcctggcgctgggcgaccatgctattccaaccgacatgtttaatatcgatgccgggcatacccgcgaacagagtaaatcagaaaacctgcgtctcgatatgtgggtattcccgtttctcaatatctatggcctggtggggcatacccgcggatcgtccgtgtcgaacgtctctgtggatgccgatccctcgcgctataccggtgtcgaccgggtgatagcctcatcggtccatcagctttaccagagcagtgaactgcaggatatcgattttattctcgactttaagggtactacctggggcaccggcatcaccctggcagggggatacgaaaactggtttgcgctggtcgatagcaactacacacgcaccgattttgacattctcgatggcaaaatctcggcgctgacgatttcaccccgcgtgggttaccgctttagcttccagggcccggcgggcgagtcgcatcttggcgtttgggtcgggagcatgtatcaggatgtgcagcaggagtttcgcggcagcctgtcggatctgcatatgcctgcccaactgcaaccgctgattaactccgtgaaccagaacgatgacgggcgattcgacgtaaagcagaagctgacgtcaccctggaatatgctgctgggtgcccagtttgaaatgacgccgcattttaacgtcctcaccgaattcggcttcaatcagcgcaacagcttctttgtggccggggaataccgtttctga

SEQ ID NO: 375499 - DNA, 1128 bp, Salmonella enterica
atgaacaggatgctgccgggccttttgtcatggatatgtcttctttgctggcatgtacaagccgttgatctgatcgatcctgaagacgggatgctcgacatgagccgccatcttcaggacaacccgttgggttttttacccgttccggtggttataacggagcctgccgtaggctatggcggcggcctgtttggcctgtttctgcacggcaaaggcacccaggtcgacgggcagtttattccccctgcgatgaccgcgctcggtggtggcgggaccgaaaacggtacctggtttgtcggcggtggtcaccggcggacatggcaagatgaccacatccgctacctgattgccgggggctatgccgacatcaatcttgatatctattctggcgatgtggccggtttcagccgcaataatgccatcaacaccgaaacccagggctacggcggcacacaaaagctgctttttcgcatgggggattcgccggtatttcttggcgcgtcccagttctgggcgaagatggatatctcggccaaaaataatccggttattgatcgcgtatggcaacgcgtgttgggtgataacagcaccacgtcggcgctgggattcgttgcggaatatgacaccaccgataacttcttctggccagggcaagggatggcgctgagtggggaataccagttttacggccacttcctgggtggcgattaccgctacgatctgctgaccctcgacggcaaatttttcctgccgttgaactccatctggacgctgtcgctggccggaaattaccagatgctctcccaacaggatcaacacctgccgccgatggcccgaccttatatcaagctgcgggggatctcgagctaccgctatcaggccgatgacgtcagtaccctgcaggcccagcttggctggcagatgacgccgcgctggatactgcagggctttgtcggggccgggagtgccgcagacagcgcgagcgatctctacaacacaacggaaatcgcctggggaacgggatttcgctatctcatcgcccgcgagtacggcttgcatacagggattgacgtcgccttcagtgataacgaacaggcggtctattttaacgtgggctctggcctgtaa

SEQ ID NO: 375500 - DNA, 9693 bp, Salmonella enterica
atgaataaaatctattgtcatgtatggagccacgtcgcaggctgctttatcgcagtaagcgaactttcaacttcgcattgtggtaaaacacgttctcgtcggcggttattagcaaccggtgccgtcgcggtggtactttctggtttagcatgtccggctaatgcagacgatgtgaactgggcgacggcttatcccagttatttattcccgaccgatcccgcttataactttgataccgtaattgctaccggtgttggctttaatatcgacaatgaggttttaccgaatcattatgtcccgggcactacgctcaatattctcggcccgatcccgcagctgcccgatgtctcgtcgggtaatggcgtgacggggcgcgccgtttcagtagtgagtgctttgcccggcgccattgccccggaaggggatcggatcctcaccatcaccgcgacggattcccaaggaacggttaccccgattacggcggcaaatatcagtgagtttacctactctccaaacccggctaacccgcagcagaatcaggaactcaatgttgaagttcccggtctggacggcagtttccaggtcatcagtatttacgactcttccaccttcgtttccgctgacgatactcctgtcggcaacatgcagttatcggtttacgatcctgcctccgtgcggatcatgaatcagtttggcatcgttgcaataggtactgacggtgggacggcgaacatcaatattggggcagataccacaggtgcgaccccgattgcggcggccgctaatactctggatctgctgaccaaagactcgaccctggcccgcgccgacggggatggtaccgccgccagtgccgtcaactggcagtctgataattatattcatttccgccctgcggcggtgatcagcacccagacccagagcgtgggcgcacaaagtacccagtacaactacaccctgaccttaccgaattacacagaactgcccggcggacgggtgattcagctgggaacccgcgagtttaacattacctcttccgatgatattgccgatgtgaacaactatctcaccggtcagggtgcctatgcgggtagcccacaaatccagtactggctgacggcaggtgccagcgtacagggcgaagtgattgactcggcggttgaagcacagacggtgtacaacgcgatcattaccggtcttctcaatcaggcacaaagcacccagataaacctctcatataacgtctgggaagatcggctgacccataccaacaacgcaacgatcggcactggcgacttacgggttatttatgccaatggtgatggggcgaccggcacggtgacgtcggacagcagcctggccgtcgatggtgcctcggcggtaatggaagccttcgatggtggcgtcatcactaacaatggcaccatcaatgcctggcgcagcagcagtagcagcccaaccactatcgcgatgctggcccagtacgggaatgcgattaacaccggagtgattaatgccgggctatttctggaaaaagatgggaccaaccagaatgtgagcaatgccggtagcgtggggatggccggattgaccgatgccacgctcagcaaccagggcatcatcaacgttgcggtgacggataacgcgtctcataacgcatgggggatggcggtaggcgacaacggcactctcaccaatagcggctacattaccctgacaggcaacagccgcaatccggatggtcgggcgggcgggtatgcgattttaagtgactccaccgggacggtcaccaacgcaggacgcatttttattggtggcaccccgatcaccaccatcgcggtacctcaggccattaatctggtcggcagcggcaatttatccgccgggatgtataccaccggcaaaggcagcatggttaacaccggcaccatcacgctgctgtccaaaacccgcaatgctgccgccatgctggttgatggcggcacagaggatgtcaccaacaacggacggctgaatgtcctgggtaccttaacgtccacgtcaagcggagatatctctgcggcggccaactatgggatgtatgtcaaggacaatggcggtgtggtcaccaataacggcagcatcttcgtcaatggtgacaataacattgccctcaacgtgctggcgcaaaccgccgatgcgtctctgaattccacgaccagcggcgcgatcattgttggtagcgcgggggataccggcggcaccgataaccagccttacacctatcgaaattatgcggtgtatgccgaagggttaaacaacaatgcggcacaggtgacgctcgattccgatatcagtctgctgtcagcaggggctatcggcgtacatgcccgcggcaatgccactattgatatcggcgcggatgcgtcactggcgttccagaactctcagcaaatcggctattacgcctggggccagggcgcgagtatcaacatcaccaacgccaccattaccgataacgcccagactgactccatcctgttcgccgtcgatcatggggcaacgtttaacggcgataccggcacgggcagcagttataacctgcaggtctcaggtgccggatctactggggtcttcgccaatggcgtggacgatttgaacaacgccgatcctgcggatgatgtcgctacgcagttaaccaccggcgcggcgacgatcgcggtttctggcgccaacgcggtgggcgtcaaggtgaccggcggggcaaacggggccatcaccgacggggccattaccctggcaggtgataacaccaccgccgtgttggtggatggccgcaactacaatattgatgccaccatcgacccgcagccacgggaaaccctggtgacttctgatgcggttatagcctctgccgccgggcagtcgggcattgtcggctacaacgtcggctacctcggcaatctgacgttaaatgccggggcggcgatcaatcttctcggcgataacagcaccgggatcatcctgcacaacaacggccaggcgacggttacggccccggtcagcgtcgcaggcaccaataacattggcgtggatattcagaacgcgggcctgctcaacaacagtggcgctatcagcgtgtcgggagcaacgggcagcgggaacatcggtctgcgcgtccagggggcgggggcaacggtcagccagctcggcaccgtcactgccaacggcggtctggcggcggtgcaactggcgggcgagggtgccaccctcaccgttaacggtacgggaaatcagatcaccgccagcaacggcgccgacggggtgcgcatcgacagcaccggggcctcctccttcaacgccagcaacaccaccattgacgtgacgggaaccggcgcaggcattaataacaacgccagctccagtgatatcaacctgaacaatgtgacgatcaattcaggcgacggcccggcgatccgcacggcggtgacctttacagcggaaggcagcggcaacgttctgaacgtggcgggcagcggcagtgggtttgcttttatgcaggcagacggctcgcaaaccaccggcgacctgaccatcggcaccggctacaccatcaacggtaacggcaccgacagcgtcgggatcctcgcgcgcacctccgggaacgtgaattcgggtacctccatcaccatgggcgccaccgccggggcggcgattgaggcgaccaatgccagcagcctgagcaacagcggcatcattacgaccagcagcgacaccggcagcaccatcctggcgcagaacgcgtcggcattcagcaacagcggaaccattacctcaaccagcaccaccaatccccagtcgctgattgccctgaacggaaccgcatccagtcgtgctgtcagcaataccggaaccatcgtcagtcaaagtgaagaggccacggtgattgatgcttccggttcggcaaataacacaatttccaacagcggcacgctgcgggctgccagtgattccgcccaggtggtgctgactggcagcggcaacgatgtcatgaacattaccgcaggaacgacacagggcgagatcacactcggtagtggtaacgatcgctttggtttcaccgcgggtgagttctctggcggcgtgacctttaccggaggagatggtaatgacaatgccacctttggcgatgtcagtctgtcgcgcgtcagccatgttctgagcgagggcggcaccaacaacgcgctgacctttaacaacacccacagcagcgccgggtcggcaaatatcggttcgctggcggcggacgatctgctgctgggtaccaatatcggcaccggctggagcacgttgacgctggatggcgatcccgcagacgtgcgcatcgtcaatgatctttcgctctcgggtgcagggcaaattaacgtcaacaatggcgcgaccttgcgcactggcgataacgcgaccgcgaccgcgaccggcgaagctacgatccgccagtacaacattgcaacggttggttcgaacagcctggtctcgtttgatggtgcggcggatcaaacctataccggggtgatttcaggctccgggggcatggagcgtatcggcggcggcgacaccattttgctgggcaacaacagctataccggcaatacattgatcggccccgattcagagctggcattgggcaatggcggaacgaccgggagtctgtcagaaactactaacatcaccgacaacggcctgttaaccgtcaaccgttccgataacgtgaccttaaacggggcgatctccgggtcaggagcgtttcgccagttgggcagcggcgtaacccgtcttggcggcaataacagctatgccggaaccaccaccgtcgagcagggcacgctgctgatcaacggcgtgcagaccggaaccggtctgaccacggtgaggtccggcactaccctcggcggctacggtacgctgggcggcgatgttgtctttgaaaccggcacggtattgcgtccgggcgacgacagccgcggaaatggcactggcgtgctgaccatcaacggcgatctgaccctggcgagtgataccgacagtcagttccagctcggtgaggtatacaccccgggcggggcgttaaacgatctggtgacggtggcgggcgatctcacgcttgatggggtcgtgaatgtcgcgctgaccgcaggcggcaccttcctgccgggggtctatcgcctgtttaactatggcggggcgctgatcaacaacaccatggacattggcaccttaccgccgaacgatgccgatctgtatgccatacagaccaatatcgcgaatcaggtgaacctggtgctggattttcctctgcccgcggatcagctgcagttctgggatggagacctgaacgccaccaaccacggtgatggcacttccgggaacggcattgtcgacggcggattcggtttctggaccgccttaatttccggcaccagtaacaactggacccaggctaacggggtgggcaatgccccctggtcgcaaactgcctttgcgatcttccagggcgaggccgataacgtgctggtcagcaatgcctttggcgacgttattaccagcggcatgcagttcaccaccgacggctatgtgctggcggccgatccggccaacccggattcgcagctgcacatcgttgccaccaatctggccggggcggggtcgccggataacgattacgatgcggtgggcgggacccacggcgacagttattttgtgacccgcgtgggcgacggcgcggcaggcgcagatgtcaccaccacgctgaacgttgatctggttcaggacggtaacgacgacggtgccattcgcctcctgaaaaccgatccgggtcgtctgattctcaacggcgataaccagtacagcggaggcacggaaatctggaacgggacgttacaggtgtcgaaagacagtagcctcggcgatgacggcacctttgtgctgatcaagaacggggctaccttccagactggagccgattacaccaccgaccgcctgtttattgttgatggcgtggcgggcggtgcgttcgacgtctacggccagaccttcacgccgcagggtggcatcggcggcaatggtccgctggcggtgaaagatacctccaccggaaccgacgatggggtgctggatctcaacgttgccaatacgtatcagggaaacaccaccgtcaccggcaaaaatggcaccggcaccctgaccgtcaatgccaatgccaccggcgcactgggtcgggccgacagtacggtcacgttgacggatgcggcacgcctgaatatcaacaacggcagcgccgcagagtctcatctctttaacgtcaacaacgccaccctggctttcaacgatgcggcgacggcggatggcagcacgatcaatctgacaaacggcaccctggaactgacggagaccagtagcggcggtgcgtcaaccatcagcgtcgatgccggttcccggatgatgctgtccggcagcgccgatgcgggttccagtgtgaccaccaacagcggcacggtggcgttcgcgggcaattcgcaggcggcgtctgcgcgcatcgctaacctggcgggtggcaacgttacgcttgccgattccgcaggcaataccgccatcgggtcactctccggggccgggaacgtcaatctggctgcggccacgctgacggaaggcaatctcggtcttaacgatacgataagcggcatcatcagcggcaacggcggcgggctggtgaaaaccggcagcggcacgctcaccctgaccggcgataacagctataccggtaccacggcggtacagcagggcgtattgctgattaacggcaaccagagtgcggccactggcgcggctaccgtcgatgccggagccactctcggcggtgcgggaaccctaggcggcagcgtcagcgtagcggatgagggccatcttacgccgggtgcgacgctggacagcgtgggtgaactcacgatcggtcgcctgacgctggcgcaagacgcccagcttgatttccagttcgggcaatccggtacgccgggcggggcgctgaacgatctcctgacggtcaacggcgatctgaacctcgacggcaagctaaacatcgttcaaacccctggcggtaactttgatgtgggtgtgtatcgcgtcatcgactacagcggcacgctgaccaacaacatccttgagatcggcacggcgcctgctgcggcggacgatctctatgtccagacctccatcgacggccaggtaaacctggtgaatcgcaccggctataccatgcgcttctgggatggctttggcggcgcgggcggttcgctgaaaaataacgatgtgattgatggcggcaatggcgtctggcaaaacagcaacggcaacgataactggaccactgaccagacctcgccggaaggggcctttaacaccccgttcagcgatggcgccttcgcggtgtttggcggtgagtccggggccgtcacggtggacaacagcctcggggccgtgaccatcagcggcgcgcagtttatgactgacggctacgtgattaacaacggcgtgatcactaccgacactgctgacaccgtgattcgtgtgggcgatggcaccgtgcgtggcgcggggtacaccgccaccatcaattcacaaattgccgggagcggcgggctgaataaaaccgatctcggcaccctggtgctgaacggcaataacacgtatcagggcgggaccgccatcagcggcggggtgttgcaggtttccggcgatccgaaccttggtgccgcaggcaccggcatcaccctcagcggcggtacgctgcgctacggtgccgggtttgataccgcccgcgccgtggccctggccggggatggcggtgcgatcgacaccaacggacacgatgtctccctgctcacggcggtcggcggcagcggtaatctgtcaaaacagggcgatggtgttctgaccctgacccaggacagcagcttccagggtgaaaccacagtccgtaacggtaccttacagttggggaatggcggtaacagcggcagcgtgttgggcaacgtggtcaacctggcgacgctggttgttaaccgggccaataccctggaactcaacggcatcattaccgggaccggcgatttcattcagcgcggtgagggcaccactatcctgaacgggctcaataaatggaccggctacaccctggtggaaaacggcaccttactggccgggggcgtcaaccggttcagcagtgcctcaagccatatcgtcagcagcagcggcacgctggataccggcgggcataaccagaccgtagctgatctcattaaccagggcaccgtcaacctgcgcggcggtaatgtgggatcgaccctgacggtcgcaggggattatgtcggcctcgacgggacgctgaaaattgctgcccagcagcacagtccgggcgtggcggaccatctggtgatcgacggcggtacagccagcggccgcacgctgctggatatcgacgtcagccagcttggagagccgaccgagggcgacggcatccttgtggtcgaggcggttaatggtggcgttaccaccgcgcaaacgaccaaagacgcctttaccatcgggtccgattatctgactgcgggggcctgggagtatcagctgttcgccggggatctgaacggcgcgggcgaagactggttcctgcgtgcgggttaccgtccggatgtgccgggctttgataccttaccgtcgattattcgccaggccgacctgtttgtgctcggtaccctgcatctgcgccagggtgatgaacaaccttaccgggcggataatcctgccgatcaggaagggcgtttctgggcgcgctacctgactaaaaccatcgatcagacactggatgacgcgacaggcagcaccagccacagccagtacaacggtatgcagatggggctcgatttgtggcaggacgataaatggcgcgccgggatgtacaccaccttcctcgatatcgacagttccattgacggtaataccggcatgagtggcggggcggcctacaactccaccttctcaacgtatctgggcgggtacgctacctggaccgacaccgacggcttctacgttgataacgtcctgcagtacggctatcactcggtcgatctgaaaaacatgaccgatcatgaaacctatcacccggatggcaacaccattacggcgtccgttgaggtgggtaaaccctggtacttcggggataccggctgggcgcttgagcctcaggcacagctgatctggcagtggagcgatttcgatgacgttacgctcaacgatccggcgaaaacccgcgtcagcgtcaatgccgacagcgcggtgatcggccgactgggcgcgcgtctcacagccgaatacgataccaactacggcaaagtgaaaccttacgtgcgggtgaactactggcaggagctgaccgacggtcaggatgaagtgacgtaccgcaatactgccaacagcgacggcaaaaccacgctgaacgcaaaccagcagtttgcggctaccgaggcggcagtgggtgccacctggacggtgacggacgacgtgcaggcctataccgaagtgggcaaaacatgggataacagcggcaaaaccagcctcgatgccgatatttcggcgtcgctggggatgaaaatccgtttctga

SEQ ID NO: 375501 - DNA, 1977 bp, Salmonella enterica
atgaaactgaaacctatagccagaggactggcgctcgctggccttttatcaacgtttattattccagcgtatgccgatgtcactcccaaggatgcaaccgcagcgacaaaacaagccaatgaccagctttataaccagcttcctttctctgacaacactgattttactgacgcacataaaggtttcattgctcctcttcccactgaagtcatccacggtgaacaaggaaacgtagtctggaatccacagcagtatgcgtttatcaaagaaggggaaaaagcaccggatacagttaacccaagcctttggcgacagtcccagttaattaatatcagcggcctgtttgaagtcaccgatggtgtttatcagatccgtaacctcgatctgtctaatatgaccattatcgaagggacaacgggtattaccgttgttgacccactagtctcggcagaaacggcgaaagtcgggatggatctctattttaaaaaccggggtaaaaaacccgttgtcgcgattatttatacgcacagccatgttgaccactacggcggcgtgcgcggcgtggtcgatgaagccgacgtgaaagcgggcaagaccaaaatttacgccccggcaggctttatggaagccgcggtggcagagaatattatggccggtaacgtaatgagccgccgcgccagctacatgtacggcaacctgctgaaaccggatgccaaaggccaggtcggtgcggggctgggtactacaacctctgcaggtacggttaccctgattgcgccaactaacatcattgagaaagacggtcagaaagagactatcgatggcctgacctatgactttatgctcgccccggggtctgaagcaccgtctgagatgctgtggtttatcgaagagaagaaaatcatcgaatctgcagaagacgtgacacacactctgcacaacacttactccctgcgcggggcgaagatccgcgagccgctgccgtggtcgaaatacatcaacgaagccattgtgcgctggggtgataaggcagagatcctgatggcccagcaccactggccgacctggggtaaagaaaacgtcaataaactgctgaagagccagcgtgacctgtaccgttacatcaacgatcagaccctgcgcatggctaaccagggcctgacccgggatgaaatcgccgctaacttcaaactgccggatacgctggcgcacacctgggcgaaccggggttactatggctcggtgagccatgacgttaaagccacctacgtgctctatctcggctggttcgatggcaacccggccacgctggatgaactgccaccagaagaggcggcgaagaaatacgtagactatatgggcggtgcggacaccattctgcagaaagcgaaaaccgactttgaccaggggaactaccgctgggtcgcacaagtggtgagcaaggtcgtatttgccgatccaaacaaccaggcggcacgtaatctggaagcggatgcacttgagcaactcggataccaggcggaatccggtccgtggcgtaacttctaccttaccggcgcgcaggagttgcgtaacggcgtggtgaaaggcccgaccccgaacactgccagcccggacactgtccgtgcaatgacgccggaaatgttcttcgattatctggccgtacatattgatgggcagaaagcgggtgcagcgaaatcggtgtttaacatcgatctcggcagcgaaggcggtaagtataagctggagctggagaacggggtgctgaaccataccgcgaacgctgaagcacagaatgctgatgcaaccctcacacttagccgcgacacactgaataaaatcatcctgaaagaaaccacccttaaacaggctgaagacagtggcgaggttaagttaaccggcgatggcgccaaactcgatcagatgctgagctatatggacaagtttgagttctggttcaacatcgtcacgccttaa

SEQ ID NO: 375502 - DNA, 1878 bp, Salmonella enterica
atggtgcctgaccataccgacgtaaagcgtcagcaaatcaaacgactgcgcacgcgtattgtgatctgcggaactctggtggttgcactgctggccacaacgggctttgtttatctttactggttacccgatgcagtacgcacgccctggatgaattttagccagcccttgattgcggcccttgcccttgccctcgccgtcatagtgaatctacggctaagcttgcccgccttcaaaaaagagaataaagccaataccctgagcgatagtccgacgcgcaaggtattccggaaaatcacgccgcccccacgtctgctgctctggcttaaacatatcgggcatattgccttaacggccatttgtgtagccgtcgcgatttatcttacgacggtcaatttaaaaacggcgcctgaacagataaccgtccttaataacgcgataccggttaactcactgttattagccatcacgtttgccttgctggtatgcgaaagaatgctgagctaccgaccaatccgcgattggccgatgcaaaacctcagtgtgggcatgctacgcgttttgctcagtattttcctgctggtcacgatctcgctggcactcttcacctatatcccatggctctcactctggttgatgaaaattgccaatctaattttgctattggttgcgattgagacaggtattcgtgtctttactgcccttttctacattcccgccccagacaagcctcatccgtttattacccgaagcctggtggccgagcagtatcaatggccaatccgcccattgcagcaaatgagaaggaagatcttccagcacttcggggtggatgtcagcaaaattcaggctttccgtttgatcggccagatcttcgtgccggtggtattcggcgtggtggtggtgggatgggtagtcagcggcctgaatcaggtcgccttagatagccgtggcgtatacgaacgcttcggacacccggttactgtgcttaaacctggcctccatgtcgggttgccatggccattcggaaaagtggttaaggttgattatggtgctgtccatgaactcaagctgagtgaggcagaagcgcctgaaaaaacgttaccgctgaaaattgcagacagtgtcgaaggcccggccccccaggatagctggcgcctgtgggataacagccacacaaccgatcaggctcagctgattgccagtgccatcggcgacaagcaaagctttcaaatcgtcaatatggatatcaggttgatatggcgtgttgggatgcaggatacggatgccatgaaaagtctctatcagaccgaggatctgcctacccttatacagcgggttgcacggcaggtactggcacaatattttgctcatcaacaactcgacgatttgctcaatgagcagcgttcaaccatgtctgccaccctcaataaagaaattcagcaacgcctgaaccgcttagataccggcgtggagttgttgttcacgcggattgaatccatccacccaccggccggtgccgctaacgcttatcacggcgttcaggctgctcaaattgcagcaaacgcgggcatcatgcgtgaaaaaggctatgcagcaaccgtgacaaatgatgcgcaacgcaaagccactgtcgccatcgataaggcaaaagctgcggcgaatgagctgcaggctcaggccaataaatcccaattacgttatatcgcggagtatgacgcctggaaaattaaccctgaagcctacatcaatgagcgacgttaccagacgtacagcaaagccctgtcgcaaacgccgctgctgatcattgataaccaggcttccggggtaaatgaacccatgcttgatttacgccagttttctcaaccttcccgataa

SEQ ID NO: 375503 - DNA, 999 bp, Salmonella enterica
atgaagatccatactatttcaacatctgcgagctcagggaaagttggacagaccgtaccctcttctcgccctcctcacgcatcacgaaagtggcttcgctacgccgttgccgcgctcctggtctccctggcgatattgacggcttgcctggtccaggtgcagtcgggaaacgcgaccgtcgtaacccggtttggaagtccggtccgggtactgcttgagcccggcctggcctggcgtttaccggcgccgtttgaatcgccgatggaagtgaacctgcgtacgcgatcgacttccagtggattgcaggatgtcggcacacgcgatggcttgcgagttattgtgcaggcctgggctatctggaaagtcaatcctgaccagcaacacgttctgcgctttatccgtgccgtgcaaaaccagcctgaggaagccgcccggcaaattcgtacctttatcggctcgtcgctggagaccaccaccagtaattacgccttgtccgacatcgttaataccgacagcacaaaggtaaaaattacccagttagaaaagcaaatagaaaaccagcttaaagaacagcttctgaacagttacggaatagagctggttcaggtcggcatcgagcgcttaactctgccctcggttacgttgaccgccaccgtcgagcgcatgcgggcggagagagagactatcgccactgaacgcaccgcagagggtaatcgtctggcggctgaaatccactctaaagccgatcgagatgcacgcatcactgaggctgatgcctcggttaaagctgccaccatcaccgcccaggcacagcgagacgttgctgccatttacgccaaagcttatgccctcgatccgcagctttataacttactgcgatctcttgatacgcttaatgatgtggtgaataaaagtacgcggatcgtgctaagtacggatgctgcaccgtttaaggcgctggtacaacaacccgcagaaacagacagggcggcacgatga

SEQ ID NO: 375504 - DNA, 1083 bp, Salmonella enterica
atgaataaacatgccgtgacgatgaccccatggggacaatcctaccggattgctttttttagtctgtacggtgccacgctactggcggcgctggtgtggctattttcaagcttccatcaaatcgcccccgacagccaggcggtggtgtatcgctttggcaaaccgctggcggtaaagcattcgggaatgctttttgcttggccaaaaccggtcgatcgcattgagatcatccccggctcggatcgcattttgcagcatgatgtgaaacctcttcagcgcagcgagcagctaaaactgctttccggggcgcaaatgtattcggatgcgggcaccggcgcaggttatctcctgactggtgatgccgggattgtgcagctcaatatgcaggtgttctaccgcatcgacgcccctctacgctacgtcctgcagcgtccgcatatcgacgcgctcatcgaccgactggcccagcgtgccgcgacgctggtgtgcgccggacgtgatttggatacggtcttagttgcccgtccggaaaccatgcaaaatgacagccatgcggcgcaggaacgcgcgaagttgcgtggcgatctcaaacagatgattgaacaggacctggtgcgcctgaaggatacggcaaacgacccgggaataaccattgaacgcgtggatatcgcctcctcgctaccggataacgctgtcgctgcttttaacgccgtcctgacggccagtcagcaagctgagcagaaaattgcacaagcgcaaaatgaggccacgcgtctgcaccaaaaatcccagcaggaagcggatcggatcctgcaacaggctgaggccggacgcagcgaaatgcacgcgaaagctgaagtcgcaacccaatccattatcaaactggcacaggcccgggcagaaggaagcgaagccgatatacttcagcgcctgtggcgagaaagggtttcatctgttctctccagcgcaggtcaggtgattgccgtcaatcctcaggacagcagtaatctgattctcaccggcccggcatcacaggcagaaacgccgtcttcttccttgcagttctttgggggtatcccatga

SEQ ID NO: 375505 - DNA, 1914 bp, Salmonella enterica
atgagtcatcaatgtagccacggacacattcatcccaactttagccagggattactcacacccgaagagcggcggcggatgaccgttcaactgtctctggccatgagcactattggcctgatcctgctcagcctggtctggcgctctatcgccccacagcagaccgcaatcagcgatttgctggcaggcgtggcctggctgttggttgctgtaccggtacttcgcgcgggctggcatagcctgcgccaccccgatctgcatggggtgacggatttactgattgtgctcgccatgcttggggcatgggctttaggcgatctggttaccgccgccctgctaccggtgttgatgatttttggccatattctcgaagagcgcagcgtcatgggcacccgccaggccatcgcgggtttgactcagcttacccgcagcaaagcgcgacgtgtccgtgaagacggttccctcgttgtaatcgacagtcaggccgtacgtaagggggatattgttgagatccgcgccggggataacgtgcctgctgatggcaggatcctgagcgggcacgcaagcctggacgtcgcctcaattaccggagaatccgtccctcaggaagcaggtccgggcagtctgatcttcggtggtgccatcaatcttaacggattactgcggatggaagtcatgcacactggcgaacaatcgacgctcggcaaagtcattgcgctgatgaaagacgccgagcaggctaaaccccctattacgcgtctactcgaacgttacgcttcgcactatctgattctggtactgctcattgccgccagtacctggtttttaacatacgatagccaggccatgctggcggtattagtagctgcctgcccttgtgccctggtattgtctgcacctgccaccgcaatggcgggaattgccgttgccgcacgccacggcattctgattcgaaacgctgcctttctggaggaactggcggatgtcgatgcactgatcgttgataaaaccggcaccctcacccaggggcgtttacaccttgtggatgcagtccttgtgcccggaactgactatcaaaccgttctccagttggcgggggcgcttggcgctaccagtagccatccggtcagtcatgcccttgcagaatatgtgcagtcagacagttccatcgttattgaaagcgcagaagagaagcaagggctgggcgtagtcgcacagacaaacagcggcgttgctcttttaggccgtgttgacctctttactgcgcacgccgttccgaccatggccatacctgaacatgaagggccattggtaggcgttgcgcttaacggggcttttctcggttggtttttacttgccgatgctttacgacctgaagccgctgacgcacttcttgaacttagacagttaggcgtagaaaagcagttaatgcttacgggagaccgtattccagccgctcatctggtcgccagaaaactcaatatcaccgatgtggttgctcaggcactgcccgcgactaagcttgaagaggtacaaaaagcggtggatggaggcagtcgtccgttggtggtgggtgatggcatcaatgatgcactggcccttaaagccggggccgtcggtatggcaatgggtgccaatggcgcagatatcgccctgctctcagccgatgtagtgcttaccggaagcgaccttcgccgtattcctatagccatcaggctaagccgtaagtgtcgtaccacgctgctggttaacgtgatcattggcataggctggaccgtttttattgtggctgcggcagccctcggttggctggggggtgcaggcgcccttgtcgccgccctgctgcataatttaagcacactgatggttctggcaaataccggacgattgctgcagttcgatgagacgcactag

SEQ ID NO: 375506 - DNA, 954 bp, Salmonella enterica
atgattgcggcatttcccggcttttttttattactcgtcattgcgatgattttcagcccgtcgggcattgctgcagacaatcctcgcattaagcaacgcgccgatgctgtattaaccctgatgagttacatggtggtccctgacgtgaccgccagcgacctgaatataggtactggcagcaatgaaagtaatgagctcaccatcactcagttcggcggcggtgccaccctgagcgagtccttcccgatttaccttgaaggggcgctggggtatagccgctatgatccgcaatttgtggtgagtaatggcacggaaactcggcggatccccacccgatggaacagtcttaccggcaccggaggaatcggttgggatttccatctttatcgcgatcgctggggtggaaacctggtcctacggcccattgcaaatgtgatgctaggcactatggccagtgatgtgcgaataggtgcctgggtcatagagcggcgccgacatgcggattatgattttctggatggtggcagactgaacgcttacggaaccggcggatcgttgatgctcgactatgaacttgtttcaaagccgcaagatattgatatcgaactgcgctattcagcgatgaggctgcagacctttggtaatacctccgatgctgttgaaggtcatgcgaacacgcagaaccttggcctgtacctgcgccgccgtgctccaatatcaaactggacactgttaaaaagcccggtgcgctatgtgcttgaaggtgcgcatacagaatacttgggcgagcagcgcggcaggctgggatttaacagtttaagttcagtgggcgcgggaattgagcttgatagcagtgaatacccggtctttatcacccgcacgcgcctggtcgcgcgttatatgtttggtaatggcactagtggttacggtgttggactggcgatgagtttttag

SEQ ID NO: 375507 - DNA, 183 bp, Salmonella enterica
atgaataagcgattatccgacgaacagatcatcagtattctctgtgaggcagaagccgaagccggagtttcggcccgggaactctgccgcaagcatgttatttcagacgccaccttttacatttggcgcaagaagtttggcggcatgataaccagcgatgactgggggagttacgccagatag

SEQ ID NO: 375508 - DNA, 420 bp, Salmonella enterica
atgcagttctttcgactaacagagatttttcaaccagtcatgcttcctctcttctctgagaaagtgccatgtggttttccgagcccagcgcaggactatgttgaggacagactggatctcaacaaattgctgataaaacatccgagtgccacttacttcataaaagttggcggggagtctatgcatggcgccggtatcagtgatggggaccttttagtggttgatcgctcgctttcggccatacatggcgatattgttattgctgctgtttcaggtgaatttaccgtgaaagaacttcgtactcatccttatctacagctagtacctcacaaccatgagtattctgcgatttcatttcaaaatgcagatgaattagaaatatttggagtggtaacctttagtattaaggcacataaataa

SEQ ID NO: 375509 - DNA, 1263 bp, Salmonella enterica
atgtttgctctcgtcgatgtaaatagtttttatacttcttgcgaaacggtttttcggccagacctgcaaggaaagcctgttgtcgtcgtttccaataacgatggctgcattatttctcgttcagctgaagcaaaatccttgggtataaaaatgggcgagcctttttttaaaataaaaaacaatacatatagttcaaaggttcatgtattcagttctaattatgcactttatgccgatctaagtgagcgtgttatgcagacgctaactgaaatatctccttcgatcgaagtttattcaatagatgaagccttcgttaatttaactggggtaataaattgcatgcctttaagttacttcggtcatgaaatgagaaataacgtatttaaaaacacagggttaactgtaggagttggcattgcgcaaacaaaaacattagcaaagctagctaaccatgcagccaagaaatggcgtggcactggtggcgttgtcgatttgtcagatattgaccgtcagcgtaggctactggcacttacctctgttgaagatgtctggggcgtcggacgaagaattagtaaaaaacttaattcaatgggtgttaatacagcacttgacctggctgaaagttcattgtgggtaatcagaaagcactttaatgtagtgcttgaaaggaccgttcgagaacttcgtggtgagcaatgccttgaactagaagagttttcaccaacaaaacaacagatcatctgcagtagatcttttggcaatcgcataactcagtactcagatatgcaccaggccatttgtacctatgctgagcgagcggcagaaaaactacgcagtgagcaccaattctgccgtttcattagtgtttttattcgtaccagtccacacgcagataatgaaatatattatgggaatcaagcatcaatgaaactcctgactccttccaatgatacccgtgatattataagttcggccacgaactccttggggaggatatggattgatggtcatcgatatatgaaggctggtgttatgctggctgattttttcagtaatggagtggctcagctaaatttatttgatgacaataccccaagaaaaaatagcgcagccttaatggagaccctcgataaaattaataattccgggaaaggaaagatctggtttgcaggtcagggcatcgaaaaaaactgggcaatgaaacgtgagatgctttctcccgcgtatacaacccggtattcagacttgccagtagcaaagtga

SEQ ID NO: 375510 - DNA, 414 bp, Salmonella enterica
atgatgatcaagccgactaagatgcagcattctgtccgttcgcgctcaaaaacactcgatactcttgataaagttattgatgctcttgttgaaggtaacgaaaagatctccatcgccgcggttgctcgagaagcaggcgttacaccaagcctcattcataacacctatccagcggtggctgagaaaattcgcatcctcatgggtaaatcagcacgtgcccagcgtgactcgaaacatcaggcactaatgattgaaaaggagaagaaccgggtgcttcgagcagagaaggagcagcttttagaggagctggcccgaattgcttctgtaaatcaacgcctgttgtacgaaatggcggagttgaaggcgataaatattggcgaggttatttctctttcttccaagtcccgtagatag

SEQ ID NO: 375511 - DNA, 1857 bp, Salmonella enterica
ttgaacacaagaaccgttaatgcaatgttgaaagcatatgatgttctcatcgcccaaccggctacagctaatggactaagtattgcagagcgtaatgcaattgtgattagcgcaatagttaatgaggatggtaaaacgttggttctcagccgttttggtgatccacagtgggatttgcgcccgttttttgatcaggcgaacgtttcttactgccataaatttattaactgggatatgagcatgcctatggctctcatagatgacagtaaagctgttgcttatgcttggtttaagagaggaatgcctggatctaaacctcccattgcacgaggtatcactactttagctgttgctagcgtgatgccttttattcgctggttaaatgattttggagtttcaagtttttctgatattagtccgatccatatcagtaattacgtccattattgcaaaaatgatttaaaattaaagcccttgccactgtatggtcgcttaaggatcattgattttctctggattttttctgccgatacaatgttcccacttcaattttatccttgggggaattcgacattgtggcggatttgcgggattgctaatgtgaaagggttagatgccgccaataaaaacattggacgaacggatatcataccctctgctgaacaatccaggatattcaactattgtgaaaacgttgtccaagaggctaaggctgaattagctatcagtggaattggatatcaccctggcgatgaacagatgtcaatccgctgtagagatgctgtactgtatatagtttcaattactagcggtatgcgcaatgatgaagcaataggtattgaggtaggtgcttggcgtaagatgataaaagatggtgtaaccttttgctgggtaagcacaatagagcacaaaacaggtaaagggcgagtcgagtatcttgtgccggagctgacacttgaagctttgaatattttggcgagatattccataactatcagaaaagaattggagcaagagattaagctacttgcaaacaatcggggtttgtcgaattcaactgaacatattcttagacttgaaaaagctagaaaggattccaagaagctatttttgggacgaaatagcaatgggggaaaaattaagaaaggttatcacgttgaggcactcagcggatcaggctctaatgtagcatttggtcgaatagcaaaagccgccggaagcaattgggcgttgaaaacacatcaatgcagaagaacatatgcaaggtactttgtagagtcccgtatgggacgaaattcgcttatctttctcaagtggcagttcaaacacagcagcatgagcatgactcaactttatgcttctaacccgcagcaagacttggcactttttgatgaaatcttacagcagatgactgaatataaaattgatttgatcgattcatggctcaatcagcagcctttggcaggcggtgcaggtgaacagattgtcaaaatgcgagttattccactcaaagacaggactgctctgcttgcccaaacggctccacatgcgaacattcgtgctactggccatggctggtgtatagcaacggagcggggctgtggcggcgctgggctatatgaggctacacgttgccctacatgccaaaactcggtgattgatgagtttttcgcggaaacgtggcaggacatatactgccaacagcaggagttactcaaaatcgaggatgcaggccctgcagtaagacagcgagctgagcgtgatttgcagatcgcattaaatgttatcacgaacttaggcctgtctcccatcaatgataataccgaccggactgtaaatgatgatcaagccgactaa

SEQ ID NO: 375512 - DNA, 1611 bp, Salmonella enterica
ttggctcgcaaaaagaactataaggcagttcttaattccttcacgaaaacagccgacatggccgaaaatcctatcaaaattgatttgcccagaaatcctagaaatcatagacaaattgatcattctcaatatttaaatttggggtttgacgcttgggcaattcaaagtatttacgttattaggttgttactgcaaggtggaaacttctcggtctccactttgattggttactcgatgaatggtttaagaatctttctggactttttgactagcaatctagttgagtctccacctgctgcgccagtcgagctaacaaaacaccatttggcacgttatgtttcttggttaaaactcaagtaccctaacggttcgacggctaagaatttttatacaagtttaaaatcacttatcattgttctggcagattatggatttatagataatgctcttgacgatctacttccaccaaatccgtttcccaataatgcacataatacaaaagatgcagatccacttacaatgggagaaatgcaaaggctactcaatgcattaaagtccgactttattgctatcagtaaggggacgtttctaggtaatggggctgagtcaatgacagtgatgctgctaatcattgcggcaagaacaggtattaataccacaccgttattagagatggcgagagacgccgtagcgccacatccatttatgcaaaatcttaagctgataaacacattcaagcgtcgtgggaaaggtgcacagatcaaatcaatacgccagacaaatctgctagatgaatatagttccattcccttagatggagtcgctgttttaaataaagcacttgaaataagcaatccccttttgcagctagcaccagaggaaattcgttcatatatatggttatatcgttcagggcagcgaggcggggagaataaagttgttactcttacccctagtgctttatacatgtatagcaaaagcatttgtgagcgtcacaggctagaggatgatcaaggaaatcaactaaatgtcactcttagccgtctacggaaaacaatggaaagccgcctgtggaaactgagtggtggcgacataatcgaagtatcctctatcatgggccatactccacaagttgctgataaccattatttaaaaataaacgatgaaatcaagacagagggtgcgattttcgttggggaggtttttcctgataaacttcgtggtactactgttgcaccgaccccattaggtggttgtaaagacaatctctatggcagtctggcacctaaggatggggtcaactattgtgctgagttcattcactgtctcagttgtcctagctatgcaattgtcgggactcttgatgatttataccggctattcagctaccaacaattcttatatgccgaagtcgaatactttctgactgatgagtgggatgcatggcgcaagcggcagtttaattttattcgaatgatagatgatttcacttcccgaacgtttgatcttgcattggtctcacaagcaaaggaaaaagcaaaatcctctccgcacttattctggagtaaaaaaatcgagttcatgatgaaaaaattaggaggtgaaatttga

SEQ ID NO: 375513 - DNA, 1158 bp, Salmonella enterica
atgaggctcgtttttgcaacaaaagacctgatcctttcaggccgctcctttgagggctttccgttgttaattggatcagatggatggccagttcagcctgcacaatccttcctttggcacaacctaatcgagtcaggggaatcattaagtactcttacctgggaagcgtatggtcgtcgtttatatgattactttgctttcctggaagccaataaattggcctgggacgatgaagcctctgcccacggtctcagcgttctttcgagatacagagattggtcaattggcgaactagcgcttgtccctcgcactgtgaacaaccgtctggccttgatcgtgaggttttatcgatgggcaaagcagaataacctgataaaggcgctgcctttcggtgagaaaaaaactcatgttgttcctcattccggtcttttaagtcatgtcactcgatcagaagcagaaagaagtcagatatcactaatgcttcgcgatagaaagcgtttaaccaaatttttgaccaaggagcaagtcaaagtatgccttgccttaaaagccgacccaagccatcaaatacttttccacctcatggttcgtaccgggcttcgttcctgtgaagccaggtcttttcctctcaaatatgtttttaatcccaggttaaagagtggacttcgccaagggcaaatgattagcattgctcttgatcctgcagatatgcaaattaagtatgatcggcctagaacgatcgatgtgccatggtcgctgatggaagatatgtggtcatattcccttcatcagcgagagatgcgtaagtccaatgatgatggaagtgagactgcattattgctgactagtgaaggtagatgttattcaaaagattctgtagtggatgttatgaaatcctatgaacgaaaatgcggtttctatgttcgggcccatatgttgcgtcatacgtatggaacctatactttactcgcgcttcggaaacacaaagaatttgaaggcgagccactattatatgtcagagaccggttggggcattcagatgtccaaacaacgatgatttatttacatcttattaatcaactgaatgctcagtcagttctggcgcatgaggacgaaattgacatgatgtttatggataaatctaaacaactaacctga

SEQ ID NO: 375514 - DNA, 267 bp, Salmonella enterica
ttgctggaggatggaggaaaagaggcgaaatcattttcagtgggatactgccaccccggacatgagcttgccagaacctacgcggtaaatcctacgacacgaagccacgcgcaattttatgcgaaaacgctggcaatagtctttctgactgatgcaagctatctaaaatcgcttgaagatgacatcatgcaaaataatcgtttaaaagactcacctgttgataagcatgttgaggacgaaaagaagaagaaaaaagcagccaggtaa

SEQ ID NO: 375515 - DNA, 1050 bp, Salmonella enterica
atgtcagcacaaacccaggccgctccggccatgaacctatttgaacgttacctgagcgtctgggttgcgctctgcatcgccatcggcattttgctcggacaggtggtgccgggcgtctttcgcgttatcggcggtctggagattgcccgcgttaatttgccggtcggtttacttatctgggtaatgattattcctatgctgctgcgcattgattttggggcgctgggtcaggtcaaagcgcactggcgcgggatcggcgtaacgttgtttatcaactggctggttaaaccattctcaatggcgctgctcggctggctgtttatccgttatttatttgcgccgtggctgccagacgatcagcttgacagctacattgccgggcttattctgctggctgccgcgccctgtacggcaatggtgtttgtctggagccgactcaccaacggcgacccttatttcacgctgtcgcaggtggcgctgaacgatgccatcatgattttcgcctttgcgccgattgttgggctgctgctcggcttgtcctcaatcatcgtgccgtgggccaccctgttaacctccgtggtactatacatcgttgtgccggttattctggcccagctctggcgtaaggccctgctacgcaaggggcaagcggcattcgataatgcgctgacgaaaatcggcccgtggtcaatggcggcattactggcaacgctggtgttactgtttgcgtttcagggcgaagccattctgcaacagccgctggtcattgccctgctggcggtgccaattctgattcaggtgctgtttaactcggcactggcctatgggttgaatcgactggtgggcgaaaagcacaatattgcctgtccatccagcctgatcggcgcatcgaacttctttgaactggctgtcgcagcggcaatcagcctgtttggttttcattccggtgcggcgctggcgaccgtggttggggtgctcattgaggtgccggtgatgctgctggttgtgcgagtggtgaatcgttcgaaagggtggtatgagagagcttag

SEQ ID NO: 375516 - DNA, 477 bp, Salmonella enterica
atgaacgtactttttctctgtaccggcaactcctgccgttccgtgctggccgaagccacgtttaaccatctggctccagccggatggcgcgccatgagcgcaggcagtcacccggcgggttacgtacatccccgagcactggcgttgttggcgcgggaaggtatttcaacagaaggttatttcagcaaatcgtgggatggcctgccgcagacgtcggatattgtcgtgacagtctgttcaaacgctgccggagaaacctgtccggcctggctcggtaacgtgatgcgtacccattggggcgttgacgatccggctcatgctaccggtagcgatgccgaaatcgatacggcttttgtcactgcttaccagacattacgtgcgcgtattgaagcctttctggcgctaccgctgaatgaattactgcacgatcgcgcttgtctgaaagtcgaactggatcgtattggcgaaattttttaa

SEQ ID NO: 375517 - DNA, 186 bp, Salmonella enterica
atgccccttactgacagtaaaatccgcgctactaaaccttcaccaactccctttaaactgaccgcttctcacggtctgtatctgcttgtcagtccgggcggttcatgcctctggtatctcaaatatcatttcgaccgaaaagaatactcggcgcggtggataagagagccttgcagacgcatatga

SEQ ID NO: 375518 - DNA, 240 bp, Salmonella enterica
atgatttctgcgagcgctctgaactcagaactcattaataaaatcgcacaggattttgcacaagccaccggtctggcggttgtggttgtcaatattcatggtgatgaaatatctgagctattcaatttcacgccgttttgtcagttgatgcggcagcatccccagcatagtacacgttgtcgtatgagcgatcgctgcgggggactggaggcatcgaagtccgatcaaccctgtatttaa

SEQ ID NO: 375519 - DNA, 321 bp, Salmonella enterica
atgaatgatagttcgagagacccgattatcacggaagatgaggttagggcactcaattttactccggaagatatccttgaaatagaaaaggttattctttcttccgttcatgttgcacgtcgaaaggttgcgatggtagtaggaatgactattggcacgttaagggatcgcgatgaggataagtggaaacatgtgtcggatatttattgcgcgtatgttgtaagatgcctcgtatttcgcggagaactggtgggttacggcgatttattccgaatgcgctatagcgaaattaacctgcctgttgccgatctggacgcataa

SEQ ID NO: 375520 - DNA, 213 bp, Salmonella enterica
gtgttcaagctgttggataatgcgtgtactaatcaggttttcattttttccgagatagagtttgcctgtaatacggtctatgcggctggcgataatgtggatgtgttgaccgaccgcatcgtcatgcaacacgtagcatctgagatgcgtttccgagaagccgatgcgcttcatatagtcatcagctatagcggaccactgagcatcggttag

SEQ ID NO: 375521 - DNA, 1968 bp, Salmonella enterica
atgtttcctgtcagtgatttgctggatttacaaacactttctgaatcagttgaactggagtttaagctggcgcagggagcggatggtaaaggtaagctgccggaggatttctggcgaacatacagcgcgatggcgaatacccgtggtggctatgtcgtgctgggcgtcagagaaaagaaagggaattttatcgttgaggggatcggcgatattgctactgttatgaagcaactgtttgatattgccaataacaagaaaaaagtaaatgtcaatttactgaccgatcaatcggtacaggtcattaatcttgataataaaatggtcattgtcattgagatccccatagcaagacgtgagcaaaaaccggtctaccttaacaaccagccgatgacggaaacatacatccgtcgccacgaaggggactgccactgttctgaagagcaaatcaaaagaatgctcgcggagcaggtagaggatagtcgtgatgaccggatcctggcagggtttgatttcagcgatatcgatcaggacagtttgcgtgcttaccgtaacctctttgcggttgcgaagcctcagcatccctggctggagctggatatcatcgatttattcaggaacattggtggctggcgaaaaaaccgccagagcggggaagaaggcatcactcttgcgggtatcctgatgtttggtacctggaatgctattcaggatgcggttccaaactattttgttgattatcgcgagcgggatgacacacaacctgattcccgctggatcgaccgcatctatccggatggttcatggtcaggcaatattttcgatttttaccgccggacatatcgaaagctcatttccgaccttaaggtgccttttgaattgcaggatggcattcggctggatgaaaccaaggttcatgaagctatccgcgaggcgcttgttaatactctggtgcatgctgattacacgggccgaagctcgatcctggtcgtcaggcggccggatctttttggcttccgtaatcctgggctgatgcggataccgccggaaattgcagtgaagggcggggaaagcgattgccgtaaccgccgtatgcaccagatgttcttaatgattggcgcaggtgaacgtgcaggatctggtgtgcccaaaatcatgagcggttggaaatgggcgaattggcgcacaccaaaattgtatgagaaaacagagccttctgaacaaacactgcttgagctgtcgacggtaagtcttgtatcacaggaggtgactgagcggcttgatgatttatttggtcaacgttttcatttgcttgatgatctcgaacgaatgatcgttatcacggcggcgacagaaggttgggtaaaccatgagagagcatgtcagctcacaagcagacattcccgtgatgttaccctggcatttccaaagttagtggataagggctttcttgtcgccagtggtgaaaagcgggataaatcatacagcttacctggaatggagttgccgtctccggaagaggtcttcgctaatgcgttaagctctgcatcgaacttaacgcataacgcacagggcttaacgcatagtgacatcagcttaacgcatagcgatcctgacttagtggatagccatcagggaagagatgaacacggcagatttatcagtcacttgctagataaaccgtttattgatgatcttgacgtattgaacgaaggatttcggaatgaacttgaagcgttagctgcgccatcgcgggaacaccgtcggctggaagccggggtaatgaaggagctgcttgtccagttgtgcgatgggcactatttatctgtcgcggtaatggaaatattgttgggacgtaaggcgcagagtattcgccagaattacttaaaacctatggtggattcaaagcaactgaagctggcgtttcctaacaagcctaattcgccaaaacaggggtatacgctatcttag

SEQ ID NO: 375522 - DNA, 126 bp, Salmonella enterica
atgttggattctttgccggatgcggcgttgcctttttgggcctacaaaagcagatgcctcaagatcgggcgtaagtggcgcaggcagattattcacggcaagcgcgcagggcccggagcgtactaa

SEQ ID NO: 375523 - DNA, 1038 bp, Salmonella enterica
atgaccttacactgcgcatttattggatttggcaaaagtaccacccgttaccatctcccctatgttctgaatcggaaagatacctggcatgtcgcgcatattttccgtcgtcacgctaaaccggaagagcaggcgccgcactattcacatattcacttcaccagcgatctggatgaggtgttgggcgatccgcaggtaaagctggtgatcgtctgtacccatgctgacagccatttcgaatacgctaaacgcgcgctggaagcgggtaaaaatgtgctggttgagaaacctttcacgccgacgctggcggaggcaaaagtgttgttcgacctggcgcgaagcaaaggactgaccgtcacgccgtatcagaatcggcgttttgattcctgttttctcactgctaaaaaagcgattgagagcgggaaactgggcaagattgtcgaaattgaaagccatttcgattattaccgcccggtagcagaaaccaaaccgggcctgccgcaggacggcgcattctatggacttggcgtccacaccatggatcaaattatttcgctatttggccgtccggatcatgtcgcgtatgacattcgtagcctgcgtaataaagcgaatccggatgacacctttgaagcgcaactgttttatggcgatttgaaggctatcgttaaaaccagccatctggtgaaaatcgactatccgaagtttattgttcacggcaccaaaggttcgtttgtgaaatacggtatcgatcaacaagaaaccagcctgaaagcgaacattatgcccggtgaacccggtttcgccgctgacgaatccgtcggtgtgctggaatatgttaacgatgacggcgtgaccgtgaaagaagaggtgaaaccggaaacgggtgactatggccgcgtctatgatgcgctgtaccagacgttgaccgtcggtacgcctaattacgtcaaggaatctgaagttcttaccaatctggaaatcctcgagcgtgccttcgaacaggcaacgcctgcgacgataaccctcgctaaatag

SEQ ID NO: 375524 - DNA, 1341 bp, Salmonella enterica
gtgagtacattaacactggttttaaccgccgtcggttccgtcttactgctgctgtttctcgtgatgaaggcgcgtatgcacgccttcgtcgcgttaatggtcgtctcaatgggcgcggggcttttttcagggatgccgcttgataaaatcgccgcgaccatggaaaaagggatgggcggcacgctgggcttcctggcgattgtggtcgcgctgggggcgatgttcggcaagattctgcatgaaaccggcgcggtcgatcagatagccgtgaaaatgcttaaatcctttggccataaccgcgcgcactatgcgattggccttgccgggctgatttgcgcgctcccgctattctttgaagtggcgattgtgctgctgataagcgtggcgttctctatggcgcgtcataccggcacaaacctggtgaagctggtcattccgctgtttgcgggcgtggcggcagccgcggcgtttttgttgcctgggcctgcgccgatgctgctggcttcccagatgcatgctgatttcggctggatgatcctgattgggctgtgcgccgccattcctggcatgattatcgccgggccgctgtgggggaattttatcagccgttacgttgagctgcgtattcctgacgacattaccgagccgcatctgggcgaaggcaaaatgccttctttcggcttcagcctgtcgctgatcctgctgccgttggtgctggtaggactgaaaacgatcgccgcgcgctttgtgccggaaggttccaccgcttatgaatggtttgagtttatcggccaccccttcactgcgattctggtcgcttgtctggtagcgatttacggcctggcgatgcgccaggggatgccgaaagacaaagtgatggaaatctgcggccacgcgctgcaaccggcgggcattatcctgctggtgattggcgcaggcggggtgttcaaacaggtactggttgactccggcgtcggcccggcgctgggcgaagcgttaaccggtatgggactgccgattgccattacctgctttgtgctggcggcggcggtgcgcatcattcagggctccgcgaccgtggcgtgtttaaccgcggtcggtctggtgatgccggtcattgagcaactgaatttctccggcgcgcaaatggcggcgctctctatctgtatcgccggcggttcaattgtggtttctcatgttaacgacgccggcttctggctgttcggtaaatttaccggcgcgaccgaagcgcagacgctgaagacctggacgatgatggaaactatcctcggcacggtcggcgcgattgtcgggatgattgctttccaactgctgagctga

SEQ ID NO: 375525 - DNA, 243 bp, Salmonella enterica
atggacgaacagcggaccacgaacgttctcttccagcgtgtgcagcgcctcggcggtgcgggcgatgttacccttctccacaagcatcatgaagatggtgagcttgcggaaggtaatgtcatcggtgatagacaggttcatcgtccgccccgtgcgttagagcctatcccagtaggcgtaattgttgaagccagtttggggccggacagcgcgcagaaaccggagcgtacacatagtacgtga

SEQ ID NO: 375526 - DNA, 675 bp, Salmonella enterica
atgagttttacttcacttcctctgacggaaattaaccataagctacccgctcgaaatattattgagtcacagtggataacattacaattaactttatttgcacaagagcaacaagctaagagagtttcacatgctattgtgagctccgcttaccgtaaggctgaaaaaatcatccgagacgcctatcgttatcagcgtgaacagaaagttgagcagcaacaagaactagcgtggttgcgtaaaaatacgctggaaaaaatggaagtggaatggctggaacagcatgtaaaacatttacaagacgatgaaaatcaatttcgttcattggtcgatcacgcagcgcatcatattaaaaatagtatagaacaggttctgttggcctggttcgaccaacagtcggtagacagtgttatgtgccatcgtctggcacgccaggccacggctatggcggaagagggagcgctttatttgcgtattcatcctgaaaaagaggcattgatgcgtgaaacttttggcaagcggtttacgttgattatcgagcctggtttctctcccgatcaggctgaactttcctcaacacgatatgccgttgagttttcactttctcgtcatttcaacgcgttactgaaatggttacgtaatggtgaagataaaagaggtagcgatgaatattaa

SEQ ID NO: 375527 - DNA, 1287 bp, Salmonella enterica
atgacctggttcatagaccgacgtcttaacggcaaaaataaaagcacggtgaatcgccagcgctttttgcgccgttataaagcacaaattaagcagtcaatttccgaagcgattaataaacgctctgtgaccgatgtcgacagcggagagtccgtctctattccaaccgatgatattagcgaaccgatgtttcatcaggggcgcggcggtctgcgccatcgcgtccatccgggtaacgatcactttatccagaatgatcgcattgagcgtccgcaaggcggtggcggcggcggttccggcagcggtcaaggtcaggccagccaggacggcgaaggccaggatgagtttgtttttcagatttcaaaagatgagtatctggatctgctctttgaagatttagcgctgcctaatctgaagaaaaaccagcatcgccagcttaacgagtataaaactcaccgcgccggtttcacctcaaacggcgtaccggccaatatcagcgtggtacgttcgctacaaaactctctggcgcgccgtacagcaatgacggcaggaaaacgccgcgaactgcacgcgctggaaacggaactggagaccatcagccacagcgaaccagctcaactgcttgaagaggagcggttacgtcgggagattgccgaactacgggctaaaatcgagcgagtgccgtttatcgacacctttgatttacgctataaaaattatgaaaaacggcctgagccctccagccaggcggtgatgttctgtctgatggacgtctcgggttcgatggaccaggcaaccaaagatatggccaagcgtttttacattctgctttatctgtttttgagccgaacgtataagaacgtagaagtggtttatatccgccaccatacccaggcgaaggaagtggacgaacatgagttcttttattcgcaagagaccggggggacgattgtctccagcgcgcttaaactcatggatgaagtggttaaagagcgctacgacccggggcaatggaacatctatgcggcgcaagcgtcagacggtgataactgggccgacgattcaccgctgtgtcatgagattctggcgaaaaagctgctgccggtagtgcgctattacagctatattgagattacccgccgcgcccaccagaccttatggcgcgagtatgaacatctgcaggcgacgttcgataacttcgccatgcagcatattcgcgatcaggaggatatttatccggtattccgcgaattgtttcagaaacagagcgccaatcaaagtgcataa

SEQ ID NO: 375528 - DNA, 561 bp, Salmonella enterica
atgaccactattaccagagaagaagttaaggcattcattgagcaaattgaatccgatttatctaatgggtgggaagcgcagatattcgaattgaagctggcgcgtatcgcgctggcatcgctggaggcggagccggagccggttgtgccagagtccatcagtgttcggcaggccatttctgctcttgagagcgcagattgtgtaacgactattggccaggcgtacaaaatgggatggaacgcctgtcgcgccgcaatgcttcagagtaaatatcgcgatctgtcacaaccagtagatcctcagatttcagaatacgagaaaataatgcttcaggctggcaactatccggtaactccggatggttggataagctgtagtgagcgaatgccagaagacgagcaagaagtaattgttcataacaagttgggatatcgttatgtttcatattttgatgagcattctggactattttttgacatgcgaggcggcaatcagatgaactgcattgagcatatcttggttacgcactggatgccactgccagcaccaccgcaaaaataa

SEQ ID NO: 375529 - DNA, 192 bp, Salmonella enterica
atggctaacgtagaagcttcatggtgcgtatcgctgatcgttgaatgtccgagttgtggcgaagtgatggatctaactgaaagtgatgatgtgcttgatggtacgttttgcacagcgcttgagaacgaaaagaattatccggttgagtgccatgagtgtggcaatcactttacctgcgattttgcatactga

SEQ ID NO: 375530 - DNA, 642 bp, Salmonella enterica
atgagcaacatctacaaacaggcgctgctcgtcagcaaagcaaaagcatctgtattcactatggaatacatctctcaatttgaagcgagtgatattgattctgacgatgtcgatttgcggtttgaagttgatggcgttgaaaccggcacaacagtttctatcgttgatgagtgtggccacgccgcacagataattacggcgctgttggatgaactggaggctgcccgccagcgcatagcagaactggaggcgaagcttgaaactgccgacaggttgcaggatagcgcattccgtgacggcctgaaagccgggttcagctatgggcagacagatgaccaatccgggttcgcgcagtgcatgtccgcatatagcacacgcgctggcattggcgtgaagcagcaggaagatagcgtcgattctgatgtaggcaggaatcagcctggaatggttgttgcggttcatatcgacgcaggtgactttgtgaaattcaaaggacaagtgtttgaggtcgaggaaaccgactttgacgaccacgacgttacattatggtttgtgggtggcaacacattgaaatgtgccgctggttgtcaggttgaggtggtatctgcgccagttgccgctggcatcaaggttaaggggtga

SEQ ID NO: 375531 - DNA, 231 bp, Salmonella enterica
atgagcaacatcgacaaaccaatgacaaatcgcgaactggtcgatgcggccattgaacttgccggagagttctatgcgatgcagggctattcgcatcgtccagggttcaaatactgggagtctccgcatccgcatgagcgcctgtgctttgaaatggcttgcgtggcattcgaaactattcgcggctcagatgtaatggacgccgtatctgaactggaggatgaggaatga

SEQ ID NO: 375532 - DNA, 459 bp, Salmonella enterica
atgaaagaagtgaaaatatacacgattgtcagtgaccagttatcaccaccaataacaggagaatcattctgtactgatatggtgcgtcatagtgattatgcggacctggaggagaaatgcgcggcgctggcggcggagaatgcggggctgaaataccaggagccaacgctgacggcgatgatggcgtgccttgaagcgttctacgctgacgagggcgtgccggaacgagccatgatgggcgcctataacattcttcgtaagtcgataaacacgccagccaccgacgattttctggctgaagtgggggcacagggtgtggaacgttacgccgcacaactcaaatcggaggctgaactcgccgacgaaactggctgggacggagccgccaaatttttaatttctgaatctgaaaaagtgctggcattcgcagcccaacttcgacaggaggccgcccaatga

SEQ ID NO: 375533 - DNA, 171 bp, Salmonella enterica
atgagaggtttgtcctacgaccacggaatccttccatcggaaatgattattcgacaccgcttcaagcccattaacgatattccacgcgaagaaatgctggcgagaaaaagttttccatcagtgaatgaaaacaaatatctgaatgcaatgttgcggagtgggaagaaatga

SEQ ID NO: 375534 - DNA, 294 bp, Salmonella enterica
atgacaaaaccattgtttgactataacaatcctctccgctgttccggcaattccgtctcggaggtgctggataaattcagaaaaaactacgacctgataatgtcactaccgcaggaaacgaaagaggaaaaggaatttcgccactgtatatggcttgcagagaaagaagaacgcgagcgaatttaccagacatccatccggccattccgcaaagccacttacacccaattcattgaaatagacccgcgccttaaaaattaccgttcgcgttacggcgctatcagcaataactga

SEQ ID NO: 375535 - DNA, 498 bp, Salmonella enterica
atgattgaaaatttatcacataattatcttcatgaattaaagaataggtttttagcaaaggttgacattaattcagggtatgtgcctgaaaatatgaaaactgagtgccatatttggatggctgggaagagttgcagaggatacggaagaataagcgttaatggaaaagtggttaaggctcacagattatcatatgagtttagtaaaggaataattccagaaggaaaggttgtgattcatttgtgtgacaacccatcttgcgtaaatccaaagcatctagcagtaggtacagtttctgacaacaatgcagatatgcggcataagggacgcgcaaaatatcaaacaggagaacagaacggtaactcaaaattaacaaaggataagatttttgatatccgtagagatatcagatcaaacagaattattgctagagaatacaatataagccacacacatgttggtttaattaaaaacaagaaaatatggagacacttataa

SEQ ID NO: 375536 - DNA, 471 bp, Salmonella enterica
atggcaagcagaggcgtaaataaggtgatcatcttaggccgggtcggacaagacccggaggttcgttattcaccatcagggacggcgttcgctaacctgacagtcgctacatcagagcagtggcgagataaacagactggcgaacaaaaggagcagactgaatggcatcgtgtggtgatgagcgggaaactggcagaaattgccagcgagtatctgcgaaaaggctctgaggtttatcttgaaggcaaattgcggacaagaaaatggcaggaccaaagtggacaggatcggttcactaccgaagtcatcgttggcgttagtggaaccatgcaaatgcttggtggcaagcaaggaagcaatgaacagtcttcacatcagcgaaataacggtcagcaacaaagacaacaacctcagcagaagggaaatcacaacgaacctcccatgaacttcgacgatgagatcccattttaa

SEQ ID NO: 375537 - DNA, 189 bp, Salmonella enterica
atgataccagtggatttagcaaggacaccggagttgagcaggttaaaacgtcagtatcacctgacagaggcaatgtactggcgcaagtcaggtaataaatcgatgaaacgaaattgcctttcattagccaaaaacgagcgaataaacaaaggtgaatttctggctaatccttccgaattaccattctga

SEQ ID NO: 375538 - DNA, 315 bp, Salmonella enterica
atgaaattacgtgtctggcatatcccgcaagttcctatgaagccattcattgtagaagtagcaagtgttgaagagggtgtgcgagtgatggatgcactggctgattatgacgcatttcagtatgacaacaacatcaaacctgattactgcaacgctaacggccttgagatgtgggatgagagccttactgaccaggatttggaagaaatggagcttacggatcgctgggtggattggtatagcgaatgccagtgttacgacgacccgcgtgaatatatcgaaagcctgaaagaagaaacaacagccgccgcctga

SEQ ID NO: 375539 - DNA, 126 bp, Salmonella enterica
atggaaataaataaagagcaggcatcagaaattataaaacttatcgaacaagcattacttgatgggtttgatgatgaaattctggtttcgctacacgaaagtcttaccaaatttgtcagcgaataa

SEQ ID NO: 375540 - DNA, 330 bp, Salmonella enterica
atgacggttatcacctatgggaagtcaacgtttgcgggcaatgctaaaactcgccgtcatgagcggcgcaggaagctcgcaatggagcgcgacaccatctgcaatatcatcgattcaatttttggctgcgatgctcctgatgcttctcaagaggttaagacgcagcgtgttgacagggtaacaaaagcagtttcacgtgcaggaaacaaagttaagcagcaggaaatagagcgcaagaagaaccgcatttactaccacgatgctaacccgctcggtaacaaaatccacgcagtacagcgcataaagctgaacagcaagcctctcatctaa

SEQ ID NO: 375541 - DNA, 246 bp, Salmonella enterica
atgaagcatatctgtaagaaagaccatcgctatgaccctcgctttacttctctcccacaaaaccaaggcaataccggacgccacaaatgcccaggatgtgcattcgagcttgcaatggagctaaaggctaagggcattccaatgtgcaacgacgattctattctggccgatctgccagagagccaagcaggaaccgttcgtcataaggatgcttttgaagcgtacaagatggcgtatcaggcttaa

SEQ ID NO: 375542 - DNA, 183 bp, Salmonella enterica
atgcggccttttttattggatggaattacaggtgtaaaaaaactcagctataagccgatcaatttgttgaagtttttatttatcctgggtaggatcccgctgttgtgcgatcgttttctgttcgccaacaacggaaaggcccagaaggcggcaaccttctgggcccacaaaaacactggctag

SEQ ID NO: 375543 - DNA, 636 bp, Salmonella enterica
atgtctcaaggtgctctcgctaaagcgtcaggcgttgctcagccaacgatctggcgtttgacaagtggaaacgctcgtgggtcaacaaagattgttgaaatagcaaacgcgttaggtgttaattcggaatggttgtctaccgggattggtcctatgaaaaaagatggaactactccgataaacgcatctccatcttcgaacacatttaaaatcgatatcctagatcttgaagttagcgcgggtcctggcgttatcaatcgagaattcgtggaaatactccgctcggttgagtattcgcaggatgatgccagacacatgttcgatggtagaaaggctgaaaatatccgcatcataaatgtgcgcggggatagcatgtcaggaactattgaaccaggagatttgttgtttgtagacgtaagcatcaaaaacttcgatggagatgggatatacgccttcctctatgacgatactgcacatgttaagcggctccagaagatgaaagataaactattggtcatatctgataataagagttattcagcttgggacccaattgaaagagatgaaatgaatagggtttttgtctttggaaaggtaattggaagcatgccgcagacctataggaagcacggttag

SEQ ID NO: 375544 - DNA, 282 bp, Salmonella enterica
atgaacgtagttgcaactaaaagcaagaaggcggctcgcattgagtccactttactcaacaagttagccatgatggggcagaagacattcgctaaagctatgggtgttcctgaataccaggtaagccgatggaagaacggtttcttctctcaggtcagcatgatgcttgcggttctggagtatggaatcgaagacgaggaaatggcagagctcaccaggcgacttgctacctacctgacaaaagaaaaagccccgaagaacggcgaattcttcgaggcctga

SEQ ID NO: 375545 - DNA, 147 bp, Salmonella enterica
atgccaaaacaactcagtccttaccaggacaaaattcacaaacacatactacgtgatcgcttcctgtccagcttcaagcagcctggtcgattccgggctgagttggaaaaggtgaagctgatgcagaaggagaaaggtcatgagtaa

SEQ ID NO: 375546 - DNA, 603 bp, Salmonella enterica
atgagtaacgacttctttggtttgcctgagataacaggttctaactatatcgctgatcattaccgtgaagaaggttggatttatgtcctctctaatccttcccttcagggaatgctgaaaatcggaatgacaacgattagccctgaagtcagggcgtctgaattatcacggtcaacctccataccaaagccttttgtaattgaggcttcatttttttcaaaaaatcccgcttcggatgaaaaatatatccatgagctactgagtgacaagagagtcaatgatcgtcgagagttcttttattgttcagtagaggacgccttatcagtaatacaggaagagcttgggcttacctgcgccactgaaaccatggattccatcccaatcaactatgaagttgcctcaatggattcggcgatagaaatcaatgccgagtcaattctggaagagctaaacatttctcactttggtgagccaagttcgtgtcttttagcgctagtgaaacttggtgccgcactggtgaaagacaaaaacagaaatcatcttcaatcactgctgataaagggtggagaactccattgccttgagtgcaggaaagacgcgtaa

SEQ ID NO: 375547 - DNA, 675 bp, Salmonella enterica
atggcaaaagccatgagtattaaggttggaaaccctctcaggaaattagttctcattaagctagcagacaacgccaacgataacggagaatgctggccgtcttatcagcatattgctgaccactgcgaatgcagtaaaagcgccgtaaaagaacatatatctgcgttaataaaactcggactaatgaccaaggaaaatagggttggggttaacaacggaaaaggtaatacctccaacgtttatcgcctgcatttaacaagaacccctgtgccgccagaaagcacaccccctgtgccgccagaaagcacccctgtgccgccagaaagcacaccccctgtgccgcctgctggcaccagaaccagtcactcttttgaaccagtcaaagaacctttggataacaagaaaaaattatcttcgatgccggaaggattttcaccgtcagcatcccatcagaagatggcggaagaatacgggatatccttgcaggaagagtttgataaattcaccgatcaccacatcagtaagggtagtaaatttgttgactggaatcgcgctctgaatacctggctccgaaatgctaagggatttcaaaaatcacgtccttctaactctttctccaaaccatcatccgcaatcaccgtatcgaaaactggctacgtgtttttcgacaggtga

SEQ ID NO: 375548 - DNA, 1881 bp, Salmonella enterica
atgacgccaagtgaacttagcgacctgctatgggcgcaggttgacagggtggctccgcacctgttgccaaacggcaagaaagacgggcatgaatgggttgctggtaacgtcaacggcgacaaggggaacagcctgaaggttaaccttagcggcaagaaaaaatgggctgattttgctgagggagacggcggtgacatgctggatttgtggatggcgtgtcgtggaattaacctgcatcaggccatgcaggaagcgaaggcatttctcggtatcagggaggacgatcaccatttcgacgccagacgtgagaagagattctccagacctgaccgcaagaaaatcgcccgctacgttaccagaaccgaatcacatcttgagtacctgcaatcgcgtggcatatctcctgaagttgcgaagcgatacgaggttgtcagcggaaaggtctggaatggcgaacgtgaactgagtgccctggtgtttccgtataaacgcgatggcgagctgctgcaggtcaagcgaatcagtactgaacgtccggacgggaagaaagtcatcatggcagaaggtgactgtgaaccttgcctgttcgggtggcaggctctcgatgctggcgtgagggcggttgtgctttgcgaaggcgaaattgattgcatgagctatgcgcaatacggaattccggcgctatctgtcccgttcggtggcgggaaaggcgccaagcaacagtggattgagttcgaataccacaacctcgacaggtttgaagaaatattcatttcgatggacgttgacgatgtcgggcgtgaagcagcaagggaaatcgcaagccgacttggtgatcatcgctgccgtctggttacactgccacacaaagatatcaacgaatgcctgatgaacggcgtcaccgaggatgaaatctggcagtacatcgggacagcgtcatatttcgaccccgaagagctttacagcgcacgtgagttttatcatgacactatcaatgctttttacggcaagcagcagtatctgtttaacccaccgtgggaaacgctggcttataacttccagttccgtgaggcggagttaacgctggtcaatggcgtgaacggtcacggaaaaacggaggttgtcgggcatatggcacttgaggccatgaggcagggggtaaaaacatgcgtcgcatcacttgaactgaagcccggggttttgcttaaacgcctgaccaggcagtcaacatgctgcaaaacgccaccagtactggaaatcgaatcagcatttaagttttacgatgaccggctctggttatttggcctgacaggtacagccaaggctgaacgcctgattgaaattttcacatacgccagacggcgatatggcatccagttattcatcatcgacagcctcatgaaatgcgggattggcgatgacgattacaacgggcaaaaggcgtttgttgattcgctgtgcgacttcaagaataaaaccaactctcacattatcctcgtcactcactccagaaaaggagacagcgaagagaaacctaccggaaaaatggacgtaaaaggctcaggagcgattacagacctgacagataacctgtttatcatctggcgcaataaagctcgcgagagagcgttacagcgcgtttatgctggagagcagattaacgataaagaccagcagcttcttgcagcacccgcatctgttttaatgctggagaagcagcgtaacggggaagggtgggaaggtggtgtacagctatttcttgatgagcagtctcaccagttcctgcaaacggaagatgcatccccatacaactacatcgccaatatgccgaaatcggaatatgacgaagcgtggcgacaggaaaacgttacggagtactga

SEQ ID NO: 375549 - DNA, 207 bp, Salmonella enterica
atggttaattggatgctcgccgccatcaaatgcattggcgttggatggattcttctgacgttttttattgctctgcgtagctacattagtcttgttaatggcggtaaagacccattctctacgttgtttggtgctgcgtttacctgggtacttatcggaattgtacctgtagcgatagcaaaaatggcgtggcgttttatcaactaa

SEQ ID NO: 375550 - DNA, 231 bp, Salmonella enterica
atgacagagccaagaattgaaaaactttttggttgcgatagctggcgtgacaaaaaatttcgtcgggcagatgtggcagaagaggtttttaaatactttggtgatgatttcgttgattccgcttattacatccgtgctggacgaattttaaaagaaggcattgaacgcggagttattaagaagatagggtcggcaagatacataatgattaacaccaccacagagcgctga

SEQ ID NO: 375551 - DNA, 300 bp, Salmonella enterica
atggacgaatcgagaaagcagtttcagtcgtggtttgaagaatggtttggcgaaccgcctcttacgccctggaatgaactttggtgcgatgatggttattcagcagaagatattgaccatatgtgggatgcatggaaagggtctcgcgcagctattaagattgagcttttggatattaatcagtatttagctgaactggagaacaaaacgctaagtctggctttccgtcgcctggctgaaggcgtccgtgccggagatatcacaacaatccgcgccgctggaatcaaagtgaaggagtga

SEQ ID NO: 375552 - DNA, 210 bp, Salmonella enterica
atgagcttaccaaaaccatgtcccttctgcggaagcggaaatatagaaaccgtctcccacagcgttggtagctggttttttgtctattgctctgaatgtggtgcaaacggaccagaggaaaacacaatagtgaaagcggcattagcctggaaccggagagcgggagatgaagcaaacctatctgcttcgcaacgaagcaatcagaaataa

SEQ ID NO: 375553 - DNA, 447 bp, Salmonella enterica
atgaagcaaacctatctgcttcgcaacgaagcaatcagaaataacgccatagacgccattctctcactacccatcgacgacaagtcaccccacgaagtccacgttaaagaacctaagcgaaccaaagcgcagaacgaccgtatgtggccgatgcttcaggacgtctcccgtcaggtgctttggcatggtcaacgactgtctccagaagactggaaagacatcttcaccgcgctgtggctcaagactaaaaagctggagcaaagaagcgtaccaggtattgatggcggtgttgttcttcttggtgtacgcaccagcaagatgaggaaggcgagcatgacagaacttatcgaaatcatgttctggttcggctcagatcgtaacgtgcgatggagtgatgattcccgtcgagagtacgagtggtcacaacgaacagggggagttgcatga

SEQ ID NO: 375554 - DNA, 333 bp, Salmonella enterica
atggattattcacagttaagtgattttgaaattaacaagcgagtcgcgatagcgacagggcataagaagtttaacggcctgggatggcaagggacacaagaagacagttgtagcgcagtgatagtaagaggtccaactaaaataggcgcgtttgacccatgtaataacccggcagacgcatggccgattattgagaaatacagaatttctttcttagaccagttaactgaatggtgtgtagatgcaaaaggcgtgagtccaatatttgatatcagacctctccgcgccgccatgattgtctttctcctgatgcaggacgccaataatgcttag

SEQ ID NO: 375555 - DNA, 612 bp, Salmonella enterica
atggctaaatcagcgcgaagacgatgcaaaaacgaagaatgtagggaatggtttcaccctgcattcgctaatcagtggtggtgctctccagagtgtgggaccaagatagcactcgaacgacgaagcaaagagcgcgaaaaagcagaaaaagcagcagagaagaaacgacgacgagaggagcaaaaacagaaagataaactgaagattcgaaaactcgccttaaagccccgcagttactggattaaacaagcccaacaagccgtaaacgccttcatcagagaaagagaccgcgacttaccatgtatctcgtgcggaacgctcacgtctgctcagtgggatgccgggcattaccggacaaccgctgcggcacctcagctccgatttgatgaacgcaatatccataagcaatgcgtcgtgtgcaatcaacacaagagcgggaacctggttccttatcgcgtgatgctcatcgagcgcatagggattgcagcagtagacgaaatcgaatctgaccataagcggcatcgctggactaccgaagagtgcaaagcgattaaggcggagtatcagcagaagcttaaagacctacgtgacagcagaagcgaggcagcatga

SEQ ID NO: 375556 - DNA, 225 bp, Salmonella enterica
atgagcaaaatccaatacccaatgaccactgcggcaattttcgatgatgttgtctatccgctgcatttcgacaatgccggcaaggttaggcaagaaatggaaggcgctgttaactggttctgcaggtggtgcaacgaagagaaagccgctgtgaaagcgagattgttggtcagttgctggggtcaatatctgagtcatgagcaggttatccgggaggccgcatga

SEQ ID NO: 375557 - DNA, 204 bp, Salmonella enterica
atgacacacactgtcaaaaccattccagacatgctcatagagacatatggaaaccagacagaagtagcacggcgcttatcgtgccaccgcaacacagtcaggcgttatctgtacgacaaagaagccaggtatcacgccatcgttaacggcgttttaatgattcatcagggcgggagaggtatttatgaccgtaaccagcattaa

SEQ ID NO: 375558 - DNA, 180 bp, Salmonella enterica
atgaccgtaaccagcattaaccaggcaaaacagcagcgtgaacgtgacgaggctgaattacgcagcgtcagagagatgacggagcaacaccagaaggcgatggattatctgaatgagcgagagcgtgaactggtgaaccggctggggttgaataagccaacgggagacgatgcttcatga

SEQ ID NO: 375559 - DNA, 612 bp, Salmonella enterica
atgaggctcacaccgatattcagcatggtcaacttcatcgacgatgctcatttccgtcgcgtatggaagcacccgaagaaaaccatcaactcacgccagaaagcatgggttcactacatgcttcaggtatggggcaaggttaatgcaggggatgattctcctggtggggcaatcaacgttatcggtcgcctgatgattcgtagccagtggagtgatgacaaggccaagcagattgaatctgttgtcatgcgtctgtacgaagaagatggactgcgtggagatgctctctataagaaagctcgcgaacttgtcatccctcaatcatcgttcagcaacatcatcgctctcgccaaagaatccgatgatgctgctttcgttgaacgtgtgatggtcaagacgtttcaccgtgaaagccccgcccgcgatgtagctattaagcgatattgcaatcgcaattgcacgcaagatatcgccaggctgatgaatgcagtcaccggaatggatatccagtcgtgcaggcgcagggttgtctggtgcgagaatgtgctcgattcagaaatcttttatgcgatgaggcgcgaaattgagaaagaatttccactagcagcataa

SEQ ID NO: 375560 - DNA, 267 bp, Salmonella enterica
atgtcagctctttggctgaatgggaaacaggaaagagcactgacgagcgtcgtcacaatcccgcatcagcgtttcaccgattgctattccgaggatgccggttgccgtctgcctaatgcccttaccagatttcgcccacaaaaaagccccaaggcgagaacctcagggcttatttgtttggctgctctgttcgcttttgctccgagcatacacaaaatgtactacttccatttcgcgttagcaagttatttaggacaatttacctaa

SEQ ID NO: 375561 - DNA, 273 bp, Salmonella enterica
atgaagatggacgaaagatacagcaacgcgtcatatggcagcgctggtcttgcggctttctttgccagcctgtcattgcaggactggggcttcatcattggcgtcgcgttcagcattatcctcggcgttcttacttatcggctcaacaagcgcgagcaaatgaagcgaacgaagatactgcaagacatactgaacaaaaccgactccaccaatccatcagcaacggcgaaggttattgccgaacttggacagaaagcaccgaaggaaatctga

SEQ ID NO: 375562 - DNA, 489 bp, Salmonella enterica
atgaatacctctctgcgtaataaaatcgctgccactttaggtggtggtgccattgctgtcgctacagtcatgctgtcaggaaaggatggattagagggaagggagtacgacccttatcgtgatgtcgtaggtgtgctgactgtatgtgatggtcacactggcactgacatcattcaaggtaagcgatacacagacaaagaatgtgatgcgctaactcgaaaggatttaaagcgaatcgccagtcaggttgatccgcacatcaaggtgccaaccaccgaaacacaacgggcagccatttacagcttcgcttacaacgttggcgcaacagccactatcaactccacgctactaaagaaactcaacgccaaagattacgccggtgcatgcgccgagcttaagcgctgggtatatgcaggtggtcaaaagtggaaaggactggttaacaggcgcgacgttgaatatcaggtatgcacttggggacagaaatga

SEQ ID NO: 375563 - DNA, 462 bp, Salmonella enterica
atgagtcgattcaacttaactcctgcgttaattctaatcgtcgcagtactggccatcttcgttaaccactaccgcgaaaacgccatcgcctacaaagaccagcgagacaaagctaacaagaatctcagcctggcgaacgccaccatcaccgatatgcaaacccgccagcgtgatgtcgctgcgctggatgccaaatacacgaaggaactagctgatgcaaaagctgaaaatgattctctgcgtggcaagcttgataatggtggtagggtgctcgtcaaaggaaggtgtccagtgccatcctcagccgaaacctccagcgcctccggcatgggcaatgatgccaccgtcgaactctctccagttgctggacgaaacgttctcggtatccgggacggaatcatcagtgaccaaacagcactgagaacgcttcaggagtacatcaggacgcaatgcctgaaataa

SEQ ID NO: 375564 - DNA, 531 bp, Salmonella enterica
atgaagtacccaacagttattgtcaatggtgtgtccgttcgtgttgatgaggatggacgctacaacttaaacgatctccatgcagcagcagttgcaaatggagaggctacagagcaacagcgcccaagccagtttttgcgtagcgcgcagataaaacgcttcataaaagcactggaggccaaagtgcaaaaaagcactttggaacaaattcaaccacttaaaataatcaaaggtggtgcagaaccaggtgtgtggggtgttgaacttctggcaatcagatatgcagcatggattaagccggaatttgaaatcgaagtttatgaagttttcaaaacggtcgtccgtctcggcgttggcgcaatgtcccgtctgaatagaatcgatcacatcatcaatactgaaaccaaagcgataagccagtgcgcaagccaaatggctaagtggggcgttggtgggcgaaaaagattgcttcatgttgcacgtgagagagcggcaaatgaagtgcaaatgtatttgcccggaatggtgtga

SEQ ID NO: 375565 - DNA, 432 bp, Salmonella enterica
atgacaggtctgacaataaagcaagaggctttctgtcaggcatacatcgaaacgggtaatgcttctgaggcttatcggacggcgtatgctgctgacaagatgaagccggaggcagtacatgttcaagcatgtaagttgcaggataaccctaagatagccctaaggataaaagaattgaggggtgagattaagcaacgccataacgtcaccgtcgattctctcctcgctgaactggaagaggccaggcagaaagccttaagcgccgagacgccacaatcatctgcagctgtagcggcgacaatgggtaaggctaagctggtcggccttgataagcagattatcgatcacacctcatctgatggaactatggcaacgaagccaaccactattcgcctggtaggagttgacccagccaatggaaagccaagttga

SEQ ID NO: 375566 - DNA, 1320 bp, Salmonella enterica
atggaaagccaagttgacctccagatacctgccaagttagttcctgtattctcgacagaaggagtccgttatcgtggtgctcacggtggacgtggatctgctaagacgcgtaattttgcactaatgactgccgtcaaagcgtatcaagcggcagaagccaatatcagtggagttatcctgtgcgctcgagaatacatgaactcgctggaagaatcctccatggaggaggtaaagcaggcaattcgctccgtggcgtggcttgacgattacttcgacattggagagaaatacatcaggacaaagaaccgcaaggtcagctatgtattctgcggtcttcgccataacctagacagcatcaaatcaaaagcgcgaattcttgtagcctgggttgacgaggccgagtctgtttcttcgactgcgtggaaaaagcttcgcccgaccgttcgtgaagaaggctcagaaatctgggttacgtggaacccggagaaggacggcagcgccaccgacaaacttttcagaaagaatcccccaaaaagctcaatgattgtcgagatgaactatgtcgacaatccatggttccctgcggtgcttgaggaagagcgacaggaagacctggcaaaccttgattacgcagattacgcgtggatatgggaaggcgcatatctcgaaaactcagataagcaggtgctggctaacaaatacgtcgtgcagagcttcgaagacaatctatggagaaaatcagagcgcttgctgttcggtgctgacttcggattcgcgaaagaccccagcacactcattcgcatgttcattctggataacaacctctacatcgaatacgaggcctacggcaatggcgtagaactcgacgatatgtggaagttttacgcaggcaaaaccgatgccacgccgaaacagcttgaggactggaaggtcactgacgatacgaaattccccggtatccctgaatcacgtaaatggcccatcaaagccgacaactccaggccagaaactatcagccatatcaaagggcagggattcaacatctcagctgctcagaaatggcagggtagcgtagaggacggcatcactttcctacgtggatttaagaagatcatcatccatcctcgctgcaaagaaacagcgaaagaggcgcggctttactcgtacaaaacagaccgtatcactggcgaagtcttgccgattatcgaggataagtacaaccactgctgggatggaatccgatacggtctggacgggtatatcaaacgcaaacctcaatcgatggggatgatgattcctaagcgccttagggggaaataa

SEQ ID NO: 375567 - DNA, 1353 bp, Salmonella enterica
atgactgacaaattaacactagccgtcaatcacgcgctgaatgacgtcaggcttgctcgcgcccgcatggggctacttaatccttcaatgggtttggacgctaagcgtaattcagcctggtgcgaatacggattcaaagaagaattaaccttcgatgacctttacaagctctaccgccgcggtggtatagctcacggtgccgtagaaaagcttgttggtaaatgctggcagtcaaaccctgaaatcattgagggtgaaaagtcagatgaaacacgcatggaaacgtcgtgggagtccaaaactaagcaggttttcactaaccgactttggcgcgcgtttcttgatgctgatcggcgacgtctcgttggccgctatgcaggaattctcctgcatattcgagataataaagcgtggaatctggaaccaacgaaagggcgtggtctggaaaaagtaagtattgcatgggccggttcactgaaagtcagcgaatggcatgacggagtggtttcaaagaattatggtcagccgaagatgtggcagtacacagagattctacccaatggttcctctcgccgtgtcgacatccaccctggtcgagttttcattcttggtgactatacagacgatgcgatcggtttccttgagcctgcatacaacgcttttgtcagtctggagaaggtggaaggtggttccggtgagtcgttcctgaagaacgctgcacgccagcttaacgtcaactttgaaaaggaaatcgacttcaataatctggcgtcgctgtatggcgtgagtatcgatgagctacaggaaaagtttaacgaagttgccggggaaattaaccggggtaacgacgtgttaatgaccacgcagggggcgacagttacaccacttgtcactgccgtagcagacccaacagcaacctacgacgttaacctccagacagcttccgctggcgtagatattccgactcgcattctcgtaggtaatcagcaggccgagcgttccagcacagaggaccagaagtacttcaatgctcgctgccagtcccgacgaggcgaattgtcattcgagattgaggacttctgcgacaagttgattaacctcggcattatcgacccgataggccataaaacagttatttgggacgaccttaatgcgcaaagcgatagtgaaaaactggatgccgcgcagaagatgtcgcagataaacagcgcatcattagcaacaggcgagcaggtatttactggtgaagagattcgtgtggctgccgggtatgagggttcacctgaaccacttccggagatagatgatgacgaagaagaaagcgaaatcaccgatactacccggaaaccttaa

SEQ ID NO: 375568 - DNA, 960 bp, Salmonella enterica
atgacgaagaagaaagcgaaatcaccgatactacccggaaaccttaaagacccgacaggcgctgaccgccttgagcgcggagcaatgaacgagttcgccaggcgaatgaaacgcattggcaaagcctacaaggacatcctcgaccgcattcctgcatcaccatcagtaaaccagcgctacaccttcgaactcgactccacccagctatcaatgctcctcagcaatgcctcattgctggtggatgagattttgggtgcggataacgagacggggttctggttctggactgattacgtcaacccggcgtatcagcgcggcacggcgcaggaatttgccaatctggcgcagcagtcagccgtgtacgcggcaggacaggaaagcgtatcggcaatcctcctgagtgagccgtaccgccgcagactcattctggttcgtgctcgtaccttcgaggaaatgaagaacttcagtgccaccgtgaaagccgacatggcgcggatacttaccgatggtctggggcgcggacagaacccgctggagatagcgaagcgcatcactgagcagacaggtattgagtctcgccgggctaatcgtattgcccggacggagattaccaccgcgctgcgccgtggtcgatgggatgaatcagatgaggcaacggagcaatacgggatactcacccgccaactgcatttgtcagcactcagcgcgaccacccgccagactcacgcgttacgacatggaaagctctacacaacggaagaagtgagggagtggtacagcatcaatggaaacgcaatcaactgcaaatgcactcaggtatctgttctcgttgatgaggcgggtaatcctctttacccgaacgttatcgacatggcctggaaaaggctggagaaagcgaagcaggcaggactggttcccaatcattcgcattgcggttgtgggcgcaagcacgctgcataa

SEQ ID NO: 375569 - DNA, 1263 bp, Salmonella enterica
atgaaagtacaggttaatgtcacttcaaaagtgaacagcaaagccatccgtagggagcaacacaacggacgcgaacattgggttgtcccttcctacacactcccggcaaacgtggtcatgaacggcggactctatcctgccagcgaaattgaccagcactataccggtctggaagggacgctggcaccgctgggacatccacaggtaaacggccagtttgtttcggctttcagtcctgaaggcttgaatgtgggatatgtcggggcgtggaacaaaaacgtcaagaagtcaggtaaccgtgtctacgtcgagaagtggatcgacacagaagtggcaaagcgtacagatgatggcaagcgtcttcttgagcgtcttgaggcgctggagaaaggcgatgatgttccgccaatccataccagcgttgccgtattcctggaagaactggaagcgaacgatgagcagaaagctcagggggcttcatgggttgcgaaaattcacgcgatggatcatgacgccatccttctggatgaggttggcgcggccacgccagagcagggggtagggatgatggttaacgctgacctcgccacgccactgaaggctaattccggtgcgctggttggcgaaacctatcgcgagcgagagcggcgtctggagaagtatgcgaaagataaattcgctcccggagagaaagaatacgcctgggtggctgacttcactgactcgcaggccgtaatcatcctcaacaatggcgatccgaaggtttacggatacaaatctgagggcggaaagattgtctttgacgatacctggacagaggttcagcgccagagttcatgggttgccgtcgtcaacaagctcaaatcatttttcacaccgcaggataaccctgcaccaaaccacaaaatggagggcgacatgcctttaaccaaagaagaactggaacaaatcggcagcatggttagcgaggtcgtcgccaccaataccgaaaaggctatcaagcctctcgcggaaaaggttgatgcgctacaggccaatcagcaacaactttctgaagccctgactgccaactcccgcgccgaagagaaaacgaagcgtgaagcggtggcaaaagttcacggcgagattgtggctaacgccctgtctggcgaagcgctggacgcgatgtacaaaaccattggtgatgccgcaccgctgggtactaactctgctcagcatcagaaagaaactggcgcacctgccgcatctgaatacttcaaataa

SEQ ID NO: 375570 - DNA, 450 bp, Salmonella enterica
atgtcacgttatcgtcgcgttaatatcgacggggaatcgctctacaagaccgaaacccgcctcacctccgcagaactactgccaggcactgccgtcactattaacagtgatggtaagttcgcacaagccactgcattaactggccgcatgtacattatcgattgcgcttatcatcagggacttggcattcgtgatgccgttcctgctggcgattctgctgttggcaactatgtagaagaaggccgtgaacttgcgcttctgtgtgtacctggcgcgtacaagaaggacagcccgattaagcttggcgaggctggtcaattcacactggcaactggcgacaccgattcagtaatcggctacagccaggacgagttcaccatcgcagccagtaccaccgatttcattcgcgttcgtatgcgcgttggcactgccgccgctgcaggcgcgtaa

SEQ ID NO: 375571 - DNA, 1077 bp, Salmonella enterica
atgtatttctctaaagagacactggcgaccaactcgcgccttggtggtcactggaatgagctttgggcaaaccgcaacatgtggaacgcacagcatgatgccatgattgcggcaaatcgttctaatatgactcctgaatggctggcggttaatgctgtaggcggttttacgcgtgatttctgggccgaaattgaccgtcaggtgctgcaactgcgtgatcaggaggttggcatggaaatcgtcaacgacctgattggtgtgcagaccgttcttcctgttggcaaaacagcaaagctttacaacgttattggtgatatcgctgatgatgttcctgtaagcattgacggtcaggctccattctcatttgatcataccgaatatgcgagcgacggagacccgattccggtattcaccgcaggttacggtgtgaactggcgtcatgctgctggtcttaactctgtcggtattgaccttgtgctggattcgcagatggctaaaatgcgcaagtttaaccagaagcgtgtcaactactatctgaacggcgacccgaatattcaggtgcagtcctacccggcgcagggtatcaaaaaccaccgtaacaccaagaagatcaacatgggttctgtttcgggtggcgcaaatatagacctgaccactgccgatatgacagcactgtttgctttcttcgggaaaggcgcatttggtacgctggcgcgcgccaacaaagtcgctcagtatgatgtgatgtgggtgtcacctgaaatctgggctaacctggctcaaccgtatgtagtaaacggcgtagttagcggcaacgtactgaatgctgtgctgccatttgcgcctgttcgtgaaattcgcccgacctttgcgctgagtggcaacgagttcattgcctatgttcgccgtcaggacatcatttctccgctggttggtatggctgttggcgtcgtgccgctgccgcgtccgttacctaacgttaactacaacttccagatcatgtctgctgaaggtttgcaaatcaccgcagacgaccaaggcctgtccggagttgtctatggcgctaaccttgtgtaa

SEQ ID NO: 375572 - DNA, 189 bp, Salmonella enterica
atggctaaatacgaagttgtacgaccatggttcggcgtaaaggttggcgatgtggtggatataaaagaactgcatccagccctgaagtcgaacgttcgcctgatgcgtggagaggcgggtggtgacctaacaccggcaactccagaagcgaaatcaggccgacgccgtaaaaacgaagaagacgaatag

SEQ ID NO: 375573 - DNA, 402 bp, Salmonella enterica
atgattaccacagaacaggccaaggaatatctggagtcagtgggtatcacgctgccagatttcattctgcaggctatcgtagagcaggctaacagtattcaggagtgcctcgatgcacattacccgcccgcaacggcgctgctaattcagtcctatttactgggtttaatggcgttggggcagggtgatagatacatcagctctcagaccgcgcctaacggcgcatcgcgttcatttcggtatcagtcttttgctgaccgatggaagggggccttgtcactgctgcgtggcgctgacaaattcaggtgtgccaatggactcatccccccagacccgaccaatacagcgtttgctggtatctggattggtaaaggtggttgcatgtgtaatggggataagtaa

SEQ ID NO: 375574 - DNA, 180 bp, Salmonella enterica
atggcatggatatcggttaagcagcgattgcctgaaccgttcgtcaaagtctgggtgatgacagacattggtaagcgcgttaccggctatgtcaaaagcaacggtgactggtgtctgttgtgtcgaaaggtggcagcggaaaaaccggaggtgatccggtgggaggatggaaatgtctga

SEQ ID NO: 375575 - DNA, 363 bp, Salmonella enterica
atgtctgaaatagcacgctggagttacaccaatgttgcgaccatctacccgcgcgtctacgacgactggaacagcacctggacaaacggaactccctacctgattgactgtacctggacggcgaacaatgaagttgcggtagatgcctgcgggaaagagttcaccacgaacctgattttcttcactgaactgaagtgtaacggcgtcgatgcgaccatgccgcagcgagactggtatatcgccagaggtgacacaacggcgcaggacgatccgctgaaagctggtgcaaacgtcatcaaagccgtaaccgactgggatatgtcaccatttagcgaggaaccagactacaaaattctgacgtga

SEQ ID NO: 375576 - DNA, 438 bp, Salmonella enterica
atgcccgttaaaggtatcaagcgtgttcagatgaacacccgcaaggtgctggcagaaattgccgggccacgcacagaaagagtgctgactgaggtcatgattgtcggatcatctcacgccgcgctacttactcccattgacacatccacgcttatcaacagccagtacaaaaagcttgaaccaatgcccggtgggatgcagggaaaggtcgggtacacggctgcatactccgccgccgttcacggtatgtccgggaagctaaaaggccagccgcgtgaacacttcggcagaactcgcgctggaaaagaattcggtggcggcacggggaaggggaactactgggatcccgatgccgagccggggttcctgaccaaaggcttcgagcgtgacggtctcaacgagataaaggccattatcaagcaagggtacaaagtatga

SEQ ID NO: 375577 - DNA, 387 bp, Salmonella enterica
atgacacgtagcgaagtgtatgacgcgctgagagcgtggttgcaatcgcatggctttgatgctggctatcgcatccagaaacgcttctggaatgaactggagagtacggagggggaacgatatctcattatccagcagaacggcggtggcaagccagaagaagcgataacccgcgattatttccgaatcctcctcctgtcaggccagaacgacagcaatattaaccaggttgaagaccgcgccgacgccatccgtcaggcgatgatcgacgactacagaaccgaatgcatcatctcgatgcagccagtcggcggtatcaccgccatccagaccgaagaaggccgttacctcttcgatatttcctttcaaaccatcatttccagataa

SEQ ID NO: 375578 - DNA, 738 bp, Salmonella enterica
atggcatgtgaagcaggtgctttcacagggcgtgatgtcgtcgtttattacgcgattggctgcccggaagtacaacctaccgccagcgcttaccagcgactcggcatgatgcgcggtaaaacagttaatgcagagtgggaaactgcagatgcaactgccgatatgagcgccgcgtttacgcaggaaaatcttgttacctataagaacatttcgttctctggtgacggcgttacccgcaaagaggatgtatacgcgcaaaacgcgctgaagcgtcacgtttataacccgccagcggagaccagcaaccagccgtatgtgtggttcaaaatcatctctccaaacgatatcaccgaagggccattcatggttacttcatggggtgatgaagctccacacgatgatgtggcaacgtggtccattgaggcatcaagtgcaggtcaggttgatgtgcgtgatgtcggtgcagttattaccattaccacccagccgcagggtaaaacactgactgctggcgacaccctgaatctgacagttgcagctactgtttcagatagctcgtcattgacttatcaatggaaaaaagacggaaccaatgtgagctccggtggtacgacagctacatatactaagaccagtgcgacaacaggcgattctggttcatatacttgtcagattagttccagcaccgcagccagtgtaaccaccaatccggccacggtgactgtcaacgcatcgtaa

SEQ ID NO: 375579 - DNA, 654 bp, Salmonella enterica
atgaaagcaattaccgatatcggccaggttgtcattcgcgccggcgacaaagagatatttctcaacccttcatttctggctatgtcccgaatcggaacgcctgaacaaatcgttgatgttttggtgaaagttcatgcgggccattacccaaagcacagaattgctgacccccagatactaaaagcggctaatgcccgctgctttgctgaaatggcggcagctgcagccaacgtagtcaagcgctgttctgaaggtgacgttgctgaagttatcggttcctactcggttactagtgcggggcgacttctgttcaagccgggagccatcccgatcgaggatgttatccagattgcccgccatctgattcttcatggtgtaatgggcgaccagccaccggaagaattcgaaggaaagaagggtgaatacagcgacaaattcgatgtacggtcattcgtctataccgctgttgctcacctcggcatgagcgagtcagacgcatgggatatgaccatgaccagcttccgggccgccatgaacgctaaatttccgcagaaagagaaagccagagtgccgactcaggagaagtacgacgaagtcatggactgggcagaacaaatgctggcgatggatgcgcagaggcatgggccgcactaa

SEQ ID NO: 375580 - DNA, 729 bp, Salmonella enterica
atgtctaacattatcccagttgatttcgaaggccactcgatgcgcttctatgaggatggctggattgatgcaacaacagcagcggaaaaattcgataaagtgccaaatgaattcctccgtctgccggaaactgaatcatatattcaaggacttgagcgtagatacgggaaaatcccgtatgtaaaaaccagtcgggcgcgtaaagatcgtggcggtggtacatggctgcacccaaaactggctgttcgctttgcgcgctggctttctgtcgattttgaaatctggtgtgacgaacaaatagacgccattattcgcggccatacagcacctgttaatgatgagcgcattaaggcaatctttctgcttagcgatccgtcttcgtgggaaaagcgttttaatgacccgctgtatgatgcgctattcagaatgaccgggcttccccgccatagaaatgatcgaaaaccaatgttattcagccttattagcgctaagtggatttacgggccggtcctgcctgctgaagtctacgcggatgtaaaagcacgactggcggtcggtgagaaaatccaccaacacctaaaaccagacgcacttaaactggttgagaatcagattattgctgtgaccagcattgctaacggttgttccgactatcgagacttcgaatcccgttgcatggcagcattccccgtcaaagggcagatgaagcttctttatgcggcagcgtga

SEQ ID NO: 375581 - DNA, 162 bp, Salmonella enterica
atggaaaagaatgaagtgaagacaactcttcggtatccgtaccgctttaaggaagaggtgaaacgcatcgccgaggaagaggggatgtcagaaaactcagtgttggttcagggactggcttggtggttgaagttccgggagaaaatgcagaatgctctctaa

SEQ ID NO: 375582 - DNA, 867 bp, Salmonella enterica
atgctctctaaaaataacgaaacccggctgtgcgcgaacactaaccgggcctctatcgaaaataaccacgtaggaaatatcgacatgaagagtgtatcaaaattatcgaagaacgaaaatgctgttattgcgccggtaacatttaatttccatgaaactcatgatgtacgcattcaggtaatcgacggtgaaccgtggttctgcctgaaagatgtttgcggtgtgctgtgcattgctaaccctcgcgatttgatggcgaagcagctcgataaagagggggtagataaaatctacacccttacagatggcggcaaacagcagttagtttacgtcaacgaaccaaatctctaccgcgtcattttccgcagtaacaaacaggaagccaaacaatttcaggattgggtattcaatgacgttcttcctacgatccgcaaatccgggcgttatgagcgtcagccagcggcagatccgttgacacctaatgatatgaacaatctcaaacgtcttatttggctgatgacagacagcatgagattaaagcagtcatggagcaatggtgtctggtatgcattacgcgcagctaccggcagaccatcgccgcagccatttactgtggacgatttacctgttttgggtgaggagtgccgccgcatcatgaaaatcacatcggcatttaatagcgctgtatatgcgttcgagaaagacgttattcgccgtgtcgtccgccgccgcggtgattttgagccgcttattgcagaaatggatcgcgcgttgcttgagttaaaggcacaagagcaggaaggcgtgttgatgctgagtcagtttgaggaatataaccttaacgagttaattgccaggaggcactga

SEQ ID NO: 375583 - DNA, 789 bp, Salmonella enterica
atgcaacaatcttcatcaactgctgtaaatgtagcaccgttaaatgcggttgtcgatcccctcgattgccctgtaatcgtgtgggaaggagtgagggtcgtcacgactgatactcttgccaaaggatacggaacggatgagtccaatatccgtaaaaatcactctcgtaacaattcccgatttattgaggggatccatattttcactgttaaaggaggagagctgaagagtttgcgagtgactaatagtcacgcacaaatttcaaacaaagcgcgctctgtgacgctctggacagaaaaaggcgcggctcgcatgtcaaaaattgtcgatactgacgaggcgtggtctttctttgagcgcctggaggattcgtacttccgtccagccacggctgtcggcatcccacttacctacgaagcggctttagaagacctgctggcaaaggtgaaggaaaaccgggttatcaccgaacagcgtgaccgggcagtgaaagagaagctttggatctctgagaagcgggaagctactgctatggcgaccgcctctgcggagaaacgtaaggcgaatgctttggctgagaaattgggtgaatgcaaaaaacacgcgactattaaagcagtgcagcgagtaactggtaagtcattcagccactggccgttgaagaaatggtgtgccgctaatggcatggagcctaaagacgtaccggatgcgacctacggtagtgtaaaatcatggcccgcagaggcatggaaggcagttaaccaaatcgacataaaggggatgttctga

SEQ ID NO: 375584 - DNA, 273 bp, Salmonella enterica
atgcaggctttacagcgagtaagcgccccggtgtacgtggtttctcatcatggcaagacgttccgctgttttagtcgaaacacagcaattaagcggcttgctcattttatgacccagcggatgttctgtcgcgcaggtattgagacacgaccggttacgaaggtggatcgtgatgacgtagctatccactacatcaacaagccaatccagcgttactgggatgcacaggcgagatgtgaaaggcggctgagaaagatcctttccagaaagtag

SEQ ID NO: 375585 - DNA, 303 bp, Salmonella enterica
atgaatagcaagatggatgacaatattcacgttgtagacttcccaaaacatggtggtggcggtagcggtggtgacggaggcgatatgtacacacgcgagagacttgcaagacttgaagccacagacgaactgcgagagcgaaacatccgaggtattgaatctgagctgaaaagcatcaaccaaaacctatcatcaatggaaaagcggttcattgataagattgatgacaaccaaaaatggctggttggccttttggtatcggcaatacttgttcccttgttcattgccatagtaaccaagtga

SEQ ID NO: 375586 - DNA, 336 bp, Salmonella enterica
atgaagcatatttttttattgttactagcgtttacctttaatgctggcgcagcgtctacatatacgaaagaacagttgaatgatatggctgctgcggggaaatatccagagcaggaatcgccagtaaccaaaagtattgaggctgtttctttctctgaatgtaagagtagcactctcaatgtattgaatcaggtttccggtaattatccggcgaaagaagttgtaaacaccggagtgttgtatgttgtgaagatttggacaaatgatggtgtaatcatggtttcatgttcagagcctgacaataagaaagtcgtaacgcaatcatcttataaataa

SEQ ID NO: 375587 - DNA, 201 bp, Salmonella enterica
atgggctatggaaacactgatatcatccctagaattcaggctgaattttctcgccgtggcgacctgagtataagcaaggatgactgtgatacttatattcagacagggaggcaaagtgcgcaagttgatatgcaaactacgcgagacatcatagatcgctctcagcgctcacaggctataaacgccatacaaggctactaa

SEQ ID NO: 375588 - DNA, 2184 bp, Salmonella enterica
atgacccagaatgtaggcgatattgaatatgtgatcaaggctgatactgctcaactgctgcgtgccgacaagcaggttacatctgtaaccaataacatggatacggggtttaagaaggctgataattctgcgtcaaagctgtctacgacaataagcaaactgtctgccgccatttctgttgcgctgattgttgagtgggggaagaaatttcttgaacttgcggacaacatgacacaactccaggcaaggatagccaggctttcaactgatgcctccacagcaaaagaaacgtttcaatcgttgacgcaaatatcgtcaaaaacaggcgccagtctgtcggatacaaccaagctgtgggaaacattgacatcgtctcttaaggaagccggcgcatcaaatgctcaggtcttaaatctgaccgatacgctgcaaaaaattgggcgcataggaggaaactcgacagaagaaatgtcgaatgctcttcgccagtttgggcagtcaattgcgtcaggcaccgtcagagcagaagaatttaactcaatcctcgaacagatgcctgagttagcaagacagattgctgctggtatgggtattagcatgggcgagttgcgtcagcgaatgcttgatggaaaactgacagcgcaagatgctctgaatgctatacaggacagaacggcagttgttaacgaggaatttaataagcttcctcgttcattatcacaagctactggctctcttgagacatcatttgcaaaacttgtctcctcaataaatgacgcaactggagcatcaagcgcagcggttactgttattgatgggttggcgaaatacatcgagttactcggagattcgtcaacatcaactgcggataaactatggtctctcgctggtgctatttcaaaacttaaccctggatatcttggaaaacttttagctgacggacttataggagatgaacctccaaaacaagtcgatgtattaagcgagaaaattgccaatcttaccggggatttaaaagaactttctgtgcaggctgaaaaaacagcgcatgtggagatacctcagaccgataacaataagggaggtaagggagggggcgggaagtccaccaagcaacaggccgacgaagcaacagagtctctcgccagacagcaagccgcactcgatcgcctgaacaccgggtatgcagaaggatcactagaactagctcaatatgacgctgttgtagcgctaggaaacaaagcgacaactgagcagatagctaaggcaaaacagcaggctaaagctatatggcaagttactactgccatcaagaatcgcgctcaggctgaacaggctaagcgtttcacggatcaggaaattgccactaacaaaacaacgcctgacgctgtaacaggcgcggtgcaagaccctgtagcacagataaatcttcaggagcagcagaaactggcggcgttagctcaatatcagcaaatgggcgtcttaagcgttcagcaatatgaagatgcaaaaacagctatccaggagcaggcctctaatgccaggaagaaaattgcacaggaagaagccgacagccagatagcatctaccatttctatactgaacgcagcatcatctggcttcgatagcctggccggaataatcagcaatactgctggaaaggctaatagcgcttatgtcgcgatgtttgctgctgctaaatcatttgcgattgctgctgcaacactggattttaatggtgctttgctcaaggcgttgaacgctcctgattcattaactaccgcacagcgctttgccaactatgctgctgttgcttctgctggggcgtctgttctttcaaacattgcaagcgtcagcatgagtggcggtcgtcgctacggtggcacggtatctgctggcaacgcttaccgcatcaacgaagatggtcgttctgaaatcttccagactgcaggcggtcagcaggcattcattccgaaccagtcagggaagattattcctgccgataaggccggaggtggcggtggggtggtgcagcacatcaccttcgaaattaacaccactggcggcatagacgatgcaacaaaggcgtggattgttaaatcgatgaagcaggttgctttgttccaaattagtgaccaggccaatcggccaaatggtatgatacagccgaggacaaaacggtag

SEQ ID NO: 375589 - DNA, 399 bp, Salmonella enterica
atgctcgacaaaatcagtcatctttcacctctttttggtttgttatctccattggtggggattgttacattctttattggcaggaagctcggaaagcgcgacgcctaccgaaacgagcgtaataaggctgctgagccagtgcatatcggtgttatgtcgcatattgaaaaaatttcacagcggatgaacgtcagaatacccatcactcaaaagcagattgataccctatgctggcactcatcctgtaatgacgcagacaaaattcgcgaggcatggatacaatataaggctgtagaatctcaggctggcgatgaatatcaatccaatcctgaatttaccgattacgaccatttcgttgatgtcgccagaaaggtagcagcacttgccaggaagcggtga

SEQ ID NO: 375590 - DNA, 348 bp, Salmonella enterica
atgccagaaatattcacatggacaccgcagaaagcctactcagttgagcgcacgccgaatgttgctgtcgttaaattgggcgacggttacgagcaacggcaggtgaagggtatcaacccgttaatggataaatactcactcacctttcgcggcgtcagcggagcgtgccgtagcaaccccgcgaaggatgctgaggcgttcctgaaagcgcgaatggcagtagaggcgttctactggacgccatccgatacgggagtacagatgctttttgtctgccgctcctggaatatgacaaagaccgggccgctgtttgaactgacggccacgtttgaacaagtaccacgataa

SEQ ID NO: 375591 - DNA, 258 bp, Salmonella enterica
atgaatttagacctgagaagcgaggagcacaaaatgaacaaatacatcctaaaagttaagtcactttatttggttaacgaaactgtatcggtgggattaggtgtatattcttcacaaatgccatcgctactgttattcagtatggagattgacatggagcgaaaaggagatgcgagcctttctgcttatgagatggaggcgattgaaaaagccgcctcactaatctgtgatattgctgacaaattggaggcggcttaa

SEQ ID NO: 375592 - DNA, 288 bp, Salmonella enterica
atggaaagaacaattaacgatctgctccgtcaggttaatgacctaaagatagaaaatcagaaaatcaaggtggcctcaaatttcttactttacagcattgtttcagcactagacgagcgaggcggtgatgagaaatttagcgattcactaaaagcaaagcttaatgacgaactgagtaaaattactatgggaggcacagcagtgccaaagcatgcaatcaatgaacttatgcaaccgccggtgagagctatgtttggtaataatcagccagaaccgttcttgaaataa

SEQ ID NO: 375593 - DNA, 705 bp, Salmonella enterica
gtgcgcgacataccagccagtatgattattgatagcgtcgatgccggagtcggcgctttcattgaccttttcgaagcagacctgcaaccatatggcggggaccttatccgcttccattccggtacaaatggctattacggtaacgttatctggaaaggtaaccagtaccaggcgtacccgatagcagtggaaggattcgagtcaaagaacgaaggcacttatgcccggccaacaatggttgtggcgaacgtgaccggcctgattaccgggattaaccacgattttgatgacatgcttggcgtggtaatcaccaggcgtcaggtgccggtaaaatatcttgatgcggttaactttccgaacggtaatcctgatgcagacccgacacaggaggccgtttcccgctacgttgtcgaggagatgacggaagagacgttcgaacaggtgacctacacgctggcgacaccgattgactgcgataacgccattatcccggctcgcactattctggccgacgtgtgccagtggcagtatcgcggtgtcgggtgtggatatgacggacctcccgttgctgatgagcgcgacaatccaaccacggacccggagaaagataagtgttctcaccgccgtagcggctgccgtttccgttatccgcgaccggaaccaatgccaatcagcagtttccccggctctcagaaggtttcctga

SEQ ID NO: 375594 - DNA, 720 bp, Salmonella enterica
atgcaagagttactcgaatatgcggcgtcatcgcaggatgaagtgtgcggcttaatcattgatgacgaacggctgttccgctgtcggaacatacatcccgatccgggtatgcatttccgtatcagtgatgatgactggctggtggccgaggaagcaggagaggtgacggcagtctttcactcacacccacaaaacgtaccgttcctgtctggcgctgatcgccagatgcaggttaccagtggccttccgtggtggctggcgtgtgatggccggatactgaaattcaggccagtgccattcctgctggggcgtaagttcgagcatggtgtcatggactgctacaccctgttcagagatgcatatcatctttgtggaatcgaccttcctgacttcgaacgcactaatgggtggtggttacgtggtgaaaatctttatctgaacaacatgcctctcaacggcttccgccaggtatcgacgggcgaagcgcaaccaggtgacgtcatcatcaggcagccattccccggcgctgacccttgccacgcaatgattctcctcgaaggaaacatggtgcttcaccacgaccacgccggccatctgagccggagagagccaatgcgcccggcatacgttaagcagatgcattccatatggagacatgaacagtgctcatctttaaatttgctggcagtttacgccgattttaccgccaaatccctctga

SEQ ID NO: 375595 - DNA, 528 bp, Salmonella enterica
gtgctcatctttaaatttgctggcagtttacgccgattttaccgccaaatccctctgaacgtagatacgccggctcaggggctgcgcctgcttcttgcccagaatcacgaattcaaaaaagcattcctcaatacaaaacttcggatccgaatagcgggcgaggatgttgaggcatcggctatgcaatggcatctggatcgccacctgaaagatggttctgtagtcctgtttgtgccggtagtcgaaggcgctatcactgccgctgctgcggcatggattgcggttgctgtcagcgtggcttcaattgcgtactcggtatacatgtcccgcaacatgaaaactaaaacgtcagcggaagcggctgagacaaacacgctaacgaacaactcatttaccagtgcggaaaaccgtgtcgggcaagggcgtccggtgccgatactcctcggcgagatggaagttggctcaaatgttatttctctaggtatcgacacaagcaacatccaggactggacggaatctattagctaa

SEQ ID NO: 375596 - DNA, 2352 bp, Salmonella enterica
gtggcgcaggcaggtttcattttaacccggcactggcgggatacgccgcaaggaacggaggtctctttctggctggcgacagacaacggccctgtgcaggcgacgctggcaccgcaggaatccgtggcgtttattccgaccagccagacctcccgcgccgcctcgctgctacaggcggaaaaagactatcgcctgacgccgctccagctgcgagactttcatcgtcagccggtatccggtctgtattgccgcactcaccgccagcttatgcggatggagaaactgctgcgcgaaagcggcgtcaccgtttatgaagcggatgtacgcccgccggaacgttacctgatggaacgttttattacgtcgcccgtttgggtagacggcgagatgcgcaacggcgttatcctcaatgcgcgtcttaaaccccaccccgactatcgaccgccgctaaaatgggtctcgctggatatcgaaaccacgcgacacggcgagctgtattgcattggtctggaaggctgcggccagcgtaccgtttatatgctgggcccggcgaacggcgatgaccgccaactggacttcgagtttgtgtatgtcgccagccgcccgcagctgctggaaaaactcaacgcctggtttgccgaacatgatcctgacgtcatcatcggctggaacgtggtgcagttcgacctgcgtatgctgcaaaaacatgccgaacgctaccgtatccctttacggctggggcgagacaatagcgaactggagtggcgcgaacatggcttcaaaaacggcgtttttttcgcccaggccagagggcgagtcattatcgatggtatcgacgcgcttaaatccgcgttctggaatttttcgtctttttcgctggaagccgtctcgcaggaactgctcggcgaaggaaaatccattgataacccctgggatcgtatggatgagatcgatcgccgctttgcccaggataaacccgccctcgccacctacaacctgaaagactgcgagctggtcacgcgcattttccataaaaccgagatcatgccgtttttgctggaacgcgcgacgatcaacggcctgccggtcgatcgccacggcggttcggtcgccgcattcgggcatctttactttccgcgaatgcaccgcgccggctatgtcgcgcccaatctcggcgaagtgccgccgctggcaagtcccggcggctacgtaatggattcacaacccggattatacgattcagtactggtgctggattataaaagcctgtacccgtcgattatccgcacgtttttgattgatcccgtcgggctggtcgaaggcatggcgcagccggatccggaacacagtaccgaaggtttccttgacgcctggttttcacgagaaaagcactgcctgccggaaattgttagccaaatctggcacgggcgcgatgaagccaaacgtcagggtaataaaccgctctcgcaggcgcttaaaatcattatgaacgccttttatggcgtactcggcaccacggcctgtcgctttttcgatccccgtctggcgtcgtcaatcaccatgcgcggtcatgcgattatgcgccagaccaaagcgctgattgaggcgcagggttatgacgtgatttatggcgataccgattccactttcgtctggctccggcgtgcgcattcagaagccgacgcggcggaaatcgggcacaggctggtgcgtcacgtgaacgaatggtgggcgcagacgttacaacagcaaaatttgaccagcgcgctggagctggagtttgaaacccacttttgccgttttctgatgccgaccatccgcggcgcggatactggcagtaaaaaacgctacgcgggcctgattcaggaaggcgacagccagcgcatggtatttaaaggtctggaaacggtgcggaccgactggacgccgctggcgcagcgctttcaacaggagctgtatctgcgtgtttttcgcaatgaaccttatcaagactatgtgcgcgagactatcgataaactgatggcgggcgaactggacgcacagctggtttatcgtaagcgtctgcgtcgccctttacatgagtaccaacgtaacgttccgccgcacgttcgcgccgcccggctggcggatgaacaaaacctgaagcagggtcgtccggcgcagtatcagaatcgcggcgccataaaatatgtctggactgttaacggccccgagcccgtggattaccagcagtcgccgctggattacgaacactatcttacccgccagctacaacccgtggcggaaggaattcttcccttcgttgaagataattttgctacactactgaccgggcaactggggttattttga

SEQ ID NO: 375597 - DNA, 621 bp, Salmonella enterica
atgaaatatcgctacatcatcagaatcgcggcaggcataattctcattatggctacggtgtttatccataatgccatcgctatttatcagttcagtcagcaaaaccagacgcgcgtagctgactgcgtgattgtcgcaggagcaggcgttagcggaaaaacgccttctcccgtttttcaggccagactggatcatgccatctggctttaccaacaacacattgtccgcgcgttggtattaaccggcggctacggcgctggcgcaacggtttccgacgcggcgatagcccgtcaatacgttctggaaaaaggcattccggctaaggcgatttttattgaagagcgctctaccgtgacgcgcgaaaatattcgttacgcaaaacagatactgcgacaacaacaatggcgcacagcgttactggtcagcgatccgctgcatatgctgcgtctgaaaactatcgctcaggataatggtatcgatagccgctcatcacccacgcgatccacccgctataaatcctggtgggcgcaaacccgcttcttactgcgagaaactttttattacagcggatatcggcttttacgttatatgcctgtacaaaataacagtattaccccctaa

SEQ ID NO: 375598 - DNA, 432 bp, Salmonella enterica
atgttactgtttttacggtcaacttcaatgcaaaaacataatattaatcgttcaagacatgccgccttccttttgcatgttcatcttgtctttgtaacaaaataccgtcgaaagatactgggtgagtcacactatgctgcattccatcagtatgcagcagaagtctgccgtgattttggtgcagaacttaaagaaagtaacggagacgtctatcatgtccacatgctgatcgaatacccaccaacagtgcagctttcggtactggttaactcactgaaagctgtgacatcccgccgtctgcgaaacgaatttattgatttgcggggagcatacggaaaagccgtgctctggtcgaggtcatactttgctggctcgtgcggaggtgcgccgctggaagttgtgaagcaatacattcaacatcagcgtggctga

SEQ ID NO: 375599 - DNA, 1206 bp, Salmonella enterica
atgctaatcctgaaagcctacaaattcagactggaaccaacgcctgaacagtcgcagcgtttgcggcagttatgtggttgcgcccgttttgtctggaatttaggtcttgcggagacaaagcgcatccttggctcaggcgaaaagttaccttcggctttcgagttgaacaggatgcttacagtgtggaaaaaaatgccggaacacatctttttacaggatgcttataccgacaatctgcagcaaaagttgaaagacctgcatgctgcatggaaacgttgctttgataaaaagctcgcagctaaggccccggtatggaaacgaaaaaatgagggcagagactcaatccgttttgtgaactttgagaaatattgccgccttgaaaatcgcagagtgaagctaccgtcaggtcttgggtgggtaaaattccggcaatctcaacgtgtgaacggtaaaatcaaaaatgcgacaatcagtcagttagcgggacagtggtatatctcgttccaggttgaagttaaaacggcagaacccaatcacacaagcacaacgatagtcggtctggacgcaggagtaacaaaactcgccacgctttcagacggtacggtataccaaccagtcaacagttttaaagcaagtcagcgcaagctggcaacactccagcggcagttaagccgtaaagtcaaattcagcagtaactggcagaaacaaaagcgaaaagtccagcgtctgcactcgcacatagccaatatccggcgcgactaccttcataaagttaccagtgaaatcagcaaaaaccacgcgatgatagtcattgagcatttgaaggttagtaacatgtcgaaatcggcaaaaggtacagcagaacagcacggacgaaacgtcaaggccaaatcaggtctgaaccgttcgatactggatcagggctggtatgaaatgtgccgccagcttgagtacaaacagctctggcgtggcggtcaggtgcttgcggttccgccagcatacacaagccagcgttgcgcgtgctgtggtcataccgcgaaagaaaatcgcctgtcacaaagtaaatttgtgtgtcaggcatgcggatatacagcgaacgctgatgtaaacggcgctcgtaacattttagcggcggggcacgccgttcttgcctgtggagggatggtgcagtcaggccgcccgtctgaaacaggaaccagacgctga

SEQ ID NO: 375600 - DNA, 225 bp, Salmonella enterica
gtgggggaggatgtcaatattaattatctgttaaatgggcaacgctggcagtcaacaatcgaagattatattttcttccatgcgctggaaggaaaagtgttgcagggatattatgataatattattgaatatgtgagttctgatcattacgtctatcaaagcgcatttgctgaatatatcaccgaccagattcatcaacgcgcccccaatgggacgcgtttttag

SEQ ID NO: 375601 - DNA, 744 bp, Salmonella enterica
ttgaaagatttttcaaaatactcaaaagcgttagggatggctaagttctatgtttatgcattttatgacactgaagatgcagctaaaaagccgttttatataggcaaaggcaagtcagaacgctgccttgatcatataaagtataatgatgactctccgaaatcagaacgaattaatcatctgttaaaaacaggaaatctgggtatcgacatactacgccatggcatggatgaggcaaccgcgaagcttgttgaagcaacatgtattgatctcttgggtgttggagaactgaccaacaaagtacgaggaagcagctcccttatggggcgaatcacgctggatgagctcaatcatcttcttcttaagcaagagacggaaatcgcacctgaacatgccgggctcgcttttttgctaaacagcacctacaagtctggcatgagtgcacttgcattatatgaagctacgcgtggcgtctgggcaaaagtaccaaaagatgaaaacctacaatttgcatacgccacctacggcggtttggtgatggaagtttacgagatacagtgttggttgaaggcaggctctcagcaatactttacccgggaattggtcatcccccccgaaaccaaccgttcagaatttgttggacgaatcgcatcaccagaaatcagagaattatacgtaggcaagctaatcaaaaaatcgcgtagtcatggtagccctttcgtaaaagtcgggctggcggaataa

SEQ ID NO: 375602 - DNA, 5976 bp, Salmonella enterica
ttgaacaggacttacagtattgtctggagcgccgtgcgaaatatgtatgtcgtggcttcagaattggcgcgaggccacagcaaagttaaagcgcaagtatgcgcgagtgaaatccattctccaaaccaaaagtccgaatatggacaaataataaaagcaacgcgcgcggcgctggcttgcgccgtggctgcagcgctcggatttttcagcccgctggccatggccgacaatcaggtatcatatgctgatgcgcagacccacgttctggatgcgtcaacgccgccgatgagctattcgggcaccgatgaaggcgcggcgctatatgtctcgggtgtcgccaccgtcggctggcagcccaccacggtcacagggacggggctcgtcattgaaacaagcggaggcggagctgatgatccggatggcggtaagtatgtttccaacgccatttcgctggatcattacgctatccttgagcttaccgacgcgaagataaccactacgggcatttatacccagggtatttccgcagcggatggcagcacactgacgttaacagacagtacgctaacgattgacggcaatttcggcgtaatgacgttgtatacgggttcagaagcaacgctggacggtaccatcgttgaggcagctaacagcagcagcgcgcaggtgcaacaaggcagtacgctgaacgtgctggacggtagcacaatcaccctggcgcaaggccagataaacgttgttgccggaaacaccgcgacagacgagggttccaccctgaacctgtctgatagctcggtcagctctgcaggtacgatgagcaccatccagggtaccaataaggccgctcttaatctcaccaacgcgaccataacacataccaatgccagcggcgcggcggtacaggccaataacgccactaccctggatattacaggcggcaacattacctctgccggtacgggcgtgtatattctggcgtcggacgccaggatcgacggcgccaccatcaacgccgacggcgacggtatctttataaccagcaaaagaaaactcgacgggtatgaggatctcaacgcgctgacggtcaacaaagcacaggttaattcagacacgattgcgctgcatgtggacactggcacgacgattaacgctcctatcgtgctgaccgacagcacatttgaagcgccggaagtgatcaagcttggcagcaaggcggtaattcaggccaacaatacgacattgatcggtgacgttgctcagagtgacatgtcatcgtcatcgctctctttaagccaggggtccacgttaaccggtagtgtagatgcgatgtttactacgctgtcgctcgacgacaccagccagtggaacatgaccgacccgtcaaccgtcggcaatctgaccaacgacggcgatattacgctgggcaacgcgagcggttcgacaggtacgctgctgacggtggacaataccctgaccttacaggataacagccagataaacgcgacgctggataccgccaacagcgcgccaattatcaaagccgccaacgtcacgctggacgggacgctgaaccttagctcaacggccacctttgtcgcgcccgaaaccgacgaacactttggatcgatcacgctgattgattcacaaagcgcaatcactaccgattttgacagcgtaacactggatgctgacacctccgctatgccggattaccttacgatcaacgcgggcgttgatgcggatgataataccaactacgagttgtctacgggcttgagttggtacgcgggcgcaaattctgcgcgcgctgcgcatggcacttttaccgttgatgcaggcagtacctttaccgtcaccagcgaactggacgaaaccacggcgacctccaactggaacggcagcaagctaaccaaacaaggcgacggcacgctgatcctcagcaacaccggcaacgactacggcgatactgaaattgacggcggcattctggccgccaaagacgccgccgcgctcggcactggcgatgtgacgattgcagaaagcgcaacgcttgcgctgagccagggcacgctggataacaacgtgaccggcgagggccaaattgtcaaaagcggtagcgatgagctgatcgtgaccggcgataacaactacagcggcggtaccactatttccgacggcacgctgattgctgaccatgcggattcgctgggtaccggggctgttgccaacagtggcgtgcttcaggtcggcgaaggcgagctggaaaacaccctttccggcagtggttcgctggtgaaaaccggtacgggcgagctgacgttaagcggcgacaacgattactccggcggcaccactatttccggcggtacgctgacggctgaccatgcagattcgctgggcactggcgctgttgctaacagcggcgtgcttcaggtcggcgagggcgagctggaaaacaccctttccggtagcggttcgctggtgaaaaccggtaccggcgagctgacgttaagcggcaataacacttactccggcggcaccaccattaccggcggcacgctgacggctgaccatgcggattcgctggggaccgggactattgccaacaacggcgtgcttcaggtcggcgagggtgagctggaaaatacgcttttcggcagcggctcgctggtgaaaaccggtacgggcgtgctgacgttaagcggcgacaacacttactccggcggcaccactatttccgacggcacgctgattgctgaccatgcggattcgctgggtactggcgctatcgccaacagcggcgtgcttcaggtcggcgagggcgagctgaaaaatacgctttccggcagcggttcgctggtcaaaaccggtaccggcgagctgacgttaagcggggacaacaacacttactccggcgataccaccatcgccgacggcacgctgattgccgccaacgtcaacgcgctgggcagcggcgatatcgacaacagcggtacgctgatgctggatgccaacggcgcatttgagcttgtgaacatcaccaccaatagcggcgccactaccgcgctggcggcgggcagcacccttgacgcgggccagctcacccaggaagacggcagtacgctaagtattgacctcggcgcggccaccgacgacgccgtgattaccgccgacagcgtcacgctgggcggcactctgaatgttaccggcatcggcagcgttacagacagctggacgcctgaggcatacacctatacgctgattgacagcgacagcgccattacgagcgatttcgacgatctgaccattgcagggatgaaccgcgaagatgttgacttcctgactatcgacggaaaagtcgatgaagcagacaacacccactatgatctgacggcctccctctcctggtatgcggacagagacaacgccactaccgacgcccacggcacctttaccctgagcgaccctgacggcagctttaacgttgcggctacactgacagacgttgacgatacgctggatccgggtagcagatgggacggtaaatcgctgaccaaagaaggcgcaggcacgctgatcctctctggcgacaacgactacagcggcggcaccaccatcaatgaaggtacgctggtcgccgccagtacgacggcgctgggcaccggtctggtagacaataatgccacgctggtgctggacgcagacggtgaagtcagcgcggtgggcggcatcaccactcatagcggcgcgacgacccaactggcgctcggcacctcgttggatctcggcgacagcgcgttaattcagcaagatggcagtacgctgaacgttgagctgaatagtgactcagtgcaaccgctgattaccggcagcagcgccacgcttggcggcgatttggtcgtcagcgacgccagcctgcaagcgcgcgcctccgacgcggagttccagtcctttaaactgatggatatgaccagcgatatcagcggcggctttaccagcctgacgatgaacctcactgacaagccggactatctgaccgtaaccgggacaatcaatcctgaagatgcgtcagaatatctgcttaccgaagggctgagctggaatgcgaccgccacgtcagcgacgccagcacacggcacgtttactctgggcgcaggcgatagctttgaagtcaccagcgtactgggcgataaaaccggcaacggcgactgggatggtaaaacgttgaccaaactgggcgcgggtaaactgacgctgagcggcgtgaacacctacaccggcgatactaacgtacaggaaggcacgctgtggctggccggagacggtacgattggcgaagtgggcagccagcaggcggtgaacgtcgcttctggggcgaccttcggcggcagcaatggtacgaccgttaacggtaaggtgaccaatgaagggacgctggtcttcggcgacagcgaggagacaggcgctatcttcaccctcaatggcgatctggtcaacatggggacgatcgccagcggcagcacctccagcacgccgggcaatacgctttatgttgatggcaattacaccggcaacggcggctcgctttatctgaataccgtcctgggcgacgatgattcggcgaccgataagctggtgattaccggcgatgcctccggcaccaccgatctgtacatcaacggcatcggcgatggagcacagaccactaacggtattgaagtggtggatgttggcggcgtatcgaccagcgatgcgtttgtgttaaaaaatgaagttaacgccagtctgtatacctaccgtctgtactggaatgaaagtgacaacgactggtatctggcgtcaaaagcacagtctgatgatgacgacagcggtggtgatgacagtgatgtcacgccttcggatggcggtgacgatggcggtaatgtcacgcctccggacgatggcggcgatggcggtaatgtcacgcctccggacgacggcggcgacggcggcgatgtcacgcctccggacgatggcggcgatgtcgcaccacagtaccgtgcggatatcggcgcgtacatgggcaaccagtggatggcgcgcaacctgcaaatgcagaccctctatgaccgcgagggcagccagtatcgtaacgcagatggcagcgtatgggcgcgcttcaaagcgggtaaagcagaatcagaggctgtcagcggcaatatcgatatggacagcaactactcccagttccagttaggcggcgacattctggcctggggcaacggccagcagagcgttaccgttggcgtcatggcgagctacatcaacgccgataccgacagcaccggtaaccgtggcgcggacggtagccagttcaccagtagcggcaacgtagacggctacaacctcggcgtctatgccacctggtttgccgatgcccaaacgcatagcggcgcgtatgtcgatagctggtatcaatacggtttctacaacaacagcgtagagagcggtgatgcgggatctgaatcttacgattcaaccgctaacgccgtctcgctggaaaccggttatcgctacgatattgcgcttagcaacggtaatactgtcagtctgacgccgcaggcgcaggttgtctggcagaattactcagcggatagcgtgaaggataactacggcacccggatcgatggtcaggatggcgacagttggacaacgcgtctgggtctgcgtgttgacggcaagctgtacaaaggcagccgtacggttatccagccgtttgctgaagctaactggctgcacaccagcgatgatgtgtcggtatcgtttgatgatgccacggtgaaacaggatcttccggctaaccgtgcggagctgaaagtaggtctgcaggcagatatcgataagcagtggagcgttcgcgctcaggttgccgggcagactggcagcaacgattttggcgatctgaacggtagcctcaatctgcgctataactggtaa

SEQ ID NO: 375603 - DNA, 7308 bp, Salmonella enterica
gtgaaatcgaaaaagtgtgtcggttttttaccctggctgctgctatgcgccctcagtttaacgcctttcttcgcgcaggccgtgcgaagcagcggcgcatggcaggaactcactgagcaaactgcggctattaatggcactccgcctcaggccgacagtgtaacgatcccggtatatcagggcagcgtgcagttgcgctctgatgcggcgaatcctgttgactactccgcgaagcccagccagttcagcaccagtgatgctggcagcgcgctgaccttaaccaatccgcacgacaccgaaggcgatatcttcgccgtgccgccgctggtctggcaggctgaacgcgcgcccaccgtcacgctggtgtgggccgacgccgccacgccggacacgccgcttgatccacaacccgtcagcaatataagtttctgcgcgcagaatctggcgggccgccatctggtggtctggtcgcaactggatacctcaaccgccataccgccgctgtggttgcttacccgcaccggcgtgccttataacacggcggtcgaagtgcttgatcaaaagtttgccgtggatatcgcgcccgccgtgggcgacccggtaacgctcgccgccgatcatctggatgagtcgctcaacgccgcgaaggtcaaagcgggcgaaagcatcatgctgacggtaacgaccaaagactgcggcggcgaaccggagggcaacgttgatttcgtgattacccgcggcgacgcgcaaaaccgccagggcgtggtaaacaatgccgcgccggtgcgcgtcggcaacaccgaactgaccaccaccgccacggaatatcacggtacgaccaacgccgagggcgtggcgaccgtggtcgtcacccaggcgaacggcccgggcgttaaaacgccgctgatagcgcacccgtcgagcgcgccagcgctgaaagccagcgtggacgtgatttttaccaccctcaccagcccggacagcagcagcgccaacatgtacggtcatatggcagagacgtccaccgccacggtggacggcgcaagctacaccttttaccgccccaaactggcggcggaaaccgacggtgaagaccgcaccgccagcatcaacaatgaaacctgggcgcagttcaactggggccacgccgacgcgcactgcgatattctgccggatgcacgccaactggaagggttaaaaattgcgcgcggcgatctggccaccaccctcggctggccggtagggctgacatccggtgacgaagagtactggtcctcctcccagggatcgactgccactgaccatatcagcattgatatgcgcagccgcgcccttacgcagatgccggacgccacgcaatcgctggttagctgcgtggataaagccccgcctgcggtcacgccgaaattagtgattagcgccgataattttgattcaacggtcaacgcggcgaaagtgaaggtgggcgaagagatcaacatgaagatcaccgtcaccgacagcgccaccaataaaccgctgccttatcgctactttaacgtctacctgggcgacgagcaaaatcgccagaatcaaaagaacgccgatattgatagcgggcatcagtggacggatgatccggtaattatcaccaatctggcaggcagcgacggccactatcatggcgtcaccgacgccaacggtcagttctcgctggtgttgactcaggataagggtgcgggcgtattaaccccggtgcgcgtggtgctgttcgacggcacggaagcgacgcagaacgtgatttttaccgtcgtcaccagcccggacgtggcgcaggcgcgcatgtggggccatatgcagggcgtggtggaagcgggcaatatctacaaacgcccgctgctggcagaagaggccgcgcaggataccggttccgaatttgagaataacgaatactgggcgacgtttaactcggtaacggcggcgacgaaccagtgcggtaccggccaggtgccggggcaactgctattggatacgctgtatcaggcccattccggtaacgcgatggaaacgacctacggctggccgacgcagaaacacagctatatcgcggcggatactgatggttccaccaccgcgcacgtcaacctggcgaccggcgcggacagcatgttcagcggcgccgaaccgaactatctttcctgctccggcaatgagttggtgaccagtctggacgtttactttaatggcgatgagtcgttacgtaatgcggtagccaaagtcggcgaacaaatcacgatgaacgtccattccgttaatgcgctgaacgggttaagcgtgcccaacgccagctttaccgtcaccatgtcgcacggcaaaaatcgcgacaacgccaccacgggctttaccgatcccagcgacggaacgctggtgatgggcggaacgcctttcggctcttcccgggcgtcgatgacgtaccagggcatgaccgatgccgagggcaacgccacgctggtgattgaacagccgcagggcgtgggcttgctgacgccgttgagcgtactgccggtcaactcactgattaccacgcccgtcaaccgcagcgtgaaatttaccgttcccaccagccccgatacgccggaggcgcagatgtggggccatatggcggacacgctcaccgtaagtgatatggaattccagcggccaaagctggcggcggaagcgactgccgccacccgtacccaggagcaggataacgaaacctgggcgcgcgtcagccacgccgacgcgctgaataaccccaacgccgggggctgcgaggccggccatctgccgcgcgccgatcagcttgccgcactgtatgcctccagcgacggcaataaaatccacaccgtatccggctggccgacgacgtatgactactggtcttccaccttcgccagcgccgctacatggcaggcggtatcactggctgcgggcggctataccgcttccggcgatgcgtcggactacgtgagctgtctggtcagcaaaaatccgacggcggcgtctatcaccattgagccggtggatgcggcattgtggtataacgcaaacagcgaacacgcggtgaaggtgaaaaagggcgatacgctccagcttaaagtgacggtaaaagacgccagcggcaatccgctgccgcaagcgccgttcgtgttaagccgcggcgacggctatacccgccagggggagaaacatatcgccggtagcggcgacggcatcgtctcggcggtagtgattgacggcgattcgctcaacgacaccgccaccaaaatcggcggcatgaccggtgaaaacggcagcaaaatcatcaacgtcacccgcccggatgcccacgggacgaaagtcgcgattacggcggcgctgtacgataacgccagcgcgacggccagcatcgacactatttttaccgtggtcaccagcccggacagcgacaaagccaaaatgtggggccatatgtcggaaacgacgacggcggccaacggcgaggtgtttaagcgcccgctgttatcggctgaaatcgccagcggcgttacccacggcgacaatacggaaaacaacgaagcgtggggaatcgtcgattttgaaatggcgaacgacgcctgcggcgcgggatacgtgccgacccttgccgatatgcaatcgctgtacgacgccaggcccggcggcgccatgaatacccagcagggctggccgctggatggtaaaaactaccaggacagcaccgccgatttgagccggagtacgcaaaaccgctacgttaagtcgattaatctgcgcgacggcggcgtcggttcgctattgtggaatgaacaactctattttgtctgcctgcaaaacgcccatccggcggcgacgcagataacgctcacttcgcctgtgtataacgacagcgacggattcgccaaagcgaaagtcggcgagaccatcccggtcatcatcaccacgcgggatgcccagggcaacccggccgccgacacgccggttatctttacgcgcggcgacagcgtcgggcgcgcaaatcaggaggtgaatagctcggcggcggcggatatacagataaaccacagcgacgggcgtagcagcggcgctaactattacaccgccacgggcgccgacggcacgctgacgctgaatatcagccaggacagcggcgcgggctttaaaacgccgctgacggcggcgatagagcacaacggcgtaacgagcgcgccgctgccggtcatctttaccgtggtcaccagtccggacacgccgaaggccaactactggggccatatggcggaaacgctgaccgacagcagcggcgtggcgtacaggcgtccgctgctggccagcgagtttagcgctacgcccggcaaaacgctgaccatcgccaacggctactacgacaaaggcgaaacctggggcatgataaccgtcgataaagcctggaacggcaccggtggcggctgtgggcgcgacacgctaccgaccgtagccaacctccagacgctgtacgggacatacccggataacgccatgcgcagccgtaacggctggccgatgaccagttcaggcaacaacaacgtcagccgctactggtgggcgggggattacgtgatatcgtcagacggcacgaagtcgctctacgcggcggtcaacctgtttaacgacggcaatgatgtcaaaacgacgaccagcacctcgatgtactacatgcagacctgtcttgcctcgccgcgcagcgccgccgccagcctgacgctgacgctggcaggccaggatgaaaccaccggaagcgcaaaggcgaagaagggcgagcagatggccgccaccatcgacgtgaaagacgccgcaggtcagccgatgaaaaacgtgatggtgaaaatcagccgcggatcttcgtacaatcgcgccaacagtgccacatcgtcctcaagcatcacagacgatattacgctgcgtaatgtgatgccgtccggcctggcgacatacctgctggatacctcggcgaaatatctgtatgcgcaaactgatgcccagggccaggtgacatttacccttgcgcaggacagtaccgccggtttaaaaaccactatcagcgccgccacgatggacggcagcaacctgacagacagcaaagacgcaatctttaccgtagtgaccagcccggacagcgataaggccaaatactggggccatatgccggaaacctttaccaacagtaagggggttgaatttaagcgaccgctgctgcgcgctgaactttcttcaacggcggacacgtcgggttatacggaaaataacgagacctggtatacctggagccgttatccgaatatgtatcaggacaccgccagcccgtgcgatcggctggggttgccgacggtaaatgatttacagacgctatataccgattatcccaatggcgcactcacgacaacgcttggcctaccggtggcatcaggaaaatattggggggcgggtaactcagtaccggatgccacgcactcagacagtcagtttcagtatgtcagactcagcgataataatacgctgacaaccaaagccaataccgccacggcgcagctttgtctggcaaagcgccgggacttgtcgatagaactcacctccagcgacatggatgcggataaaggcgctccagtggcgaagaagggcgagagcctgccgttgaccgtcactgtgagggatggttccggcacgccgcagcccaataccgctatccgtttgggacgaacgctgtcgatagaccgggcgggtgtcgttgatggcagttccggcggaggcatggtactcacatcggttgcgccgtctacgggctcaatgacgtttaactgcacggtatcttcgtgcacaagttattggtatggcattacggatgaggatggtaaagcgcaactcgaagtgacgcaggatgattcccgtggcctgagaacaccgctacaggcgatgcttgtcgacgatccgctgacagttagcgatatggacgtcattttcaccgtcattaccagcccggacagcgataaagccaaatactggggacacatgccggaaaccgtgaccaacagcgcgggcgtgaagttccggcgtccgctgctggcggcggagatgacgtcgaatagcggtacttacctggttaacaatgaaacatggcccttagtcaccgcagcgaacactgaaaaagcgggcgcaaccggctgtgatgcggaataccagccgttgtcgggcgatctgcaaacgttgtatagcgacaatcctaacggcgcaatcggtacaaattacggctggccggtggcggggaacaaatcctggtgggcggcggatcgtgcgccgaataccggatattaccaatttataaacctgaatagcggcggtaagggcaccgccagttcatcgactgccaccggcgctcaggtgtgtctggtcgagccgcgtacttctactcctgccagtattacgctgacctcgacggcgatggacagcgcgaaaaatgcggcggtagtggcgaagggaagtgcgatgccgttaacggtgacggtaaaagatagcagcggtaacccggtcgccaacgtcggttttacgttgtcacgtggcgattcgaaaaatcgggcaggtatggtgataacggatggcgacgtggcagcggatgccggagcagacgatctcatgcttaaagagctgactcccgcaagcgccagccaaagtatgaccaccaccgggattgtctttaccggcactaccggcagcgacggtacggcaacgtttacgcttaatcaggataaaagcctgggggtgaaaacgccactcacggtgaaagtgacggacaatacgactcttcacgcatcgctggatgtgatttttatggtacttaccagcccggatacggataaagcgttgttctggggaaatatgtcggatacgacatccgtcaacggaaaaacgctgcatcgtccgtggcttcaggctgagatgctgtcaggcgtaacgccagtatttaccaacggagtgcatgcaaataacgagtactgggcgatggcgcatacggtggacaacacgaaatgggatattgccaaacagtgtggtagccttagcaaagcaccggataataacgacctgttgacgctgtatcattcaattagctcgttaggctggccgacgcagggctatccctatttatctaaatcaacctcaagcggcggcatgtattgcggcgtagatgagaataccaagagtcaaaactgcgccattaagccggcaggctcagcgggttatgcgacgtgcgtggagtaa

SEQ ID NO: 375604 - DNA, 255 bp, Salmonella enterica
atgaaaaatataaaaagccagggaaatggcgaacagcccgctatttctcgccgccactttatccaggccagctccgcgcttattgcgttaccgtttgtctcctcgccagctaccgctcaggcgcgcgctgtgacggcaactgaaaacaggcctgcggaaaaagtcgttcagacatgcagcacttttgactgcgggggcaaatgcgatattcgggcgcatgttagtgacggtatcgtgacgcgaatttcaacgtga

SEQ ID NO: 375605 - DNA, 4935 bp, Salmonella enterica
atgaaacatttacgcgtggtggcctgcatgatcatgctggcgctggcgggatgcgataacaacgataaaaccgccccgacgactaaaagcgaagcgccagccgtagcgcagccctcgcccgcgcaagacccggcacagctacaaaagctggcgcagcaaagccagggcaaagcgctcacgctattagacgcctccgaagcgcagcttgacggcgcggcgacgctggtgctgacgttttcaattcctttagatcctgaacaggatttctcccgtgtggttcacgtggttgataagaaaagcggcagcgttgacggcgcatgggagctggcgccaaatttaaaagagctaaggttacgtcatctggaacctgagcgcgtgctggtggtcacggttgatcccgccgttaaagcgctgaataacgccaccttcggcaagtcttatgaaaaaacgattaccacgcgtgatgtccagcccagcgtcggctttgccagccggggatcgctgctaccggggaaaatcgcggaaggactgccggtcatggcgcttaacgtcaaccatgttgatgtgaactttttccgcgttaagcccggatcgctggcgtcatttgtcagccagtgggagtaccgtagttctctctctaactgggagtccgacaatctgctgaaaatggcggatctggtttataccggtcgttttgatcttaatccggcgcgcaatacgcgtgagaaactgctgctgccattaagcgatattaagccgctgcaacaggcgggcgtatatgtggcggtaatgaatcaggctggacactacaactatagtaatgccgctacgttgtttacccttagcgatatcggcgtgtccgcgcaccgttaccataatcggctggatatctttacgcaaagcctggaaaacggcgcggcgcagtcgggaattgagatcgttcttctgaatgataaaggtcagatgctggcgcaggcgacgagcgacgcgcagggacatgtgcaactggaggctgataaagcggcggcgctattactggcgcgtaaagaggagcagaccacgctgctcgatctcacgcttccggcgctggatctgtcggaatttaatgtcgctggcgcgcccggctacagcaagcagttctttatgttcggcccacgcgatctctaccgaccgggcgaaacggttatcctcaacggattactgcgcgatagcgacggtaaaacgctgcccgatcaacccgttaagctggaagtggtaaaaccagacggacaggtgatgcgtaccgttgtcagccagccggaaaacgggctataccgtttgaattatccgctggatatcaacgcgccgaccggcttgtggcatgtccgcgccaacaccggcgataatttgctgcggagttgggatttccatgtggaagactttatgccggagcggatggcgctcaacctgacggcgcaaaaaacacctctggcgcctgcggatgaggtgaaattctccgttgtcggctattacttgtatggcgcgcctgctaacggcaataccctgcaagggcaacttttcctgcgtccgctgcgcgacgctgtcgcggcattgcctggcttccagttcggcaatattgccgaagagaatctttcgcgcagcctggacgaagttcaactgacgttggataaaggcggacgtggtgaagtgagtgctgccagccagtggcaagaagcgcattcgccgctgcaggtaattctacaggccagcctgctggagtctggcggtcgtccggtcactcgtcgcgtagagcagccgatttggcctgccgatacgttaccgggaattcgtccacagttcaccgccaaagcggtatacgactaccgtacggataccaccgttaatcaaccgattgtcgacgaagacagcaacgccgcattcgatattgtttacgccaacgcgcagggcgagaaaaaagcggtgtccggtttacaggtgcggctcatccgcgagcgtcgcgactattactggaactggtcggaaagcgaaggctggcagtcgcagtttgatcaaaaagatctggtggagggtgagcagacgctggatctgaacgcggatgaaaccggaaaagtcagcttcccggtggaatggggcgcgtaccgtctggaggtcaaagcgccgaatgagacggtcagcagcgttcgtttctgggccggctatagctggcaggataacagcgacggtagcggcgcggcgcgtccggatcgcgtcaccctcaaactggataaagcgaattatcgtccaggcgacaccatgaaattgcatatcgccgcgccggtcgccggtaaaggttatgcgatggtggaatccagcgacggtccgctgtggtggcaggcgatcgacgtgccggcgcaggggctggagctcacgattccggtggataaaacctggaatcgccacgatctctatctcagtacgctggtggtgcgtcccggcgataaatctcgttccgcgacgccaaaacgcgccgtggggttactacacctaccgctgggggatgaaaatcgccgcctcgatctggcgctggaaagcccggctaaaatgcgcccgaatcagccgctcaccgtcagggtgaaagccagcgttaaacacggcgaaatgccaaaacagatcaacgtgctggtctccgcggtcgatagcggcgtattgaatatcaccgattacgcgacgccggacccgtggcaggcgttcttcggtcaaaaacgctacggtgcggatatctacgatatttacggccaggtcattgaagggcaggggcggctggcggcgttgcgttttggcggcgatggcgacgaccttaagcgcggcggaaaaccgccggtaaaccatgtcaatatcatcgcgcagcaggcgcagccgatcacgctcaatgagcagggcgaaggggtcgtaacgctgccgattggcgactttaacggcgaactgcgggttatggcgcaggcatggacagcggacgattttggtcgcggcgaaagcaaagtcgttgtcgccgcgccagtgattgccgagctgaatatgccgcgttttctggcgggaggggatgtttcgcgactggtgctggacgtcaccaatctgaccgaccgcccgcagacgctgaatattgcgctcgccgccagtgggttactggaactgcttagccagcagccgcaaccggtcaacctggcgccgggcgtgcgcactaccttattcgttccggtacgcgcgctggaaggttttggcgaaggcgaaatccaggcgaccattagcggtctgaatctgccgggagaaaccctcgacgcgcagcataagcagtggcaaatcggcgtgcgtccggcctggcctgcccaaacggtaaatagcggcattgcgctggcgccgggagagagctggcatgtaccagagcagcatctggcaaacgtctcgccagccacgttacagggacaactgctgttaagcggaaaaccgccgctcaatctggcgcgctacattcgcgagctgaaagcatatccgtacgggtgcctggaacaaaccaccagcgggttattcccggcgctgtataccaatgccgctcaattgcagtcgctcggtattaccggcgatagcgatgaaaaacggcgcgccgcggtggatatcggcatctcccggatactacagatgcagcgtgataacggcggttttgcgctatgggatgaaaatggggcggaagagccctggctaacggcctacgcaatggatttcctcattcgcgcgggcgagcagggatatagcgtcccgccggaggccattaaccggggcaatgagcgactgctgcgctatctgcaggatcccggcacgatgctgattcgttatagcgataatacccaggccagtacttttgccgctcaggcttacgccgcgctggtactggcgcgccagcagaaagcgccgctcggcgcgctgcgcgaaatctgggagcgccgtagtcaggcggcttcaggactgccgctgatgcaattgggcatcgcgttaaacacgatgggtgatgccagacgcggcgaagaggccattacgctggctctgaatacgccgcgtcaggacgaacggcaatggatggcggattacggcagttctctgcgcgataacgctctgatgttgtcgttactggaagagaacaacctcagaccggacgcgcaaaacgcgctattaagctcgctttctgagcaggccttcggtcagcgctggctctctacccaggagaacagtgccttgttcctcgccgcgcattcgcgacaggccagcgcgggcgcctggcaggcgcagacctcgttagaggcgcagccgctgtcgggcgacaaggcgctgacccgtaatctggatgctgaccagttgggcgcccttgaggtgacgaacaccggtagccagccgctatggctgcgtctggatagcagcggctatccctcatctgcggctgagcctgccagcaacgttttgcagattgaacgacaaatactggggaccgatggtcagcgcaaatcgctgtcctcgttgcgtagcggcgaactggtgctggtctggttaacggtagtggccgatcgcaatgtgccggatgcgctggtggtggacctgctcccggccgggctggagctggaaaaccagaatctggctgacagcagcgccagcctgccggagagcggtagcgaagtgcaaaatctgcttaatcagatgcagcaggcggatattcagtatatggaattccgcgacgatcgatttgtggctgccgtcgttgtcaatgagggccagcccgtgacgctggtctacctggcgcgcgcggtaacgccggggacgtaccagcttgcgcaaccgcaggtggaatcgatgtatgcgcctcagtggcgggcaaccggcgcgagcgaggggctgctgattgtgacgccttaa

SEQ ID NO: 375606 - DNA, 765 bp, Salmonella enterica
atgctgtacgccgttctgcacataatccgccaggctgtcagcgaccgtaatgcgggactgcacaccccacacgctggtaagtgctcctgtccagcatacatccagccagactttgaccggcctggttgtcacggtaatattcaggttttctgcaagcgttgtgcgcagccctgccacatagccggtacctttggtcacataaaactgattcccgcttttcccgaccagatagccgtcaccaaaaaacgccgccgccccgaagatgtcgatattttccaggcgctggcgctcgtccattccggccatacgtgcggtaaagtcaatctgccatgtctcggcaggcgtattaataccggtttcagcctgtgcgccgttatattccatcaggaacgaacgcgtaagcacgttaccctgctgtccctccgccgttttcagcttctgctgaacgggagcatgaacaatcattgccagcgtaccgctggccttattaatcagaccaatccagttaaaggaaaaatcccccacgtccgcccccagtacgacggaatgtaccacggcgttgtcattcaccacacccttacggctgacggcctgccggtgaacaatctgttcagccggtggcagggtttcattgcggtcaaccggctgatccgggtcaagtgccggcacattagcgaacacaaattcatccagcagaacaggctcccccgtggtgccctgctgcgctttccactgttcaaatgccagtgtaattgttgtctgtga

SEQ ID NO: 375607 - DNA, 195 bp, Salmonella enterica
gtggaaggtattaaatttaaatacgaattaaatcaggctgtgcgagtggcgatcagtggtgaagatgggtatgtgaaggcgcgtgctgagtacgccactttcgccaatcaatacttgcttcattatcgtgctgctgatggccgggctgtagattcctggtttgatgagagtgaactgaccacggttcagctttaa

SEQ ID NO: 375608 - DNA, 330 bp, Salmonella enterica
atgacaatcaaagtccacacgataaaaattgcgcctaaatatcttgatgccgttattgctggtcagaaaaaagcagagctgcgcagaaatgatcgtaactataaggtcggtgatgttctttcattgaaggaatggaagcacggcaaatacaccggtagagaatggtcagcggtgataactcatgttctgccgataaatgaggttgttgctggctttgaaagctgggttgttttgtccattaattcaatgtctctttttgacgttgctgcttacctttacaacaacggtggcttgtttcagctgcaggcgggggctaaacatggccgttaa

SEQ ID NO: 375609 - DNA, 408 bp, Salmonella enterica
atggaactgatcaaacgcgtccagttcacaaaagagcagttaatagaagcggcgcaggaagatattgctgctatcagtgatgcccttcaatgctacatgccctgcgcagcgagtaaaagtttgcaaaaatcattggttttgaaagaaattgcgttggcatcactgaacgctaaacctattggagcattccacatcctcgatcagcaggtgggagcaactactgattacatcaaggatggcgagtggcctatttataacggtgttattgaggtctatgccgccccgccagcgccggtagtgcctccagaaaagtgggtgaatcctgacatcaattacgctgaagaaaacgggtttgcggaaggctggaacgcttgtcgcgctgccatgctcaaaggtggtgcaaaatga

SEQ ID NO: 375610 - DNA, 426 bp, Salmonella enterica
atgaaaattagcactgagcgtgcagaagtcgccctgaaacattgcaaaagaatgcgccttcagatcaacccagcatacagcgatgcgggggactggtgggataacttaacaccagagtggcgcggcgtggtacttcatgctgctgcggttacttcaggttccggtgtatttaaagcccacttaagcaaattctgctggcgggagctttatgaacgtctgggctatagggacatgattcaactacgcaggggtatttcaagggcgcggttaacgtttgaaggttttggcagtttacgtgacagcgatttttcaaagcgcaccgcgaaccgcccgatcaaaaaggtacatcaaattaataccaggaacaaagtgcagatgattatcgcacctcatattgtccataaattgcagcaggggaatcactga

SEQ ID NO: 375611 - DNA, 594 bp, Salmonella enterica
atgaacatggcaactttcaaacttgattttgatgtcgatagcgcaccagtcctggatcgcgtgatagaagcctatgggttcacatccaagctaatgcttgcgcaacatcttgatatcgcagcaagtagcctttcctctcgttataaacgcggcggatttccttcagatatcgttgtaaggtgtgtcgctgaaacgggggccaatcttgaatggttagcaacgggtgagggcaggaagtttgatgatggaaaactcgacatactgaagttgccgcgcaaaaaaatcgtcgatggtcatctttatgaagctggcattctcatgctggacaaagttacctttttgccaggtagtccattacctacctctccgatatgcgtcttagaaggtagcactcagtttatcgttgatacttcattcacagaggtatacgacaatcagtggttagttgaaattgaaggcaaaaccagtattagaacccttactcgaatcccaattaaaaagataagagttagcggtgtaggtatggcatttgattgcgcacttgacgatataaaaattattggacgagtagttttaactattattaatggatga

SEQ ID NO: 375612 - DNA, 489 bp, Salmonella enterica
atggaaaaaactttaatattcgtttatgccaatagtaagaatattgtaaacgttcaaatcattacaaatatctcgcaaaatgaagaatatttgcaaggtgagagtcttaagactggagaagaaggaaaactcaaaacattcctaaaatcacgcatactttctgaatgtggttcgcttgaagaagcagaagattttgtttccagagggattgatacaggtttacttgaaatttgtgcaccgaaaccagaaacattcgatgttcatttcactggttttaagaaagacgaaaaaacaaaccttgaagaattagccatcaaagcgggaatggtagttagaaaatcggtaacgaaagggctgaagctactttgctacggctataacgccagctcaaaaaaaatggcagccgcacgtgaaatgggcattatcattctcaactctgaacaattctctcaattccttgatactggtgatttcactgaaagccaatga

SEQ ID NO: 375613 - DNA, 663 bp, Salmonella enterica
atgaatgactgtccacgacgctatacccgaaagaaagcggcttatcggtcagtttcacctcttcataaaacccgcttcggcgggtttttgcttttacagggcgacaggatgaatgactgtccacgacgctatacccgaaagaaagcggcttatcggtcagtttcacctcttcataaaacccgcttcggcgggtttttgcttttacagggcgacaggatgaatgactgtccacgacgctatacccaaaagaaagcggcttatcggtcagtttcacctcttcataaaacccgcttcggcgggtttttgcttttacagggcgacaggatgaatgactgtccacgacgctatacccgaaagaaagcggcttatcggtcagtttcacctcttcataaaacccgcttcggcgggtttttgcttttacagggcgacaggatgaatgactgtccacgacgctatacccaaaagaaagcggcttatcggtcagtttcacctcttcataaaatccgcttcggcgggtttttgcttatcaggccggtgaagggtatagaggttgcagaagacgccagcgtcaccatccggcaattaattgacagccgtggtgacataatattattcgtttttgtgatgagaaacacaaagcgctatgtattgcgctatttttag

SEQ ID NO: 375614 - DNA, 150 bp, Salmonella enterica
atgtttttatgcataggtaaagcgcacgaaatgtacaaatcttacgaaagggtggggctgcgggacaagtggcaggcaggcgtaacacgcccggttttgggggtgactgtcatcaaataccgggacggcgttgggggaaatagggtatag

SEQ ID NO: 375615 - DNA, 123 bp, Salmonella enterica; identical to SEQ ID NO: 368277

SEQ ID NO: 375616 - DNA, 867 bp, Salmonella enterica
atgaagtatgtcttcatcgaaaaacatcaggctgagttcaatatcaaagccatgtgccgtgtacttcagattgcccgtagcggctggtacgtctggcatcagcgtcgtcatcagataaaccagcgtcagcggttccgccttgtctgtgataacgtcgtccgggaagcattcagtgacgcaaaacaacgctatggtgcgccacgcctgacggatgagcttcgtgctcagggttaccagttcaacgtgaaaaccgtggcggccagcctgcgtcggcaggggctgcgggcgaaagcctcgcgccggttccgtccggtcagttaccgcaaacatgatctgccagtctcagagaatctgctgaagcaggacttttacgccagcggcccgaatcagaagtgggtgggtgacatcacgtatcttcgcactggtgaaggctggctttatctggccgtggttatcgatctgtggtcgcggtcagtcattggctggtcgatgtcctcgcggatgacagcacagcttgcctgcgatgcgttacagatggcgctgtggcggcgtaaatgtccggaaaatgtcatcgtgcatacagacagaggcggtcagtactgttcaacggattaccagagcttactgaaacgccataatctgcggggaagtatgagcgccagaggttgttgttacgacaatgcctgtgcggaaagcttcttccatacgctgagggtggaatgtatccacggagaggactttgtcagccgggaaataatgcggacagcagtgtttaattatagtgagtgtgattacaatcggtggcgtcgtcacagtgcctgtggcggtctcagtccggaacaatttgaaaaccagaacctcgcttag

SEQ ID NO: 375617 - DNA, 177 bp, Salmonella enterica
atgcagaatggggcaatctggcagcgcgtcgccggcgcagcagtgaatcagcgctttgagggtttgcgccatgtgctgcatgttctggatacgtctgtccagttcatcaatgtgcgtctgcgccaggcgtttgacgtcagcgctttgccgcgactggttattccaaagattcagtaa

SEQ ID NO: 375618 - DNA, 1959 bp, Salmonella enterica
atgttgaaagataaccaaaaacacaacgagtctgttgccccgaatagcgcctttctgtctgagttacaacgtgcattaccggaattttttatcgccgatcgctataacgagcagggcgaactgatcgcgaaaggcggatttgatctcgccaaatttgagcgcgcgttgaaagcgcgtaatattgatgagctgactagcggttatcagattgattttattggcaaagattacgcaaaaaaacaggcgggtgaaaaatccgttactgttatcgttcctgacgtggaacacaatactctggcagaaaataaaaacagccataatctttttctgaccggagataatctggatgtgttacgccatctgcaaaataattacgccgataccgtcgatatgatctatatcgatcccccttataacaccgggtcggacgggtttgtctatcccgatcattttgaatatagcgatcgggcgctgcaggatatgtttggtcttaatgatactgaactggcacgtttaaaatccattcagggtaaatcgacgcactccgcgtggttatctttcatgtatccgcgtcttttcctggccaggaagctcctgaaagataccggatttatttttatctctatcgacgataatgagtacgccaatcttaaattaatgatggatgagatttttggcgaaggcggatttgtcaccaatgtgatgtggaagcgtaaaaaagagatttctaacgactctgataacgtttccatccagggggaatacattcttgtttatgccaaaaccggtcagggcgctttacgtttagaaccgctttctaaagagtatattcagaaatcctataaagaaccgaccgaacagtttccagaagggaaatggcgcccggtgccgttaacggtgtcaaaagggctgagcggcggcggctatacctataaaattaccacgccgaacggtacggtacacgaaagactatgggcttatcctgaagccagttaccaaaaactggtggccgataatctggtctattttggcaaagataacggcggtattccccagcgagtcatgtacgcgcaccacagtaaagggcagccaacgaccaattactgggataacgtagcgtcgaataaagaggggaaaaaggagattctggatctcttcggcgacaacgtttttgatacgccgaaaccgaccgcattattgaagaaaatcatcaagctcgctatcgataaagacggcgtcgttctggacttttttgccggttccggtactacggcccatgcggtgatggcgctgaatgaagaagatggggggcagcgcacgtttattctgtgcactatcgatcaggcattaagcaataacactatcgcgaaaaaagcaggttataacactattgatgaaatcagccgcgagcgaattacacgcgttgcggcgaagatccgcgccaacaatcccgcgaccaatagcgacctcggttttaaacattatcgttttgccactccgacacagcagacgctggacgatctggatagcttcgatattgctaccggccattttatcaataccagcggtcaactggccgctttcaccgagtcaggatttaccgacatgatcaatcctttttccgccagaggattgggcgtgccgggcggcgcaagcggcgaagagaccttattaacgacatggctggtcgccgatggttataaaatggatattgacgtacagaccattgatttttccggctattgcgccaggtatgttgataatacgcgcctgtatctgattgatgaacgatggggaaccgagcagacccgcgatcttctcaaccacattggtacgcaccagcttccggttcagaccattgtcatttacggctactctttcgaccttgaatccattcgtgaactggaaatcggcttaaaacagcttgatcaaaaagtgaacctggtgaagcgttattaa

SEQ ID NO: 375619 - DNA, 1701 bp, Salmonella enterica
atgaggctactgaatcggcttaatcaatatcaacgcctctggcagccttccgccggggaaacgcaacatgtcaccgttagcgaactggccgaacgctgtttttgtagcgagcgccatctgcgaacgctgctgcgtcaggcccagcaggcgggttggctaagatgggaggcgcagtccggacgcgggaaacgtggacggctccagtttctggtcacgccggaatcgctccgcaccgccatgatggaacaggcgctggaaaaagggcagcagctcaacgtactggaactggcgcagctggcgccgggcgagttacgggcgatgctccagccttttatgggcggccaatggcaaaacgatacgccgacattgcgtattccctactatcgtccgcttgatccgctgcagccgggtttcctgccaggccgcgcggaacagcatctcgcagggcaagttttttccgggttaacgcgcttcgaccgcgacagtcaatatccttgcggggatttggcgcatcactgggagatttccgccgacggtttacgctgggatttttatattcgctccacgctgcactggcataatggcgatacggtggacaccacgcagctacacgaacgcctggaaaggctgcttaccctaccggcgctaagcaaattgtttattagcgtcgcacggatcgaagtaacgcatcctcagtgcctgacctttctccttcaccgacctgattactggctggcgcatcgtctggcgagctattgtagcggtctggcgcatcctgacctgccgcttatcggcacaggtccttttcgcctggcgttgttcacgccggaactggtgcgtctggaaagtcatgaccattatcacctcagccatccgctgctgaaagcgattgaattctggatcaccccgcaactgtttgcccaggatctgggcaccagttgccgccatccggtgcagattgccatcggcaaaccggaagagctggcgacgctgagtcaggtaagtagtggtatcagtcttggcttttgttatttaaccctcaaaaagggctcacggctcaacgtacagcaggcgcggcgtctgatacatattatccatcatacttcgctgctgaaaaccttaccggtagatgagaacttgattatgccaagtcaggggctgctacccggctggacaatcccgcaatggcaggacgttgatgaaacgccattgccgaaaaaacttaccctggcgtatcaccttcccgtagagctgcatacgatggcggaacagcttcgacattacctggcgacgctcggctgtgagttaacgttgatttttcataatgccaaaaactgggataactgccctgcgttggcgcaagcggatctgatgatgggcgacaggctgatcggcgaagcgccggaatatacgctggagcagtggctacgttgcgatcagatctggtcacatgtcctggacgcgcctgcgttttcccatctgcaggctacgcttgacgctctgcaaattcagcccaatgaaaaagatcgccgcgccgcgctacaacaagtttttgccaacctgatggatgacgccacacttacgccgctgtttaattatcactatcgcatcagcgccccaccgggcgttaacggcgttcgactcacccctcgcggctggtttgaatttagcgaagcctggcttccgccgccttcgccgtga

SEQ ID NO: 375620 - DNA, 819 bp, Salmonella enterica
atggcccgtctggcagcatttgatatggatggcacgttattaatgcccgatcaccatttgggtagagaaacgatcgccacgctgtcgcgtctgcgcgaacgcgatatcactctgacattcgctacgggtcgtcacgtgctggagatgcggcatattctggggacgctttcactggatgcttatcttattaccggtaacgggacgcgaattcactcgctggaaggcgacgtgctgcatcgtcaggatctcgatcctcaggttgccgatacggtgatgcaccatgcctgggatacccgagccagtatgcatgtgtttaatgacaacggctggtttacaggccaggagatccccgcgctactccaggcgcacgtctacagcggctttcgttatcaggttatcgatataaaaagtattccggcccatcaggtgacgaagatctgtttttgcggcgatcatgacgatctgatccgtttgcgcattcagctcaatgaggcgctggaagaacgcgctcacctctgtttctctgccgtcgactgcctggaagtgctaccgctggggtgcaataaaggatcggcgctggcggtattgagcaaccatttagggctttcactggcagattgcatggcgtttggcgacgcgatgaacgatcgggaaatgctgggcagcgtcgggcgggggctcattatgggcaatgccatgccgcagcttatcgccgcgctgccacacctttcggttatcggacattgtggtaatcaagcggtatcacactttttgacgcattggctggacaatccgcatctaccttattcccccgaatga

SEQ ID NO: 375621 - DNA, 234 bp, Salmonella enterica
gtggtttatgtttccgatatgcttttaaggaggaagaatattgaacgtgaacaggcgatagtgagtagctcgctgcgccaggggataatactcccctggcgcagccagttatattttagtgcggtgataacaaagcatttactcactactgatgaaattcgctatttacaacagagcacgcttactaagcaaaaaaatctgcacacgctatctttttatatctgtcctgggtaa

SEQ ID NO: 375622 - DNA, 321 bp, Salmonella enterica
atggaatttggaaatgcctgggtctggattcatgataaccaatcccaggtggtacgggcgttactgcaggctggaatgatcaaggttaataaagaagggcggtacttattagatgttaatttggcttctgttgattggccattaagaagaaaagaggctttcgcaagtcatgtcgcgggatggctcaaacatcgttttgatatcgaagcgggaaggtattccgttcggggaaaagatgattatgatgcgatcccaagttatgagacgccgctaaaggaccagcatcctttttataatcatacagtgaatgtcgactggtaa

SEQ ID NO: 375623 - DNA, 126 bp, Salmonella enterica
atggtcctgaacgcccttgttaaagataatgctgtaaagcgtcaaactattgtcaattttatctattgctttagcttttattctttgtgtgaatataaaaaacgttatcaaaaaggcaataaataa

SEQ ID NO: 375624 - DNA, 510 bp, Salmonella enterica
gtggcaatctttgacattgagaaagatgaattactccgattatccgattctcagttagaggagttaattgctcgcctctctgaggctgaagtagcagcacatggtcatagccctgcatgggtaagctggtcaggttcaatcaatgcgcctgacggtggaattgatatccacgtccaggttccggccgacaaactaaataccggttttcttgaaagacctgacacaatcctccaggccaagaaacattcgatgccgaagaacgctatcacgaaggaaatgatcactaatggtgtgttatcactaacaatcaccgagcaggctataaaagctggcagttacatcatcgttagtctggatgatgactgctctcctctcatgctaaatgagcgtctcaaagcgatgcaggatgccatgggaaatgatcctaatagtagcaatattcacctgggtttctatgatcgttcaaagttagcacaatggttgcgccagcacccgtcatgctatgggtaa

SEQ ID NO: 375625 - DNA, 3351 bp, Salmonella enterica
atgctatgggtaaaaggcaaactaggtcagggatactcaggctggcaaccctatggggcgtggagtaatccgccacaaggtgttaccgacacattgatttctgcacctggagttattgtttctttacccccaggaccagagcaaaaactcaacattcatgatgccattgatccgatacgcaaacttattcgatctacgcaaaaggctgttcgcatcacagggttatctggtgtcggaaaaacgaggatcgttcaggcactcttcgatgaaacagttggaacagatgctctagatcggactatcgccgtctatgttgatactggcgctacaccggaaccatctgcgtcagccatgttggacagacttatcgccgaaggccggcgggccattatggtcctggataattgcccagcagaactacattcttcgttggccagcaaagtatctgccgtgggtactaaggtcaaactcattactgttgagtacgatatcagggatgataagcctcaaacaaccgaagtcattcacatagaggctatcggaccagaagtggctgaagagctccttattcgacgcttccctagtatcggccaggcaaatgcccgtaggatagcagaatttgccaatgggaatgcaagggtagcattagcaatcgccgagagagtgggggaaggtgagagtctggcccaactttctgacgcacaattgtttaaccgcctgtttgaccagcgtaatcatccagacgaaaatttgcgagaacaggctgaaataatgtctctggtatattcattctcaatctcgccatctgaagttggccaaagtgaattggatgtattgggttcattctctggctatactcaaaaccaattatttcgtgcaatcaaaaaattatcagaccgtcatgttttacagaaaagagctaactggagagccatcctaccccatgctattgcaaaccgactggcagcttcggcactcgagagtattcccgtagatcaactgagaacaacctttgaagccaccagacatcgacgcttattgatgtcatttgctcacaggctcgggttattgcataaccaccccgttgcgaaagagatagctgaagcctggcttcagccagaaggactattgggacagatattagacctagatgatatttcgatgcgaatactagagtatatcgccccagtatcacctgataccttgctcgaccgattcgagacagtgcttacagagtctaacttcattggaatgaaaggccgctacaatccacagagatcgactattcaaaatcttttgcacttattagcatatgagccgaaatatttcgaacgatgtatctggcttttaatccaaatagctgaccacgaagctgagaataataatttcaactcagttcgagatacaataacgaggttctttcagccgtatctgtctggcacacatgcttctttagatcagcgtattttaattttaaataaatgtctttcatcagatgtatctgaacgtaaatcattaggtcttagcatactgtcaacagctctggatggtccaccatggactggttttgggaataatgactttggagcccgaccgagagactatggatttaaacctaattatgaagaacttgccgagtggcggagcgccttcattgatattaccgttgagttaggaacgtctggaacttccgaccttgaaaagggtgcacggcagatcctagcagacaagtttcggggaatatggcgtcagaaggcggtaaggtcaaagctcattgatgctgcccgtaagttgcatgcccatcatccatggggtgagggttggaaagccgtccgttcaacgatttattttatttacacacagagtaaagttaaagaaggtttcaaagcagtgccggacaaccttgcagccctggcgaatgaactggagcctaatgatttaatttcgaagataatgacttatgtgttaagtaatggacgtaatctttttcctctaaatgctggttttgatcttaatgaaccaggaaagctgcataaagtcagggagtttcaggaatccatagcgctccagttgggtcaggactttgctgcatctactcataatattaatgagttaggttcaaatctgttttctgggaatggaatgccctatcgctattcgttcggtataggattagcaaaaggatctcacaacttactgattgattgggagaagcttatcacccaattgaatacacaatctggacaacacaaggatttttctatttttcgtggtttcatcggagaggccgaaactattgattcaacattggcccaagaactgctagaccagtgtgcgaagcatccggaacttagacacgaattggttaacttacatccctggcagaaatttactgaaatcgacctagatcgctgtatctcgcttctggacgatcctgatattcgtccgttaatgtatagtgaaatcttatggagagagcaatatgccaatttgccgggagagcgcattctcaccctagcccagcgccttctgaataaaccgaatggggatgatgtggttattgaggctttgggcatgaggctacatcatctgaaagacgctacagatactctggatatcggcctgagattggtcggactaaaggctgcaattcttagattccaaagagatcatgatgacccaagtggaattatcgatcattacatggaagccgttgtaggttcttcattgcgatacccaggcaacgaagccgaaaagctggaatggttgaatacgatctttgcagtagttgatgaacagtatggttatattcattcattcgaagacgttattggaataactgctgcattgatgccagaagcattccttagtcgcgttttcgacggtacagaagaacaacagcgaagacgactacattttattcgttacaatgatttaagtgggtctcctatctccaaaatcgacatagcagttttaattgagtggtgccgcatccaaaatgctcctagcatctgggcctctgttgccacagggataaatctctgggttaaagataatgatcaagatattattaccttgccaaaagatgccatggtgcttctagaagcagcaccagattcaaaagccgtccttgagtcttttgccaaaactgctgtaccttcatcatggtctggaagtctggtaaacacaatgcaacctagagttgatgctattggtaacttaacaaatcacgaacgtacagatatctctgaagcggcccaaaaagtttacctcgaattaattgatttaattaatcgtgaaaaaatacgtgagcaacgggaagatgaagagcgggagcaacgttttgaatag

SEQ ID NO: 375626 - DNA, 1041 bp, Salmonella enterica
atgcttcatactaccaatcccgttctcaaacacaaaacaggtttgctcaatctcgctgaagaactcagtaatgtatctaaagcctgtaaaatcatgggcgtctcccgtgataccttttaccgttatcgcgaactggctgatgaaagaggtgtggatgcgctgattaaccgcagccgacgcgctcccaatctcaaaaatcgtaccgacgatgcaactgagcaggccgttgttgattatgctgtcgcattccctgcgcatggtcagcaccggagcagcaatgagctgcgtaaacagggcgtttttatctcaggaagtggtgtccgctctgtctggctgcgccacaatcttgaaaacttcaaaaagcggctgaaagcactggaagaaaaagtggctcgtgaggggatagaactgaccgatagccagatcgccgcactggaacgcaaagccagtgatgacgaggcctgtggtgaaattgaaaccgctcatccgggctatctgggttcacaggacaccttctacgtggggaacctgaaaggtgtcggacgtatttatcagcagacgttcgttgatacgtactcaaaggttgcacactgtaagctgtatgtcactaaaacgccgatcacagcagctgacctgttgaatgatcgcgtgttgccattttacgcgtctcagggcctgccaatgctgagaatactgaccgacaggggcacagagtactgtggcaaagtagagcagcatgattaccagctttatctggcaataaatgatatcgaccacacgaaaaccaaagcaatgtctccgcagacaaacggcatctgcgaacggttccacaggacgatcttgcaggaattttatcaggtggcgttccgcaaaaaactgtatggcggactcgacgcactgcaatcggatcttgatgaatggctggctcactataataatgagcgaacccatcaggggaaaatgtgctgtggtcggacgccaatggaaacattacttgatggaaagcacatctgggctgagaaaaacttaagccagatgtaa

SEQ ID NO: 375627 - DNA, 789 bp, Salmonella enterica
gtgaaaaatacatggcaaaaagttgacactatatctccagttggattaacagggcatacgggagtaaaattaaacgaaacgatggtacttattaccggaggggttaatgagcatatctttgataagtattttattgatatagcggctgcggctgcggatgaaagtgaaaaaaataaagtcatctataattattttaataaacctgccaaagattatttttttaataaaatcgtatttatctacaatgctaaagagaacacatggaagaatgccggtgagctgccagacgcggggacggcaggatcgtcatcggtaatggaaaataatttcctgatgctgattaatggtgagctcaaaccgggtttacgtaccgatgtgatttaccgcgccatgtgggataacgacaagctaacatggttgaagaacagccagttaccgccatcgcctggagaacaacagcaagaagggttggccggagcattttcgggctatagtcacggtgtcctgcttgtcggtggtggcgcgaattttccgggagcaaaacaaaattataccaatggaaagttttactcccacgaaggaataaataaaaaatggcgagatgaagtctatggtttggttaatggccattggcaatatatgggtaaaatgaaacaacctctcggctatggtgtatcagtaagttatggtgatgaagttttccttattggtggtgaaaatgctaaagggaaacctgtttcgtcagtaacctcctttaccatgcgtgatggtaatttattaataaaataa

SEQ ID NO: 375628 - DNA, 231 bp, Salmonella enterica
atgatgcggggtctggcggccagccaccggagtcgtgttttgtattatctggtggaggggggggaatcactggcagccatcgccgatgccgaaaaggctgtagccgataacaccagaagcaatgggaaaaatatacgatgtctcataatatcacccgtgaataataagattatccttactattgacttccttcatttccagcatagcttacgcttcatcatcattgaataa

SEQ ID NO: 375629 - DNA, 384 bp, Salmonella enterica
atggtcgtcctgccatggcgggcttcagcaggtgcagaagaaaaatccgttatgatgaccggatggcgggactgtcattttacagctaatggtgtcgattttttcaggggcgctttctacgattaccagatcatctggtatcagcgcccgggcgttcaattttggcgggcagaagtcacccggcagaaattacttaacgatgcagataatgccattaaggactggcgcacagaattaacgttgggaattatcagtgatgaaaataaagcagctttgattctgtggataaattatatcaatgttcttaaatcgctggacttagcaggtatttcagacgaggacaccttcacagcaatcaggtggccttcattaccacaggagtga

SEQ ID NO: 375630 - DNA, 519 bp, Salmonella enterica
atggagttaaaaaacgtaaccagatacattcctgacgaccaggactacgataacaactttctgtattttcgtagtgaagatggtcaggacttttacgaatcactgagtaaattcaccaaaaaatataagctgtgcattgactccgaaaatataatccgttccgtatcagaagatgtgtcgcgactctatccggctggcttttcagttgttgaggtcaataaactaccagccggatttaatatctatggcgactggaaatattcgaacggcgctgttgtcgctgttcccgttgattatcatgcaaaagccgaaaccacacgtcagaagctacttaccgatgctaacagcaccattgtcgactggcgaaccgaactggcgttgggggatatcagcgacgatgatagggcaagcctgactaaatggatggtctatatcagggcgctgaaaatgctggatttgagcgatgtgaaagatgaggccaccttcacagcaatcaggtggcctgcattaccacagtaa

SEQ ID NO: 375631 - DNA, 1662 bp, Salmonella enterica
atggctaaaaatgattttaaaccgtttgcgacgggcaagggtgctaatgttacatcgcagcctgactgggaggcgctgccggcgctcctgtctggttttactgcgggcaaggcatcaagtgcacaggtaaataaagcgctgcgtcaggcgagcttcatcgctgcagcactggcacagtacacagccagcaagagcgggcaggatgtactcgatgatggtgacctgagcggctttatcgccaaaatgtccgctgcgttcggtaaggattttcagactcttgatgccacgctgacggcgctcgctggtctggctactggtgcagataaacttccgtattttacggggaatgatacagccggacagacagatcttacttctgttgggcgcgacatcatcggaaaagccagcattgcggatattctcacatacctcggtttgggagaaacagcaaagcaagctgctggtgccatgcaaaaatcgcagaatggcggcgatattccggacaaaaaacaatttgcgagaactatcggcgctgtgacttctaccagcgttacatttggtgaatcgggatggttcaaaatcgccacggttgtaatgccgcagtccacgtctaccgtggtgattaagttgtatggcggggctggttttaacgtcggcgcgtttgaaacggcggctatcagtgaactggtgctgcgttccggtaatagctctcctgcaggaattactgccacattatggaaacgctcacctaacggtgttcttgagtgtgcctggattaacacatcaggagacacttacgatatttatattaatatcgtccagtatgcgtactggttaattgcgcaatatgattacaccggtaatgcaaatgtcacactatatagcgctcctgaatattcagaaacaaagcctgccaacgctacgaacggtcagacatatacgatgtataacagcatgatgaaacccactcccgacgatgtcggagcgctgtcagttaatggagggaagctaaacggtccgttaggcattggtactgacaatgcgcttggtggtaattcgattgtgctcggtgataacgataccgggattaagtggcacagtgacggcgttttaggcctttatgccaataatgccctggtcggttatatcgacaactcctggctgcacatgtcagttgatgttctcactaatggtatcttacgtgccggcaacggaaaaacactgacgttatcgagtggtaacaactccgcgatgaacgccggtttcagtctgtggggaaatggcacagaccgcccaacggtcattgaactgagtgacgatcagggctggcatttatacagccagcgaaatactgatggcagtattcagtttgttgttaatggacaagttattccggataattacggtaattttgacgcccgttatttatcatcaggaaacgtatatacaaaaggtgagtcagataatcgttacgtacagaatatccagcgcggtgctcctgtatggcctggtaaagtagatgaatatggacctaatgaggctcccgcagggtgtttcctgacacaggccagacatgacccaacaacggcatacggtgtgacatttgcgtatcgaccactgcaaatgtgggttggtaatggctggcgtacaattaatggataa

SEQ ID NO: 375632 - DNA, 753 bp, Salmonella enterica
atggcagtatctgaccagacccgtagcggcgaccttgccgaaacattcaaatctgagcgggaaacaacaaagaaccaaatccgcgtcgctttgcccggcattattcagtcattcgaccctgacgcggttacggcggttgtacagcctgctatccgttcggttgagaccgataacgacggcaaccgggtgacaaaaccttacccgctgctggtggatgtgcccgtggtatttcctcgcggcggcggctgtacgctaacgttcccggtgaaagccggtgatgaatgcctggtgattttcgccgatcgctgcatcgatttctggtggcagaacggcggggtacaggagcctgtcgatgaccgggtacatgatttatcggatgcgttctgtatcgtcgggccgcagtcgcaggcgcagaaaatcagcggaataagtacgggggccgcgcagctccgtagcgacgacggaagtacgttctttgagctcaacccttccactcagaaaattaaaatcgtagcgcctggcggtctggatatagtgaccccgctggccgacttctcggagaaagtcactattcacggccttctgtcctggctgggcggcatggtagggtccgttgtttctggcgttgcatcaaaaatcaccggtgctgttgagtttatcggtagtgtgaaagcgaacggcaaggtgatcgacaatacccatacgcatggcggcgttcaacacggtggaagcaatacagatgaggtgaactaa

SEQ ID NO: 375633 - DNA, 726 bp, Salmonella enterica
gtgagcagaattgcgataaccacaatcgtattttctttttttttaacttcatgtagttgggatcctaatggtgctaaagcacaggaaaaatggctatcccaaaaaaatgaagaaaaacaagcgtacgataagcaagttgaggagagccagaaaagcaggcttcaaacacagcgcgaagaaaagtctcaatttgaagtttcacacccagaggttatcgttgctggtgttgggaacgagcttacaagtcagggagcagaatctttgcgagatgcgtacaacagcattccattcgtaactcgttatccaggaaccacggaccctaacaaagtttatacctatgtcggtgactacaaattaaatttgcaactggttaacacatctgtgctttctcagatctcagattgcaaacgaatttcagcgtatgccgatgttgatattaatcgtacttgcttcaatcaaattggaaatgatttgagtttgtttgcatctgtaattaaagacaaaaatattaccggaattgcaaaaaaagcagctctacgagattcaacttacggaaccaaaattgattttggtcatgctgcgcgtttagcaaaaatgcatgccactttatgccaaaagcagggcggtaaaggatttgtcaaaatgtcgactgtagctgtgccttgtggctcttctggcgatgtaattaactatcgaagcgccagtaagatgggacttataaactga

SEQ ID NO: 375634 - DNA, 1065 bp, Salmonella enterica
atgtcacagaactggatgaggcatttcgagctgcagctcgtgggcgaaaacggacagggtattcaactcagcgattttaaagtgacctttacgatcgactggttcaacatcagcagcgcgtcccgggtgggaacgttcaaaatctacaacctgtcagctgatacggtgaaccgcatcaccggccaggagttttcgaaagtgcggctgattgccggttacgacggtatcgcgccggaggtggcagccagtgatgtcggcattgcgcgggaagtcgacgccgacacggtgggccagagcgacgggcgcaactacggactgatttttagtggggaaattcgctactcggtcacaggaaaagacagtcccattgactcctacgtcctgattcaggcagccgatacggatctggcttttgccaccagcataacctcgcagacgctggcggccggttacactgtcgcagacgtgaaccgcgcgctgatgaaagacttcgaggccaaaggcgcgaccgaaggcctaacgcctgaaatgcctgctaccgtattcccccggggccgggtgctgttcggcatgacccggcatcttatggataacgtggccggacaatgtggcgcaacatggcagttcgtggacggccaacggcagatggtggcgaataacgaatatgttcacgacgcgattgtgctcaacagtgccaccgggcttattggcatgccgcagcagactatcggcaacggcgtaaacgtccgcgcgctgattaacccgaacatccgggttaacgggctcattcaactggatcaggcttctgtgtaccgtactgcattgtcgaataacgatattgctatggctggtggccgtatcaccgaccagaacactgacggtaatatcacgctaagcggcaccacggcgcagcctgccagcattgcaacggatggcgtttatgttgtgaaaggcattatgtatactggtgacacaaggggccaggcgtggtacatggatatgatgtgctttgctcgaggtgctagtgatattcctagccagtcagcgatgaatcgaggtgcataa

SEQ ID NO: 375635 - DNA, 303 bp, Salmonella enterica
atgactattcaggaaattccgctgaccgcggataaccagcagttcagcatcatcctggcgggcatcacgtggcggattcgcatcatctggcgtgacctgtactggatcatggacctgcagaacgacaggggggagccggtaatctccggcattcctttggtcactggcgccgacctgctggcacagtacgcatacatgggactgggttttaagctggtggtgatgtgtgacgacagtacacaggattatccgacgaaaaccgacctgggcggtcgcagtcatttactggtattaacggagtaa

SEQ ID NO: 375636 - DNA, 576 bp, Salmonella enterica
atggatattctctctactctctttcatcagcagtccaggagaattggggtgcttatccccagtgtggttgtttcagagaagcacaccgacacgctagagataacagagcaccctgtcgaggtcggtgccgccatcgctgaccatgcctacaaaaaaccgtctgaagtggtgatggaggtcggtttcgctggtggcggatcgttgctggattttgccagtaacctgacggccaccagcttactgggcctgagtcctcagcagacgtatcaggagatactcgacttgcaggaaagccgtattcccttcgatgtggtgaccggcaaacggctgtacagcaacatgctgatccgcgcactggaggtgacgaccgacaggacgaccgaaaatgtcttgtccgccgtcctcaccctgagggaggttctcatctcgcagacgcagcaggtaaccgtcgcggataaaaccgacatgaaggacggggccagcacgtcgccagtcctcaataccggaaccaaaacaactaaaccgcccaacacttctttattgcagagtggtgcggcttttctggggctgggttaa

SEQ ID NO: 375637 - DNA, 2010 bp, Salmonella enterica
atgaacgctgagactattaaagattttctcgtctcccttggctttgatattgatgaagccggatacgagaaatttgaatctgttcttgctggcgtcaccgcaaatgccataaaaacagggctggcggtggaaggtgcggcgctgtccgttgttgcgtttacggcgaaaattgcctccggtctggataatctctactgggcatctcaacgcaccggcgcgacggttcaggggattcagtcgattggctacgcagtttcgcaggtgggcggtagtgtggacgcggcgcggacttcgctggaaagcctctcccggtttgtgcgtaataatcccggcgcggaaggctttctgaaccgcctgggtgtacagacccgtgatgccagcgggaatatgcgcgatatggccgccatttttacgggcgtcggccagaagctcagcagcatgccgtattaccgggctaaccagtatgcgcagatgctgggcattgatgaaaatacccttatggcgatgcgtcgcggtgtgggcagtttctccgggcagtacagcgcgatggcgaaggctatcggtttcaatgctgacgaggcggccaaaagctccaacaggttcatgacctccctgcgcgagttcggcgtgatggcgggtatggcccgtgacaaaatcggctctaatcttgctggtggcctcgcgggttcgctggacatgctgcggcgccacatccttgataatttcccgcgcattgagcagaccctgacgaaagccataaaaggtatcctggcgctcggggatattatcggtcggctgttcttccggcttatcgaaggaacatcagaccttatcacctggtggcaatcgctggacaagaaaacgagggatctgatctcgctgttcggcgcgctgacgattgcgctgcgcattctgaacagcacgttctggatgtcgccgattggcctcattaccgcgctggcggcggggatcgccctcctgtgggaagactatcagacctggaaggaaggcggccagagcctgattgactgggagaaatggaaaccggaggtcgacgtcgcgctgaagatggttcgtgacctgaaagcgaccgttaacgacctggcgaaagcactggcgaaactgctcaacattgaccccaaatcgtggtccctgaaatgggatttcagcaatttcatcgaccagatgggggagttcagcaaaatgctgaacatgatcgccgacctgctcaatgccattaaagacggtcgctgggccgatgccgccagcatcggcaaacagatgcttaatcagggcagcgaaaattcgtcagcgatgccaatggtaacagacagcgccaacggtgccgccgactggattaaagagcactggggattcgatccccgtagcgtaggccgaacggttcgcggctggtttgggggtgatgaccctgaacaacacggacagtcagttaagcggccacaaccaacaaaagctggcgctgagctgctgggatggatgcagccgatgctaaccaatctggaacacctataccggcttccggaaggtttattgcgcagtgtggccatcactgaatcaggcgggaatcagtttgcagtttccggcgccggcgctaaaggcctgtttcagtttatggacggcactgcacgagatatggggctgcgcgggaatgatgttttcgatccggagaaggctgcgcaggctgcagcaaaatatctttcacagttgctgcgggcgaatggcggtgacctgagcaaggcgctggcgtcatataactgggggatcgggaatgtacagaaacacgggatggcccttatgcctcaggaaacccgcaactacattccgaaggtgttaagcaacatgcccgctcccggagctcaggtccagcaacagaacacctatcacatttacggtggtggtgatccgcactccgtggggaatcaggtagaacgtcggcagcagtctgcaaatgcccagctcatgcgcggcaatcaaacgaaggtgggttaa

SEQ ID NO: 375638 - DNA, 564 bp, Salmonella enterica
atgggggtactcccgttgagcaataacaccagcacacagtgcggctggctgacgcctaccagcggcgatccggattatgacgaagcgctagacaggctgttaagccagtggatgcgcaacgtttccggcttgcctgctgggatggttcgcccgcgctggcagaaagatcagccgccactgctgccagttgaaacgaactggtgcgcgtttggcatcatcgaatggcccattgataacagccccgcattcactcaacagaccgataccggaacacagctctggcggcatgaggattttgtcgctatggcgtcgttctacggcccgggggggatgcaaattgcttcgcgattccgtgacggaatatcggttgagcaaaacaacgccgagctgaaccagtcggatctctcgctcgttgactatggcgatattgtccctttccccgagcttattaaccaacagtgggtacgccgttacgacatgaaagtgcggctgcgccggaaagtggttcgagagtacaacatcctggcgctgcaagatgcgcccgtttcattcttcggagagtaa

SEQ ID NO: 375639 - DNA, 264 bp, Salmonella enterica
atggatactgtcttttttttagaaaaaaccattttaattaacgatgatagcgatacatctggggtgttccgatatgagatatataaaacagaatttgaaggactagtccttgcgatagcatattctgagaaaaccgttatggcagaaggttcggaagtaacattttgggcgaaggcaggtgaaaccaccttgactaatcgtcgagatatttatggtgcaattgaggcctgtaaagctcattacagacaaaactataaaaagtaa

SEQ ID NO: 375640 - DNA, 486 bp, Salmonella enterica
atgaatctgttacctgtattacttaaaaaatactggttgcaactctcagtgactttgctgattgctgcacttgcatgggcaacagagcattaccgcaataacgctatcacttacaagtaccagcgtgatactgctactcacaacctgaagctggcgaacgagacaattaccgacatgacgcagcgccagcgcgacgttgccgccattgatgaaaaatacacgaaggaactcgccgatgcaaaagctgaaaatgatgctttgcgcgatgacgttgccgctggccgccgtcgcctgttcgtcaacgccacctgtcccgcaatgccgacaggtaaatccacctacgccgcccgcgtggataatgcagcccgccccagactggcagactccgctcaacgggattatttcaccctcaaagagcgagtgacaacaatgcaaaagcaactggaaggggcgcaggactatatcaggacgcaatgcctgaagtga

SEQ ID NO: 375641 - DNA, 627 bp, Salmonella enterica
atgaacgagtctcaatttcagcaggcggctggtatcagcgccgaactggccgcgcgctggtatccacatattacggcggcaatgagcgaattcggtattactgctccactggatcaggccatgttcattgctcaggcgggacatgaaagcgctggttttacaaggctggtggagagcttcaactacagtatcgccgggctgaccggattcatccgcgccgggagaatcactccagatcaggccagtactcttgggcgaaaagcctgtgagaaggcgcttccgctcgagcgacagcgtgcaatagctaatctggtatacagcaagcgaatgggtaacaacgggcctggcgacggctggaactaccgcgggcgtggacttatccagatcacaggtctgaacaactaccgtgattgcggtaacgggatcaaaactgagctcgttgcccatccggatctactggcacaggatacgtatgctgcccgtagtgcagcgtggttcttcgcgactaaagggtgtctgaaatattccggcgacatggtacgcgttacacagataatcaacggagggcagaacggcatcggagatcggcgagagcgctttgaaaaagcaaaatcggtgctggtatga

SEQ ID NO: 375642 - DNA, 348 bp, Salmonella enterica
atgaaaatgcacaacgatccccattcctggcagggctggctggagctgttccagagctggtggcgaggagatacgccgctgggcgctgttctgatgtcgttatttatggccggtctgcgcattgcctattttggcggtaacggtggctggaagaaaaaaacactcgaaattctgctatgtggtgccctgacgttgaccttctcatctgcgctggaatatttcggctggcccaagtccctgtctgttgcgattggtggcggcgtcggccttatcggcgtggatgcgatccgcggctttgcaatgaagtttatcagtggtcgtatcggtggggataataacaaggtttaa

SEQ ID NO: 375643 - DNA, 690 bp, Salmonella enterica
atgaacgctctatacctccagtatgtacgtgaacagctaatggtagcgacagccgatttaagcggggagactaaagggcagcttttggcctggctggagaacgcgcaattcgacacgaaaaactatccccgaaaaaaacagcgtatctgggacgaggaaacagaaagctggataacgttaaataacccgccaatccccggcaagcagtcgctggcgaaaggaagcgctatcccgctggtgaagcctgtggaatattccactgcctcatggcgccgggcggttctttcactcgatgaacactacaaggcgtggttgttgtggaattacagtgagaatacctgctgggaacaccagatcgagataacacagtgggcctgggagcaattcagccagcaactggagggtaagcgggtagctaaaaagactattgaccgcctgcgccagcttatctggcttgcagcgcaggatgttaaagctgatctggctggtaaagatacatacgaattccaagcactggcagaacttgcaggcgtggctaaatcaacctggacggagatatacctaccacactggcttgtaatgcgtagctgttttattaagctcgacagtagtgcattgattgcggtaacacgatcacgttcacaacaaaaggcgactaattatgtacaaagtcttgcaaaaccgaactga

SEQ ID NO: 375644 - DNA, 141 bp, Salmonella enterica
atgaaaccagaactgatcgagatactccgcatgcgctggcagcgcctccgtatttaccgccgtccggggtcggtgttggttgactaccgcatcctgcgcaattttgttcgtatttatcagttcacaggatttactcaatga

SEQ ID NO: 375645 - DNA, 186 bp, Salmonella enterica
atgctttttcagcgcatcactggccgcctggtcgttcagtgtgcctttcgggcgcagatccgtgatatttccggcagcatcaatactcgccaccgcaaagacataatgctgcacaccgcccagcacataatcggcaagatctgcagcaacggtaattttgctctgtacttcccattcactcgttaa

SEQ ID NO: 375646 - DNA, 594 bp, Salmonella enterica
atgactgagttttcgaagttgcttgccggtctgaaattgccgtcgtggatgaacaaaggcgaccccgccaggctgctgcgggcctgcgtgaatttctggtcgcaggtgtacgggtggataacctggccgttaaagcagtttgatccgctggtctgccccgaaccgctgttaaacctgattgcatgggaacgcgacatcgttcggttcaagggggagccgctcgacgtcttccgcaagcgtgtgaattacgcattcatcaatgcgcagcaggccggagaggtggcgggctttattgccatttttgagcgactggggattggttacgttgaattactggaacgacaggacggactcgactgggacgtgattgtcgttcgtgtgacaaacagccagattgcggaaaatggcgatctcctgttggaaatcatccgcaaatacgggcgcacatgccgccgttaccagtttgaagtgatcaccgccctgtcgctgaatatcaatattggctggtatcagggggaatatatttgctggcctgccaccctgggcgatgtgaataaccagtccgaagcaacgtacagcgcaagattgaagtag

SEQ ID NO: 375647 - DNA, 1185 bp, Salmonella enterica
atgactgagaaacccgatgttgattttgaaaaggtactgaatgacagcgggatgcctgcgacagaggccgaaattacggcggcgtttaaagctaccgtgcaggcggaagggtttgtcacaaacacgtcgagaatgtcacctttctggcggctgatttcgaagattgtcaccacgccagtgttatggctgcgtgcggcgctgatcgatgtggtcctgcgcaatatgtttgttgccacggccaccggtccaatgctgcgcctgctggcctgggcggtacatattgtgcctaaaccggccagcgctgccgctggcgtgctgcggttctacaagctgaacgcggcggatgtggtcgtcgtgcctgccggaacactggtgcaaaccgagcgtattaacggcgtggtttacgtgctggccgtgaatgaagacgtgacgctgcctgccggggttgaaagcgggctggttcccgtcacggcgaccggcaccggcagcggctataaccttgcgcctggctattaccggatcttacctgttgcggtggccgggatcgccagcgcggtcaatgaggacgaatggctgattacgccaggggctaacgaagaaagcgacgacgagctgcgcgaccgcacccgcaaccagtttaatctggtaggtaattaccattctgacgctatctaccgcagcatgattgccagtgttctgggcctgagcgttgatcgcatttactttttgcacgatgccccgcgtgggccaggtacggcaaatgcttacctgttgctggacagcggcgaaatatcacagccctttattgatgcggttaacgactatgtgaatacccagggccaccacggccacggcgatgatctgcagtgttatgccatgccggaaaccagccacaccctggcggttacggtctacgtcaaaagcgtggaaaacatggaagcggaagacctgagcgcgttaaaaaccggtattaccgacctgattcgttgcgcgtttcgcgagaacgccaattacgacgttaaaaagacgcagccctattcgcgctattccttttcgaatctgggccgcgagatccacaaggcttttccggttgtcgattcactgcatttttcactgacagatattgtcagcgaactgtcggttccgcgcctgtcagggttaacggtggagattgaaaatgactga

SEQ ID NO: 375648 - DNA, 336 bp, Salmonella enterica
atgagtaccgaaccgttatacatcgaccttttgatcactgacggcgatttcacgctggacagcggcaacgagccgcgccgttgcgataaccgcgacagcatcacccaggacattattcacagcattctggaaagcggtatcaccacccgcctgatcggtgaacgtagcccgacaatgcgcggggacgtgctgacgcagttgtccttactggtggaaagcgacgaacgtctggtccctggaaccatagtgatcaccgaagaaaccctttcgcggttgtatgtcacggcggaaacctacgatttcggccctgtcagtacagaggttaactatgactga

SEQ ID NO: 375649 - DNA, 2115 bp, Salmonella enterica
atgagccacctggattttaccctaagcctgatcgataagctgacgcggccattaaagacggcccagtcttcgttgtccggctttgctgaaaaatcgcaggcgtcttttacaaaaatcgggatcggtgcggcggctgtctggggcgtggcgcagtccatcgcgggcgtggtgggtccggcgtatgagatgaacgccgcacttgcagaagtgggttccaaaggcgtggcagaggatgcgctgaaacgtctgtccggcgaagccatgcgattcagtatgcgctacggcaaaggggccgttgatgtggtccggtcaagttacgcgatgaaaggcgcaatggcgggcctgtccgatatggacctgccccgcgtcaccatcgcggccaataccctggcggcaggcgtcaaggccagcggcgaagaggcgggcgaatatatcggcgcgatggcgtcacgtttcaacgcggagttgtccagtctgggccatgtgcgttttgctgaagaactggcaggaaaaacggcgtacatggtgcaaaacttcggcgtgaaaatgcagaccatgcaggagcttatcgaggggacgaaaagcgccggtgctgactttggcgtcagcctggatgaacagttcgccgtcctgggtacgctttcgcgcacgctgggtactgaggccagcgggatctacgagcagtttttacgcagcgccccggctgccgctgaaaagctgggtatgagctttgtcgatgccaccggcaaaatgctgccgatgggcgacattctgcaaaaactccagagcaaatacggccagagcattgaagggaacgtcaaggcacagcaggcgctggacgccgcgttcggtggcggtgctgacgttatcaaaaagctttacggccagcagaataaattaaatcgcagcatcaccgagctgggccgaaatgacgggatgaaacgcgcccaggaaatggccgaacgaatggccgagccgtgggagcgtatcaaagcgacattctttgccattcgcgcggcgattggcaacacgctgatccctatcctgtcgccgctgatgaaccgtattgccgacgtggggacaaaatttgctcgctggctggatatgttcccgaatattgcccgctggctgggttacatcaccctgggcgtgttgtccttcgggctggccggggcagcggtaaatatcgtgatgggggtctttggcttcaccatgatggggctggccgcaattgctaaggtgctgggtggcgcatggaaactcctgttatggacgctcaacctgttgcgtccgtccctgctgacaacgcgcattggcctggctgcattgtggatccagtcaaaattgctggcgctgtggacgggtgtctgccgcatcgcgcttgctgcatggaatatcgcgttaaaggccggggctattgccatgcgggtttacggtgcggcgaccatgtttgccggagcggcaatgcaatttctgatgagtccgatcaccctgattattgccgcgctggcgcttctggccgtgggggtctggtacgtcgtcacccactgggaagaactggcggcagcagtcatgaatacggcggcttttgcctgggtgatgtcagtcgctgaacaggtgggccaggtgtttgcgcgggtctggcagtccatcactgacggctgggccgtggtggttgatttctttgccggtctttccccgcttgccacctttgaaggattcgcacaaaccatcggcggggtattcagcaaactttttgacgtcctcaaaagtacctttgcgtctacctataactggattgttgagaagttaaacaagatccccggcgtcaatatcgacctgaaaaccgtttcaccaccggcagcggctgccgttccggcaaacgcggtcattcctgacagtgctgcaggttcgtcgaagctgaacagcccgtccgtgctgacggggaaccgaattaatgcagacattccacgcggcggcctgatgagtcaggttaaaaccgacagcaaaaccgccgttgataaccgtaaatcgtggggcgatacctacatcaacgcccccaatggaatcaccccggcccagctggctgaatggcaggagcttaacgcaggatga

SEQ ID NO: 375650 - DNA, 270 bp, Salmonella enterica
atgagtaaaccgaaaaaaatcgccatgaccgtggcgggcgtaaatctgagctttgagccgaataaaaccgcgtttaacaacctgcttaacgaaatgaccatgaccaataaggttgcccctatggtgacgtatctgggccgcattgttgatgccgagtgtaaagagtcgctcaacaagctgatggaagattatccgggttgcgaaatgcagatcgtcgagaaggttaacgagatttactccccaaaacttgagatcgaagtaaaaaactga

SEQ ID NO: 375651 - DNA, 297 bp, Salmonella enterica
atgaaattcacacggaacgggttatccgcacggaaaccattaagccggtttttagcaacgtttgcgcttctgatgattacgtccggttgttcaacgaaagtgcagatcaagccgaacgaaaattatcaggaaaaccagctgacactttgcccggtcacgctgccacgtctggccggaccgaccggaaatgactttgacgcggcgctgaaagcctaccggctgatgtataccgactgcgccgcccgacataacgccctggtgggcaacattcgacaacgtaaggaattagcacaatga

SEQ ID NO: 375652 - DNA, 339 bp, Salmonella enterica
atgaaactgagtgaaaaacagcaacttttcacggtgatgatcgccaacctgattcattttgccgaagaaaagggctatcgcctgacgtttggcgaagcgtaccgcacgccggaacaggccgcgcttaacgcaaaaaaagggagcggcattgctaacagcctgcatacccagcgcctggcagtggattttaacctgtttgttaatggtgaataccagaccgacagcgccgcatatcgccccctgggcgaatactgggaatccatcggcggatcgtggggtggccggttcagtaagccggacggcaaccatttcagtcttgagcataacggggttcgctga

SEQ ID NO: 375653 - DNA, 312 bp, Salmonella enterica
atgatgaacggagaaacgtcactgcttgaaaagctgttgcttatcggggccgtgatcggtctggggcaactaatggtcagcaatgagcgaattacaacccgtctgctggtcgggcggatgattctgggatctgcggtcgcaccgctggccgcaatcccgctgctgaaattccccgatatgccggaactggtcgtcattgggctggcctgcgccctgggcattctgggaagtgcgtttattgaggcggggttaaagcgctgcctggacatgtatatcaagcgatgggggagcaagcgcaatgaaactgagtga

SEQ ID NO: 375654 - DNA, 456 bp, Salmonella enterica
atgactgaacgtattagcggtggatcattcgatgtgaactacgacggcatcatgattcacgtcgaaaacgccaccgtcaccattacggacaacagcgcggtagcacaaacccgcggcgtcccgaacggccacacgaaagggtcagtttcggcggatgtggaagtcgaagtcgattcccagaactttaaaaagtttaccgccgtggcccgttcgtcaggttcctggcgagccattccggcaaaggactttttgttctacgccaacgccggggacgacgaagaaaaaatcgaggtgtttggctgcgttcctacgctgtctgacatcgtcaacatcaaccccaacgaggccagcaaaaccacgaagaaaattaaattcatggtgacaagcccggactttgtcgcgattgacggcgtgccgtacctgtcagcccgtgacactcgcgatctgaaaggctga

SEQ ID NO: 375655 - DNA, 1143 bp, Salmonella enterica
atgacctggcctacagtcaacgtcagtcagaaaaaccgctacaacggcacaacgaacgacgtcgagcgcgtcatcctctttgtgggttacggcgacactaacatcgggaaaacccagtcgctgaataccgacagcgatctggataaagccctgggcgacaaagacagcctgttaaaaagcattgtggccgctgcggccaataacgccggtcagaactggtttgcttatgtgcacgtactggggcaaccggacacggaagccgagggctataaaccagacgacgactggatgaacgcggtcaaacaggcccagagcgtggcatccgtggaagggatccttctggcttttgataccaccgacaaggccaccatcaaccgtgcaacggaaatgcgcgtcaccttacaggccagtttcgggcgttttatctggtttgcccttgctgtgggtgggccggaaaaggacgaagcgtggagcgactatgtgacgcgcctggctgaaatccaggatggtattgcatcgcctggggtgcaactggtcccgcgtctgtggggtaacgaacccggcgtcctggtcggtcgcttgtgtaaccgttcggtgacggtggcagacagccccgcccgcgtcgcaaccggcgcagtcaccgcgctggggcgcgacaaactgccggttgacgggacgggggccgaaattgatctggccgtgttgcagtctttgcaggcaaaccgttacagcgtgccgatgtggtatcacgattttgacggcatctactgggctgacggtcgcaccctggacgttgaaggcggtgattatcaggtgattgaaaacgtgcgcgtggttgataaagcctcccgccgcgtccgtctgcgtgcaatccccaaaattgccgatcgttcactgaacagcacaccgggcagcatcgccgcgcatgaaacctatttcggcaagccgctgcgcgaaatggcgattgcaacccagatcaatggcgtcgaatttccgggcgaagtgaaaccaccaaaggacggcgatatcaccatcacctggaccagtaacgaagcggtacagatttaccttgtggttcgaccgtatgagagcgcgaaagaaatcggcgtcagcatcgaactggacacctcactggagagctaa

SEQ ID NO: 375656 - DNA, 696 bp, Salmonella enterica
gtgatccgtggggagctgaaccagcatcagctaaagcagatgcgggaaacgctggcaaaagctgaccttcccccgcgtaagcgccagcgccttttatggcgtattgcaaagctgggcattgtcgcagcggcaaaacgtcaccagcgccagcaggcggccccggacggtacgccgtgggagccgcgcaagcgtggcaaagggaagatgttaaaagggctgcccaggctgttggccgtgcgcgaaatgccggagattcagggggtaagaatttacctcaagggcgggaactaccggaacgggacgaagcctatcgcggcgggtctggtcggcgcggtccagcaggacggcgcacggatccagatgaaagccagtaacgccccgcgtaagccgcaggctgacaagccagcgctaccgcgacaggccaagcgtctgcgggcgctgggttacaaaacccgcaagggcaagcgctgggttaagccgtccagcaagcaaatcatggaaaccatgagcatggcccaggcgggattactgattcgaaaactgaaaggcacaccctcaaaacgcacatggaccattgatattcctgggcgcgtttttctgggggtgagcaacgacgaatttaaccaaattattgcgcggcaaatgcaggcaatcggcttcggctgggacgtcaccgcgcagcaaatcagggggtaa

SEQ ID NO: 375657 - DNA, 477 bp, Salmonella enterica
atgagccagcttgaaagcctgacggcgtttattacggcaaatctgccgcctgatgccatgcagatgttttccagttcaatggaggattgcgagctgatacgcaacgccaaagcgctggggaacaaccagcgccggatcggagtgctgacttacaccgcccgtttgtcgtgggatgacttcccctaccgcaaatattcgccggggctgatttatgccctggtgctggcctgggtggatgagttcgccaacgagctgcgcgacgagctgaaattagccgatcccaccgtggacccggagttcgacgacgaagggtcatgcattctggatgtggttgtcccgctggttgatccgctggtcctgcgtgaagtggaaaaagggccgatccccttcaagggtaagaaatgggacatcgtaaaccccgaaatctgggaggcgtcgcaactggaatttattgtccagcgtggtgacgcgtcgtga

SEQ ID NO: 375658 - DNA, 474 bp, Salmonella enterica
atgagtggcccaagtttcagtatcagcggcaagccagtgacggtgacgccaacagcgatcaccaacggcgtgacgttctggcccgatctcgatctggccgagtttcagaaggtgcgcacgctgcccgctgatctgccgccagaaaccgcaggcgtggccctgctggctgctattgcggaggtaaacgacgcgctggccgacgtggtgacgtactggaacgcgaaagcctgcgaacgggccgcagatgtaccgggtgcaaagatgggcgacgaaacccagttaacagcccagtacaaaaaagcggtctacgcccgcgcaaaggccgatttactgggggaattcgccaccatcgggcggcgtgaatcgcatccggggcaggaaagccaggacacccgcgccagcctgctggccgaggcggccaatgtgatgcgaaacatgctgcgacaaccacgcgtgggggtgcatctgatatga

SEQ ID NO: 375659 - DNA, 702 bp, Salmonella enterica
atggccatgaccccgtgtcagcgacaccgagcacgcgtgaaagccacaaaggcgctggataagtgcgaagccctgacggcatcgccggtcagctttcacattcaaatgctggagctggaaagggatgttgaacggcttcgcagtctgacgcgtgcagaacgcatggacatgaagcgcgacgttcttttgccgcgctggatgccgaccgtcgaggcatatctcgccggtgatgcccgctttgccaatccggccctggtttactgcgtgatctggttgttcgatacgggggaaatgggcaaggcgctggactgggctgacgtggctatcagtgagagccaggccacgccggaaaacttcaaaagcaacctgcctgcctttgtggccgacacggtgctggagtgggcgatcatgcaggcggaagccggtcacagcatcgaaccctatttcagccgcacgtttgaaaacatccgcaaaaagtggcgtttgcacgaagacattaacgcgaagtggttcaagttcgccggtctttacctgctgcgcgacgagaaggggcagccgcgtgccactgccgtggatgatgtgaacacgctggagcaggccgacgccctgctggcccaggcggcggcgtacaacaaaaacgccggagttaagaccatgcgcgaaaaaatccgcgcccggattaacggcctgacccagctttaa

SEQ ID NO: 375660 - DNA, 1023 bp, Salmonella enterica
atgcaattaaccccaaaagcagagcagatgctgcgtaagtttgccgcaggcctggcgaaagctaacggccaggtggacacgtcgcgctacttctcgctgacaaatccgaaagaaacccagctacgcaatgccctgctgcaaagttctgagttcctgcgcctgctgcccaatgtgctggatgtggaccagatcaccggtcaggtggtcagcaccggtaaaccgggtatttacaccgggcgtaaaaaagatggtcgtttctcccgcgccctgggcgtgtccggtaacgagtacaagctggtagaaacggattccggttcgtatctgccttactccctgctggttgtctgggcgaacgcgggcagcgaagaggagttcttccagcgtattcaggcattcagcaacgaatctttcgcgctggatatgctgcgcgtggcgttcaacggtacgagtgttgcagaagatacagacccggaagccaacccgaatggcgaagacgtcaacatcggctggcacaaaatcgttaaagaccgttcatctgagcagattatttctgatgccgtcactatcggcgcgtcgggtgctgactttattggtctggatgcggcagtcactgacctggtgcacacctgcatttatgagccattccgcaatgacccgcgcctggttgtgctggcttccgctgaccttatcggcaacgacgccaccaccatgatgaataagattgatcgcccgactgagaaagtcgccgcgcagcttattggccgccagattgctggccgtaccgtgtacaccccgccgtttatgccggagggccgccttatcgtcaccacgctggacaacctgcatatctacacccagcaggggacacgtaagcgtaaagcggaatggaacgacgaccgcaagcgcttcgagaataactatctgcgcatggaaggttacggcgtcgagcatgacgagctgtatgcagcgttcgacaaaatcacccttgcgaccggcgaagttgcaccgggagggggcgcgtaa

SEQ ID NO: 375661 - DNA, 1062 bp, Salmonella enterica
atgccgcaatctcattaccgcacggattggttatgtattgccacatctggacaggctgtggacggtcgcaccattgaaccgcaatggttgattgatgcggcagaaacctacacccgcaaaacctataccgccatgatttggccgcaccacccgcaatacgatatcagcgagcgtgagtttacctgcaatctgggggaagtggacgcgctgaaagtggaaacggaaggtgatgttacgaagttatatgcccagttaattccgaatcaatttttaattgaagccaatcggcaggggcaaaagttatttacgtcagcagaatttgtcactgattttgcaggtagtggtcgtgaatatctttttgggcttgctgtgacggatattccggcaagtctgggaacggaaaaacttaaatttgttttagccggtgaagaaaaagacgccgagcgcgggagtctggaaacattcagcttagggaaattacagacaagtaaaccagataaaaaagattctttctggtcgcgtttattttcggccagtaaagattttacgccaacgccagagccaaacactgataagcccaccgagggcgacggagaaaaaatggaagaattaaaagcgctcattcagcaaatgctggatctgcttaaaagcggtaaagacgccgcaacgggtgatgctgacacggttgatacccctgaacaggccgctgatgtggtggcagatgttgccgcccagatcgctgatgctgccgacgaggtggccgagctggcgcaggacgttatcgaaaacccggaagacgaagtcaaagcggaagaattcagcgccgccaaagccaacctggcaaaagtcatgaagtcattcaatgtgacgccagcgaagcgcccacgcgccagccgtcgccgtgacttttccgcccgtcgccagccaactggcaaccagatggacaaccttaccacgcagctgactaccgtcctgactaagttgtcagcgatggaaaacggcaatacgcgccgccctggcagtgcgccaggcggaagcaaagaaccgtttgagtttgtttaa

SEQ ID NO: 375662 - DNA, 1812 bp, Salmonella enterica
atggctaaatattccgatgaattaaaagaagcggcccgcacgctttatataaaaagctggacgccgaaagatattgcacaggaactgaatattccaccgcgtacaatttaccactgggctgacgtcgggaagtgggcatcactgctacctgttgaatcggtggaaaatgtcatcgcccgccgtatcgaccagctctcccgccgcgagaaaaaaacagcactggaactggaagaactgcgcgatctgattgctcaccatgtgaaactcatggcacagcgcaacaagcacgccgaaaagctggcagaaattcaggcccagaaagcggcttatgatggtgaaggatactgcctcagcagcgcaggcggggaaccaggggaaagaaagcgccggtataagaaaaacgacgtttccggtattacagcggaaatgctcgacacctgggcgcgggaacatctcttcgagtaccagctgcactgccgcgaacataaaggcgaagactggcgcttcattctgaaaagccgccaggtgggtatgacttattatttcgcctgggaagcattcgaagacgccgtcattaccggtgataaccaggtctttttctctgcaagccgatcccagtcggaaatcttccgcgaatacatcgtccagatcgcccagaaccatttcggcgtgacgcttacaggtaaaaatatccgcctcagtaacggcgcaatactgcgctttttgtccacgaacgccagcactgcgcagggctttaacggccacctgtatggcgatgaggttttctggatcccgaaattcacgcgcctgcatgaagttgccagcgcaatggcaacgcataacaaataccgcacgacctacttttcgacgcccagcgcgaaaacgcatcaggcttacccggtctggactggcgaagcctggcgcggggacgacccgaaacgcaaaggtgtgaagttcccgaacgaaagcgaaatgcgccagggcattctttgcccggaccagatctggcgctacatcatcacgatggaagacgctatcgaaggcggcctcggggcgcttgtcgatattgaacggctgcgcaacaaatacagcccgaccgcgttcgccatgctctacatgtgccagtttgttgacagtaaagacgcggttttcaagttctccgcgcttgttggctgtgaagtggacagggccacatggggcgactttgatctgaccgctgcgcggcccttcggcaatcgcgaagtatgggcaggttttgacccgtcgcgctccggcgacaactcaacatttgtgttaatcgcgccccctgtagaggacggcgagcgcttccgcgtgctggccgtctggcaatggcagggttttaacttcagctggcaggccgaccagataaagcagcttatgcgccgctttaacatcacttacatcgggatcgatacaaccggcataggtaaaggcgtttatgaccttgtcagcaaatttgcgccacgcgaagccacaccaattctttacagcgtcgaaagcaaaaaccgcctggtgatgaagatgatcgatgttgtcgagcgtaagcgcatcgaatgggcaaaagacgccgtagacgaaacgaacaaagagcgcgtcgaaattccggccagctttatggctatccggcgcacgacaaccaacagcggcaacgcgctgacgtttgttgccgaacgttcagacgcgaccggccatgcagatgttttcttcgctatctcgcacgccgtaattaacgaacctatcgatcacgaatatgaccgcccatcgggctggtactttgggaaagcagcatga

SEQ ID NO: 375663 - DNA, 1062 bp, Salmonella enterica
atgacaaagaaacagcgtaataataaaaaattcaggtccatgaccggcaacaagattgaaaccttcacgccagggcgcggaagcgtaatcacctttggcgaaccagaacccatcctgacgaccggcacggattatcacaatatctggtatgacaatgagtatgaccactggcgactcccgattgatcggctggcgctggcccagttgccgaaccttaacggccagcacggcggggtactgtatgcgcggcgcaatatggtggccggtggctatatcggcggcggcctgacgcctgaccaagtcgaacaggctgtctttgattacctgctgtttggtgacgtcgctatcctgaaaattcgtaacgtattcggggaagtgatagatctgctgccgctgccgtcgctgtatctgcgctgccggaaagacggctcgtttgctgttctgcaggaagggccagcgcttatctatgacccggaagacatcgtcttttttaaaatgtacgacccgcgccagcaggtgtatggactgcctgactatatcggcggcatccattcggtgttactcaacagtgaggcaaccatcttccggcgccgttactacaataatggggcacacatgggctttattctctataccagcgatccgaatctgacgctggaaatggaaaacgaaatcaaagagaagatcgcccagtccaaagggctgggtaacttccgcaatatgtttattaacatcccgaagggcgacccggaaggggttaaaatcatgccagtgggcgaagtcagcgcaaaggatgaattcgccaacatcaaagggatcaccgcgcaggatatctttaccgcccaccgtttccccgcaggtctggcgggtattatcccgaccaacggcgcgataatgggcaatcctgaaacggcccgcgcaacctatcgcaaggatgaagttatcccgttgcagcgcaagctaatgaacggcgtcaacaatgacccagagatccccccacatttgcacctgcattttgatatagatatcccggcaatcaccgccgaaaagggcgaaaaatga

SEQ ID NO: 375664 - DNA, 327 bp, Salmonella enterica
atgagcgcaattaagttaaaatcatccccattgttagcaatggcgtgcgggatggtgaacatgcgagtttttaaaattaaatgtcctgaatgcggctcaccggccatcattcgcaaatcagactggaaagataaaaagctggccgatttatactgcgcctgcacggaagttgaatgcggccacaccttcgtttttaacgcccagttttcacataccctcagccccagcgggctgaccggcaacaagctggttaaatttctgattgaccggctcaagccagacgaaagacaattcgctttagatttgctaaacaaccatattaattaa

SEQ ID NO: 375665 - DNA, 1836 bp, Salmonella enterica
atgagcaattcaaaatatattgatttagattcgaggataaaaaaattaaaagaagttgttaaagatttagatacaaacactttagcaacctactccttttgggaaatgtacaagtttggcacattaggtcaaaaaattgaactacaatcacccgctcgacaaatcttatatctttttgggattgcatgtgcgtctgttgaaccaaccgagccaactgataatgttgatggtaagataaaacaaactgtagagatcctaaatgatatttttacaaaatatatgctggcgtactttccaaccaaagatgatttaaaatctggattagaagatgaatggcataaagttagagaagttgctatgccaatgttttccaactatttctttgaaggattaaaagtttccactgaaaacttcaaagagatcataaaaaattacttcgatggtttcgaaaatgaaataaaaacttattttggcttagatcaccatgaaatggtggaaattttaaatctcattggtgagctaattcagagcaaatatgatagataccgtgaaatcatggatacattaaaaaatgaacatgagcggtttaaagaaaataattttgaaaaagttgaagattttaaatcatacatggatgacctgagggagcgtacaaagcatttagcacaagaatattatgacttctaccatgggagtgtatcattcagatttgattcaataagatataaacttggtgacgatatcgtggatagttttataaaaactttcgttactgagcgtggaaattcacctgaaattaaatacattactgatgagaatccattttcatataaaccgatagtaactgtaaataatctggattatatgctcccttctgctaacgcagcttatgaagctatcatacttaatcttgaaaagttttttaaagagtcaaaatacaatgataaatttagaaaagccagagacaacaggctagaacatgaaactttttgcacctttagagatttcttccctgaatcaactacaatacttgagagtgtatttgaaacaaacaaatctcataatgaacatgatctaattattttccataataaaaccatacttattgtagaggcgaaagcatcaccacgccgcgctccattgagagaaccagccagagcatacattagaattagagatgatttcaaacggaaatcaggaatacaaagtgcatctgagcaagcaaataacttaagaaatttaataattaataatgaaaaaacaccattatatgataaaaaaggtaatttattatataccataaatcgttgtgactatgacaatatatattgtatatgtgtcactaaagatgatttcggaatgcttgctacaaatttaactttaatgttagaaaaaaaagaagatgaaccttacccttgggttatttgtattcaagacctgaaattttattttgattgccttaaggaaatagatttggatcatgactatttcttaaattacattcatgaaagaataaaaatacacggcaaagcaacagcatgtgatgaacttgaatatgcaggagcgtacttaaattatggtggtttcgatttcattaataaagaagtaaactctaacgtttttcttgatatatctgaatcacgagtattcgatgaaatccatctcgaaaagatacatggtaggaaatatgttcaccagattaaaaaacctacttacagcattttaaatagagataagttattttcttctttaaatactaagcactcaaggaaagatgcaaaaaaaataaaagctaaaagaaaggaacagaaaaaatccagaaaaagaaaccgttaa

SEQ ID NO: 375666 - DNA, 2637 bp, Salmonella enterica
atgtctgacgccgcttttgcatggccctggaacgcgccgcgcccagccgttggtctgtacacctacgaaccgaaaaaaatcgccccgcttgccggggcggtggtgcatcatcctgccgtaaaaaaacacatcgatcacatcttcaaacgcgccggttacaaccccgacgacgttcgcgaccgtgacgcgctgatccagtcgctggacaggtacgaaccgtgcggcctgccactggccgcccaacaaaatatcatccggcaggaaagtgcagccgccaaagcagcggcggctacctgggccaatacgccggaaggtgtcgaagcgcgtttgttgtctgagccgttcttcattcgcgaagtctggcgcaaaaaaattgaatggttacgggccaaccgtgaaaccagacacaccaatgattttcttatggggaccgtgaaaaaatcattgctgcgtcttgatgttgtgcgcacaaggcaaggcgtttcgcctgatatcaccggcgaactggccgcgtactggttcgggcgctggcaacggctggctgatttcacaaagcgggaagccctaagcgccgctaatgagatcgccagccgcatggctgaaatgctggggacggaatgcgaagccctgggacggaatgtttcagacatgaacgtcgaagaactggactggctttattgccacctgggccgcgaaatgctggcgcttcgcattgtgccgcctgcatggtatgcgccgtgggaacgcgagcgcatatgcacggccattttgcgtatggcttcgcctgactggtgggggcgcaaaatctggcgcctgcgttgtgactggcgcgaaaaccagctgcgtgctgttggtgcggtaaataaaaaagcgcatccgtatatcagcgcatcaagcctgatggaatggcaggaacagcgacgtaaaaaccgtaatttcttcaaaagtcatgaactggtagacgaagacggcaacgtttcgtcgcttgaggacatgattaacaaatccacgtctaaccctgcaattcgtcgtcatgagcttatggcccgtatggctggcgtggagcttgtcgcccagagtcgtggcgatgttggcatcttcctgaccatcacttgcccgtcgaaatatcacggcaatattgcgtccggccaccataacgcaaaatggaactacgacacggttgcacaggcgcaacgctatttatgccgtgtatggaaccgggcaaccgccaaactgaaacgcgaagatttgcgcccttatggcttccgcgtcgccgagccgcatcacgatgggacaccacactggcacgcgttgctatttatgccacaagagcaggttaaagccacggttgcgatccttcgcgcctactttatcgcggaagaccgcgacgagctgggccgtaataccggtgctcgtttcaagtcaaaaaaaatggacccacggaaagggtcagcaacggcgtatatcgccaaatacatttcgaagaatatcgacggccacgcgctggccggtgaactggacgacgaaagcggcaagccgctgaatgaaacagccaaatatgcaatggcctgggcgtcacttcaccgcatccgccagtttcagccaatcggacagccgcccatatcggtttaccgcgagctgcgcaaactgagcaatcagatcacgacccgccagaaaattgacaataccttcaagcgcggtgcgccgttgcttgtggatcctgcaatggatgcggtttgcgccgctgccgatgtcggatgctttgctacctacatcatccgccagggtggtgttttgatcccgcgtgaaaactatgtcgtccgtctggcctatcagccagctgatgaaatgaatgcttattgtgagatccccgaaaaggtttttggggtctggtcgccgcgtctgggtgatgcctcccgtatttgcacccgtctggttaagtggaaaatccgcgccaaatctaaagccgccaccggggccaaaaacggccccggtttgggggttgaccttttgccgtcgccaaccggcgacgcttggagttctgtcaataactctacggaagacgaaaaaatcaccgatttttcactgtcagaaatggctgtgccagctgatggagagttaaagacagaagattcagacgataaaatcgtcgattttgaaaatatggaccagccaacgcggcgcaaattgatgcggcgactacgtgaaacaccattcaaaaggcggcaaagcggatcaccttatgagccagggagcgaattagatgttgcctggcgttctgccgttgaaaaaaccgaggccagatcggcggctgataaagccaggcgggcagcgcttgcccctgcggttgccagtctgctggctgatgcggagttgtgttcggttgagatttcggagattcaggccgtttcgctgttaatggggagccgtctggagattggcggcaaagtttatcgggccagtgctggcggccagttgataacgcgtcaattacccgatgagtcacggacggtgaataaattatgggaccgtctgcgggataaccacggcattgatgccacgcgcctgcggtttgatccggtcggagagtatcaaaaaatgctggcgggtgtggaaagaagtcactcaaaaaaatga

SEQ ID NO: 375667 - DNA, 1005 bp, Salmonella enterica
atgattcgatctctcgttaaatggcccggtggtaaaggccgcgttatgtctgatttgctgccgattctgccgaaagccgattgtctggtggaaccgtttgtcggtggtgcttctgttttcctcaatactgaatatcgccgttatatcttgggtgatatcaacccagatttaattaacctgtatcgccagataacccgctggcctgatgcggtgatcgacgctgctcgcccgctgtttaaagtgtacggcgataaagacggctataagtggatccgcggcgatttcaacgcccgcgcccatgaccttctgtcatcgcgcaatgtgtttgaggatggaccggacacgggcaagattcttcgtgcagcacaatttctttacctgaaccgtcacggatataacggcgtagtacgctacaaccaacagggtggatataacgttccctttgggcgacacaaaaccccgccttacttcccggaagaacagatccgtttattctctgaaaaagctaacgacacgaaagctattttcgtgtgctgcgatttccagagcacgttaaaaatcatgattggtagtgacgcggttatctactgcgatccgccatacctgccagcaagcgacaccgctaatttcacccaataccacaccgccccgtttggcattaaagagcatcgccagttagctgccgccctgctggatattaaccgccttactggttcgccggtgatcttgtccaacagcgacaccccagctacccgcgagatttatcactctttcaacttccaggaaatcagcgttaaccgttctgtcagcgcgaacgccattaccagaggggccgccagtgaagtgataggcgtgctgcctgtctgtgatggctgcggacgctatgaaggtggtcactgtgcgaaatgttgcccaggtatcgccgcatgtgaggagggatggtcgtttgattgtcgaggcaattgcgatatttgcgagccgtccgataacccggaaacgtggtaa

SEQ ID NO: 375668 - DNA, 390 bp, Salmonella enterica
atgttgatggataagacaggacaacagccgggccgccgcaagttcttagagcaacgggcgcggctgcaagccagtttgaacgcttcacgcgtaaatgacactgcaacccgttttaaccgcctggatgatgcctgcaaaaaggtgattttcatcctggcaaacgatgcgtccagatacatagccggaatgccgaaactgaccgccaaacagttgggttgcacttatgaaaatctaactgaaaaggagcaaacgtgccttttgatgggcattaagcgcctttcagaatttgcagcatcaatgccgtgggaatttgaggactacgccgcaccacgcgccgaaattcaggcgatacgcgacaaaccacccgcgccagataacgcagtcaattaa

SEQ ID NO: 375669 - DNA, 222 bp, Salmonella enterica
atggacttaacacaatgcccttcactagccagcctgctcacccacggccagcagatcacccaccgtcagcatcaacgcggctggattgaaaccccggacgggcgtttcttccagcctaaagcggcagatgttcaatttgttaaaaactgccgtttaccgtttatgtcgcgcccgcgtaataagcgccgctggttttcccgcttaatgggcatcttcgcgtag

SEQ ID NO: 375670 - DNA, 276 bp, Salmonella enterica
atgaacaaacaagaaattgctgagttcttcgaagaagcaaaagcctctcgcacaaaacattcagttaatgatcgcctggtagctattgaattcatggtctgttcaattgcagctgcccttgaaggaagcgcgaaagaaacacaccttaaaacgatgaattctttctctgaaaacttcgacccattgaaggatccaacccttaaagcaattgctgacctgaatgttttaagcgctgactttaaaaatctcgctaatcaacttgcagattcgaaataa

SEQ ID NO: 375671 - DNA, 612 bp, Salmonella enterica
atgaaaacacaaagattcttgattgccaccgaaggcacattcgatggacgccaaattagtgcggaagccattcgctctgttttggctaatttcattgcaggcggcatgactcttccggttgtgtatgacttctacgattggagtcctgctttaagtgaagttgtcgccctggccgtcgattctgatggagagaaaatgcacctttatgcagaggtgtttgctaccgaagaacttcaacaaatggccgcgcggcatgtcgattactttctggttcctgccattctcagcattaatgaatgtgacacaaccgcgtgtttagtctctgttggtttaacgaaagatccactaatacccggtctggataaaatgcagttttgttcggctaaccattcctaccgcgttttttctaaacccaaaaatgagggtggtatttgcagtcagcagaaagtaaatgccggaaaaaaaatgcatctggcccgttattaccatcatggcgcacatgccggaaatgttcgttatgagattgagggatggggaatgaacagccccgtaagagaggctgaaattaagcgtcgattacatgagtttatttcgaatctgcaagttgattag

SEQ ID NO: 375672 - DNA, 273 bp, Salmonella enterica
atggaagctaatgattacgtgatccagtacccactggacgcggtgcatacagacaagttcgccgaacttctcggtaaaccaaaaaccgctgtcgaagcgatggcaaaagccaataagctgccattgatcgaattgcgcgacccttcaaaacctgccgctcgcgctggtgataagtgggttttcattcctgagtttaatcgtggtgttcgtgaggcgttttataaccgcccagtagaacagcgcgatgcttggcttttatggatggggttatag

SEQ ID NO: 375673 - DNA, 981 bp, Salmonella enterica
atgtcaattaagaagctcgatgatggtcgctatgaagtggacataagaccgcgcgggcgcgaaggacgtcgcattcgccggaagtttgaaaggaaagctgaggcggtcgcatttgaacgctatacgctggcaaacgcgaaccagaaagaatgggctggacagcgagcagatcgccgcacgctaaaagaactgctggatttatggtggaagtatcacggtcagaatcatgaacacggccaaaaggaatttaatcacctgctcaaaactatcagcgggctgggtgatgttccggttagcaggatgaacaaaagaatgttgatggattaccgttccgcaagacttcgcgaggggatcagcccatcaacaattaaccgggatatgtaccgtttttccggcatgttcacaaagctgattcagctggaagagtttgtcggagcacatccagtacatggattgccgccgctggccgaggctaacccagaaatgaccttcctggagaaagccgaaatagccagcctgctggatgccttaacaggtgatgcccgattaattgcattgttgggggttagcactggcgggaggtggtcagaactagcaacgctaaaaccttcgcagatagcaaactgccgggtcacattccttaaaacgaagaacgggaaaaaacgaacggttcccatttcgtcagaactggaaaagatgatcaggaaggaagccagcgcgaaactgtttaaggtggattatgagaagttttgcaagactctgcggatggtcaaacccgacatcccgccgaaccaggcaacgcatattttgcgccataccttcgccagtcattttatgatgaacggggggaacataattgccttacaacaaatactgggacacgccagcattcaacaaacgatggtctatgcgcatttgtcgccagattatctgcaaaatgctgtcgcactgaatccgcttgcgggtggaacgtcgatttaa

SEQ ID NO: 375674 - DNA, 516 bp, Salmonella enterica
atgaacacattcagaaaaggacttgatttattgctgggcgctatctgttgcctggtgctggcgataatggtgggcgtcgcctgctggcaggtggtgagccgctacattctgggcgttcccagcacccttaccgaagagatgctgcgatttctcctggtgtgggtatcaatgctgggcatggcttttgtcgccggtcagaaacagcatattagcctgactctcttactggataaggtgtcgccgacgattcgcggctggtgggatattatcctgcaggtcatttttatcgcgttttccatttgggtattgattatcggcggcttaaagatttctgcgatttctatgctgcaaatctctcctgcgctgggcattccgatgggaaaaatttattacgcgctcccctgcgcgggcgtactgatcatcctctatgggctgctgaatatcgttgacgccctgaaagctatccattccgccacggataccactgagcacactctggagaaatcacatgattga

SEQ ID NO: 375675 - DNA, 2310 bp, Salmonella enterica
atggatacatgggagtggtacaacaactacagtaaagagttgcgggatgccgggcagggatatattccccagataattgatgacttttctgaaggcgcgctaaatttacaattggaaaagtgtgatgcgctgttgccagaaatgaaagccctgaatcaggtcgccaaaaatccgtggctggagatatttatcgggcactgggagatgcgtcaccgcctgacgaattatagcgaaggcgaaaaggtcctgcctgacgttgtcgccctgtttgaaaaagcgcaccgggaagaagcgaaagattgtccgcaatccatctgcgtcacccaggatttatccgcctgctatgaaaacatagatggccctggctgggcggcagagcgaatggcggtctgcgaagagacgattgcgcgcatcgaccccacctggaactgttttcagtgtttgtccacggaatatgccagcgccctgatggacacccatcggcacgaagaagcgttagcatatttggataaacagattgcggcagtgaaggattcgggagaggaatacgttgaggcattgctctcgacgcgagtcgatatcctgatcgcactgcaacgctatgaagaggcgcgtgagctggttgaacatttgatcgctgaaaatgactactgggggcgcgatcgcatcggttatccgctgaaaaagctgtacatcatggcgctgagcggcgggcaggacgaggaggtctgggaagcgttacccgcctggtcggaccttacgccttactcctgggatctgtggctggatattttgattgtgttgcttccccgttatccggaacgtaaccactggcggctggcgagaatttttcagcatatgctggaacattactctaagatgggggcgcaccgtaaactggtggatttggcgaaaatgcagattaacctggcgctggatcgtgaatccgtctgggtcgcgaagcaggcgtttaaacttgcccagcggcatatgccaaaactgcgcgccctgttgggcgttgaccgggagtatctggaactcagcgagaaaattgccgccaaagaagcagaactgtcggcgcgccccgctatgccacaaactgaaaatacggcggaagacgcagaggccgatccagaaaaagatgttgaagagttccgccgcgcctttatgcagtcacctgaggatgcggagttacttggccgactggtcaatgcgctgaacgcctgttacgcgcgggacgagtcgatcgcgcttttgcgccattatgttgaaaaccatctgcaagaggacaacggccttccttttgatctgctggacctgctgttggcgaaagacgagctggaggagattgaacgactggcccggcagtatgacgcatccgggcaggagcatatggcgctgtggttccgtgcgcgggttctcggctcgcaggaagactgggcgcaactggaagcgacagggcaaaaactgctgcaaactaaaattggcggcgaatggattggcgcttaccggatgtgcgcgtgggcggcgcaaaaacaggaagcctacgacaggcaactggaatatttacagcagctactggcactgctcacacggcgcgaagaagatccccgcaacacccagtgggatatgatggcggcggccagcattttgcagaaatgggatatcgtgcgcaggcttgcggcggagctggagattgaactcaccgaaggcgaaggttttattgatgaaaactgggggctaataaacctgcgtttccgcgaagattacgaataccgatactatttcgctcagcgcattggaccggtgacggcaagagtagtcgaacccacttatcgtactgattacccgcagcatgtcggtgaaatcgtggtctttgacgccgagcggctgaatacgccgccggaagacgaagaagagcggaagaacttcacgcctttgtatgccagcctgaaaacggtgatcccaacagagtacggcgaatcctggttttgcgacggcgtcatgccggaagaagcgcagtacaatgctttccgcgaggctatcagggagctggggtggtattactggagcagtagcccggatgattacaccttaaccgatagccatcagggcgacgatgcggctcccctcccgggattttactttgttatcagcgcgccgcagtcggtaacgaaggcggatatcgataaaacgctgacgcgtttgaccgccgactgggagcatccgctatgctggtggcggctggcgcaggccgcaggcgtaaatgaagagaaacaccgcgccattgctgaacggtacgggatgtaa

SEQ ID NO: 375676 - DNA, 1836 bp, Salmonella enterica
atgagtgcattgcagctatccgacagttctttttctactgaagtcaatttaaatggattaatagaagttctcagtaagcatctttattcaacgcccgttgttgcgataagggagctggtgcagaacgggcacgatgcgattgtccgcagacgaatcgaacagcccgatgccccgcaggataaccacatccgcgttgtggcggatgtggcaaaatcgactataacgatatctgacaccggcgcgggcctgacggaaagcgaaattcatggttttctggcgaccgtcggggtgggctatacccggatgctgcgccagcaggatgatgacacagggttaatcggcatgttcgggctgggctttttgtcggcgtttgtgctggcgaaagatgtcaccgtgctgaccacgtcctggcaaacgccggaccagggctggaaatatcactctattgatgggcagcgctataccgttacgccttctgacgccgtcgcgccgggaacccaggtgatcctgacgctgaaagaagaatacagccatcttgccagtaataatctgcttaatcgcgtactctcaaggtactgcattttgttgcatgagccagtttttgtcggcgatgcgaccgaaccggtaaataaactccagccgccctggcgcgaatcgacgccggaaggcgtgacgatgcaccgtgcgttggtccagcgtaaaaacctcgcgttcgcggcgcagttcgaatcgtccttcgaacctatctgcaccctgccggtggttccgcaggggggcagcgatgccgtgggcattctgtggattcaggacggcgcgacttacggcaccagcgacaaccgtaatctatccctctttttacgcggaatgctgcttgatgacgaagcgcgtgaactcctgccgccgtgggcggggtttattggcggcgtgattgaatcgtcgaaactcacgccgacggcaagccgggaagatttgcagcgggacgaaaccagggttgcggtacaggaggcattgaaagaagcgctgattaccgatttgtcggatctcgcgcaaaaccagccggagatatggcgacgcgttttaatgcgtcataacgaagcgctgctgggcgcggcgctgtgtgatgatcgtctttttgatctgctgaaggatcggttgcaggtgcccacgtcgaaaggcgcggtgctggcgaaggaactccgcattaataacagcatccatattttgttgggcgctgatggcggctttgaagagatgctattccatattctgcaacggcccgtcgccagaggcgatcgctatgctgtggtcccgtttttacgacgctgggcgctgttataccattgtcggattattgaagtcggcacgcaaagcggcaacgagcagctctttacgctcgccgatttaccggcggaacaggtcgattatctggaagcgcatttatgcgacagcgagcaattaattatctcccgctttgacccggatgttttgccgctggtggtgaccctcgatcgtgaagccgaattaaaacaaatccttgaacaggacgatgcggacaagcgaatgagtaccgccgcattaatgctggcgcgccagtttacttcgcagattaaacaaaccaaaacctccagcttatatctcaatttaaataacgcctgcgtcaaacaattagttacggcattgcaaaatcatcagcaaccggtggcggcgctgcggttattaaaatccctgaaagttattttatgtagtaatgggaataaagaacagcaatgggatttgcatcaggcactggaagatttcacgcagattatcccctcattaattaagcaaggaatgtaa

SEQ ID NO: 375677 - DNA, 978 bp, Salmonella enterica
atgaaaatgaatttattatcctcagcgataatcattgcattaatagcgttagggacaacgggatgcgacgaccaaaaatcccagaagagtacgtcaacagactcttcagccaccagtacctccgtgaatcagaatgattcggatgcaatattggcacaaaaaatgaatgtttatgttgaatgctataatgatattaatcccatgattctttcgagtgttaaaggctatgccgattgggtggacatggataaaggtccaacgggtaaagaacggtatatcagagggatgggagatgttactgtcgatttagatagatgtctggcaaaaataacaaaagtttcatcattgaaacctgaactaaagcccatcgatactctggcgctaaactatattaattcttcaatagacatgaagaaaataatacgtgaaatgaatagttactatacccaggaagactacaaggatgatgctttcacgaaagcgaaatctctgcatactcagtttatgcagacattatcggtattcaaaccggcatcagaggcctatgaagatgctattcgtacaatgaatgatcaacgccagatgttacagttgaagaagattgaagctaaagaaggtaagtcgtttgactactattcactgtcaatgatgttaattagtaagaaaaccaatcagcttttgcaaaatgacggatttaatgtggatgacgcgatgaagcaagtacaggcgttgaatgagcatgttgcgcaactgaaagccaaacaaaatgacaccaaaagtggttcttttcagcgcgagcaatttcttgaggctgcagacaaatatgtgctggctgtaaaaacgcgagttcgtcgtgaacgagatcacatccctttgaccgacagcgataaagagaatccggcatgggctgagggttcttttgataaggtaatcagaggttataatgatttagtgacaaggtttaatttaatgaactga

SEQ ID NO: 375678 - DNA, 2415 bp, Salmonella enterica
atgaccaaccactgggtcgacatcaagaacgccaacctcgtcgtggtgatgggcggtaacgccgcagaagctcacccggtcgggttccgctgggcgatggaagccaaaattcacaacggcgcgaagctgattgtgatcgatccgcgctttacgcgtaccgcgtcggtggccgatttctatgcgccaatacgctctggtactgacattgccttcttgtcaggcgtgatgctgtatctgctgaccaacgaaaaatacaaccgtgaatacaccgaggcctataccaatgccagcctgatcgtgcgtgaagattttggcttcgatgatggtctgttcactggctatgacgccgacaagcgtcagtacgataaaaccagttggcactatgagctggacgaaaacggttttgccaaacgcgatacgacactgcaacacccgcgctgtgtctggaatctgttgaaacagcatgtctcacgctacacgccggacatggtagaaaatatctgcggtacgccgaaagcggacttcctgaaagtgtgcgagtacattgcagaaaccagcgcaaaagataaaacagcgtcgttcctgtacgcgctgggctggacgcagcattccatcggtgcgcagaacatccgtactatggcgatgatccagcttctgctcggtaacatggggatggcgggcggcggcgttaacgccctgcgcggtcactccaatattcagggactgaccgacttaggactgctgtcgcaaagtctgccgggctatctgacgctgccgagcgaaaaacagaccgacctgcaaacctatctggctgccaatacgccgaagccattgttgaaggatcaggtcaactactggggcaactatccgaaattcttcgtctcaatgatgaaggccttctttggtgataaagcgacagcggaaaatagctggggctttgactggctaccgaagtgggacaaagggtacgacgtgttgcagtacttcgagatgatgaaacagggcaaggtcaacggctatatctgccagggctttaacccggtggcctcattcccgaacaaaaacaaagtggtcgcgtcgctttccaaactgaagtacctggtgactatcgatccgctcaacaccgaaacgtccaccttctggcaaaaccacggtgagtcgaacgacgttgatcccgcaaaaatccagaccgaagtgttccgtctgccttccacctgttttgccgaggaaaatggttccatcgttaactccggtcgctggttacagtggcactggaagggcgcggacgccccgggaattgccatgaccgacggcgaaatcctcgccggtatcttcttacgcctgcgtaagatgtactctgaacagggcggcgccaacccggaacaggtgctgaatatgacctggaactacaccaaaccatacgaacccgcctctgaagaagtggcgatggaaagtaacggtaaagcgctggccgatcttatcgacccggcaaccggcgcggtggtggtgaagaaaggtcaacagctcagttcgttcgcgcaactgcgcgatgacggtacgacgtccagcggctgctggattttcgccggtagctggacgccggaaggcaacatgatggcgcgtcgtgataacgccgacccgtctggtctcggcaacacgctgggctgggcatgggcatggccgcttaaccgccgtattctgtataaccgcgcctccgccgatccgcagggtaacccctgggacccgaaacgtcagctactgaaatgggaaggcggaaaatgggccggatgggatattccggactacagcgccgccgcgccaggcagcgacgtcggaccgtttatcatgcagccggaagggatgggtcgcctgtttgccatcgataagatggcggaagggccgttcccggaacactatgagccgtttgaaacgccgctgggcactaacccgctacacccgaacgttatctctaaccctgccgcccgtatctttaaagacgatgccgacgcactgggtaaagcggataagttcccgtatgtcggaactacttaccgtctgaccgagcacttccactactggaccaagcacgcgttgcttaacgctatcgcccagccggaacagtttgtggaaattggcgagaagctggcgaataagctcggcatcgcgcatggcgataccgtgaaggtctcctcaaaccgcggctatatcaaagccaaagcggtggtgaccaagcgtattcgcacgctgaaagcggacggcaaggatatcgataccatcggtattcctattcactggggctacgaaggcgtggcgaaaaaaggctttatcgccaatacgttaacgcctttcgtcggtgatgcgaacacgcaaacgccggagtttaaatccttccttgtgaacgtggaaaaggtgtaa

SEQ ID NO: 375679 - DNA, 375 bp, Salmonella enterica
atggtcaaagggtctgcgctttttgataccaatatcctcatcgacctgtttagcggtcgaattgaagcgaaacatgcgctggaagcgtatccgccacaaaatgcgattagccttatcacatggatggaagtgatggcgggtgctaagaaatatcatcaggaaaaccgcacgcgcattgcattaagtgcgttcaatattattggcgtaacacaggaaatcgcggagcgaagcgtcattgtcaggcaggagtatggcatgaaactcccggatgcgatcattctggccactgcacaagtccatcgttgtgagcttgtgacgcgtaatacaaaagactttgccgatattccgggagtgatcacgccgtatcacttgtag

SEQ ID NO: 375680 - DNA, 243 bp, Salmonella enterica
atgatggctgggatggatatgggcagaattttactcgatttatcagacgatgtgattaaacggcttgacgatctcaaggtgcaacgcaacctacctcgtgcagaactcttgcgggaggccgttgagcagtatctggaaagacaggatcgggctgagaccacaatttcgaaagcattggggctctggcaaggatgtgaggaagatggcgttgaataccaacgtaaacttcgtgaggaatggtaa

SEQ ID NO: 375681 - DNA, 339 bp, Salmonella enterica; identical to SEQ ID NO: 371747

SEQ ID NO: 375682 - DNA, 498 bp, Salmonella enterica
gtgatccgtacagaagatgtacgtctggttttccgccctgaagcgctgaacatggaaatgtcatctccggtcatgattacagctaccggagaatgggaaagcggaaagacggcaacctggatgctcgacaagcgaggagaacagccgccgcatgaagataagacggcggcgcagcttacccgttggggtgaacaacttcagacgctggtgcgtgaagagcataatttgctgcaggttgaacttctcctaatgctttatctgaggactgctcgcttgtggtatcaggaacgttatgaggcacagcctactgaacagcgtctggataacagcgccttttcacgtttgtctggttatgacgattgcctctcggccacatcaaactataaacagtttgagcagtggtatagctggctatggcatagctaccgtgaacatcaaatcacacaacttgaatcaccttcaacaaagttaaaagaagatgttcgtattcgcggatga

SEQ ID NO: 375683 - DNA, 1383 bp, Salmonella enterica
atgaaaagtgagattctctccgttaaggagaagattggctatggtatgggcgatgccgcgagccacatcatctttgataacgtcatgttatatatgatgttcttctataccgatattttcggtattcccgctggttttgtcggcaccatgtttttactggcgcgtgcgcttgatgccatctccgacccttgcatgggcctgctggccgaccgcacccgctctcgctggggcaaattccggccctgggtgctgtttggtgcgttgccgtttggtatcgtttgtgtgctggcttatagcacgccggctctcagtctgaacggcaaaatgatttatgccgccatcacctacacgttgctcacccttctgtacactgtggtcaacatcccttactgcgcgttggggggtgtaataaccaatgacccaacgcagcgtatctccctgcaatcctggcgctttgtgctggcaacggcgggcggaatgctctctaccgtactgatgatgcctctggtgaaactgattggcggcgagaataaggcgctgggcttccaggggggtatcgcggcgctctcggtggtggcgttcctgatgctggcgttctgcttctttaccaccaaagagcgcgttgaagcgcctgccacccatacctccatgcgtgaagacctgcgtgatatctggcacaacgaccagtggcgcatagtcggcctgctcaccatcctgaatattctggcggtatgcgtgcgcggcggggcgatgatgtattacgtcacctggatattgggcaaaccgggcgtgtttgtcgccttcctcaccacctattgcgtcggcaacctgattggctcggcgctggcaaaaccgttgaccgactggaaatgcaaagtgagcgttttctggtggaccaatgctttactcgcagtaatcagcgtggcgatgttcttcgtaccgatgcacgccacgatcgctatgttcgtctttatctttgtgattggcgtattgcaccagttagtcacgcctatccagtgggtgatgatgtctgacaccgtcgactacggcgaatggtgtaacggcaaacgcctgacggggatcagttttgccggcacgttgttcgtgctgaaactgggtcttgccctcggcggggcgctgattggctggatgctggcaggcggcggttacgacgcggcggcgaaatcgcaaaacagcgccacgatcagcatcatcatcgctctgttcactatcgtcccggccatctgttatctgctgagcgccgcgatcgctaaacgctactacaccctgaaaagcccgttcctgaaaaccattctggaacaactggcgcagggcgcacaccgtaatgaacaagaatttacccataaagaattgcaaaactaa

SEQ ID NO: 375684 - DNA, 1392 bp, Salmonella enterica
atgtccgttaacgccatcgagccggcagatgcgcaaccggttgcgcagacgcaaaacagcgaattaatttaccgtcttgaagatcgcccgccgctccctcaaaccctttttgccgcttgtcagcatctgctggccatgtttgtcgcggtaatcacgccagcgctgttaatctgccaggcgttgggtttaccggcgcaggatacgcagcacattatcagcatgtcgctgttcgcctccggcgtagcctctattattcaaatcaaagcgtgggggccggtaggatcggggctgttatccatccagggaaccagttttaactttgtcgccccgctgattatgggcggtaccgcgctgaaaaccggcggcgcggacgtcccgacgatgatggcggcgctgttcggcacgctgatgctggcaagctgcaccgagatggtgctttctcgcattctacatctggcgcgccggattatcacgccgttagtctccggcgtcgtggtgatgattattggcctgtcgctgattcaggtggggctaacttccatcggcggcggctatgccgccatgagcgacaacacctttggcgcaccgaaaaacctgttactggccggcgtcgtcctggccattatcatcctgctgaatcggcaacgtaatccctacctgcgcgtggcttctttggttattgccatggcggcaggctatcttttggcctggtttatgggcatgttgcctgagaataacgcgccggtctcgcaggacatcctgatggtgccgaccccgctgtattatggtctgggcattgactggaacctgttactgccgttgatgctggtctttatgattacgtcgctggagaccatcggagacatcaccgccacctctgatgtctccgagcagccggtatccggccccttgtacatgaaacggctaaagggcggcgtactggctaacggcctgaactcatttgtttcagcggtatttaatacgttcccgaattcctgtttcggtcagaacaacggcgtaattcagttgactggcgtcgccagtcgctatgtgggatttgtcgtcgcgctgatgctgattgtactcggcctgttcccggcggtaagcggttttgtgcagcatatcccggaaccggtgctcggcggcgccacgttggtgatgttcggcaccattgccgcctccggggtgcgtattgtctcgcgtgagccgctgaaccgccgcgcgattctgattatcgccctgtcgctggccgtgggtcttggcgtctcgcaacagccgcagatcctgcagttcgcgccggaatgggtgaaaaatctgctctcatccggaattgccgctggcggcatcacggctatcgtgctgaacctgattctcccgccggaaaaaccgtaa

SEQ ID NO: 375685 - DNA, 1206 bp, Salmonella enterica
atgtttgaactcgataccttatcgacccttgtcgccgccacgctggtgctgctactgggtcgcaagctggtccagtctgtctccttattgaagaaatatacgattccggaaccggtggcgggggggttactggtcgcggttgctctgcttgtgctgaaaaaaagcgtcggttgggaggtcaactttgatatgaccctgcgcgatccgttgatgctggcgtttttcgcgacgatcggccttaacgctaaccttgccagcctgcgcaagggaggacgcgttgttggcgtcttcctggtcgtcgtggtcggattactgctgatgcagaatgccatcggtatcggcatggcgagtctgctggggctggacccgttaatggggctgattgccgggtcaattacgctgtccggcgggcacggtaccggcgcggcgtggagtaaactgtttgtcgaacgttatggttttgccaatgccaccgaagttgcgatggcatgtgcaacctttggccttgtgctgggcgggttgattggcggcccggtagcgcgttatctggtgaaacactccaccacgccggatggaatgcctgacgatcaggccgtgccgacagcctttgaaaagccggatgtgggccgtatgatcacctctctggtgctaatcgaaaccatcgccctgattgctatctgtttgaccgtgggcaaaatcgtagcgcagctactggcgggaacggtgcttgaactgccggtcttcgtttgtgtgctatttgttggggtgatcctcagcaatggcctggcgctggtgggtttttatcgcgtatttgagcgtgctgtttcggtactggggaacgtgagtttgtcactgttcctggcaatggcgctgatgagcctgaagctgtgggaactggcgtcactggcgctgccgatgctggcgattctggtggtacagaccatcttcatggcgctgtacgcgatcttcgtcacctggcgcatgatggggaaaaactatgatgcggcggtgctggcggcgggtcactgcggttttggccttggcgcaacgccgaccgccattgctaatatgcaggcgattaccgaccgttttggcccctcgcatatggcgttcctggtggtgccgatggtcggcgcgttctttatcgatatcgtcaatgcgttagtgatcaagctgtacctgatgctgccaatgtttgccggataa

SEQ ID NO: 375686 - DNA, 459 bp, Salmonella enterica
atgcctccccttgtaaggggggtagcatattgtcatgctaacgacgtaacccaacatatggatgtgaaattaatgttaagtgtttttattccttcatctgagagatgtgtttccagatgtcgttatttattatcattcgcgctaataaatataatattttccattttggttggggttttattatatttaagctttgtgatactggcaattttattcacaattttactacattatctcgtcattaatttaaactgtcagcgattcagagacagtggctttgaatatataaaattctatgtatggggtacgcttgtaatctatattgcctccttcgtgataatggttgctgaagatttcgcttgcgatggctttggtatgcctctttttctagtctggtattttgcaaccttttctctgctacttctggcccccccggattcgaattcactcaacaagtaa

SEQ ID NO: 375687 - DNA, 381 bp, Salmonella enterica
atggacaaggattatattaatgatggttcgttatctgaaaaatggaaataccgtttttcattttacgatcaacatggtttccctggattttggaaagtaagcccagaatataaacaggtatttaaagcattaaagccccgacaacggttgactattcaaataaactttattgcctttttcttctcatggatttatttgtttgtactgggtctgtggaaaaaagcaattatagttattttattagggatcgttgcaatatttattggagcattaatcggcgttaacatacttggacttgttgtcgcagcttatgtcggcgtcaatacaaataagtggttctatgaaaaagaggttaaaggtatcaatacctggagcctgtaa

SEQ ID NO: 375688 - DNA, 192 bp, Salmonella enterica
atggtagacggtactggtgaatttttcgccaatggtttcccgctttacgacagcaatcacgaattactttcctttacgtttctccgtctggttttagccatactaaacaggtgcctgtttaacgtacggagaacactatgcagcaatatatcggcattgatgtgggaggaactcacgtcaaatatggcgtga

SEQ ID NO: 375689 - DNA, 1149 bp, Salmonella enterica
atgaaaataactcacatcaccacgtaccgtttacctccacgttggatgttcctgaaaatcgaaacggatgaaggcgtggttggctggggagagccggtcattgaaggtcgggcacgtactgtagaggcggcagtacatgagtttgccgactacctgatagggaaagatccggcgcgtatcaacgacctatggcaggtaatgtaccgggccggtttttatcgcggcggcccgattatgatgagcgccatcgccggtattgaccaggcattgtgggatatcaaaggcaaggtgttgaatgcgccggtctggcagctcatgggcggcctggtgcgcgacaaaatcaaggcctatagctgggtgggtggcgatcgtccggcagacgtcattgacggtattgaaaaattgcgcggtattggttttgacaccttcaagctgaacggctgtgaagagatgggcgtgattgataactcccgtgcggtggatgcggcggtcaataccgtggcgcaaatccgcgaagctttcggcagtgaaattgagtttgggctcgacttccacggtcgcgttagcgcgccgatggcgaaggtgctgattaaagaactggaaccctatcgcccgctgtttattgaagagccggtgctggcggaacaggcggaatattatccgcgcctggcagcgcaaacgcatattccgattgccgcaggcgaacgtatgttctcgcgttttgaatttaaacgcgtgctggacgcgggcgggttggcgattctacagccggatttatcccacgcgggcggcattaccgaatgctataaaatcgccggaatggcggaagcatatgatgtggcgctggcgccgcattgcccgctgggtccaatcgccctggctgcctgcctgcatatcgattttgtttcgcgcaacgcggtattccaggagcagagcatgggcattcactataacaagggcgcggagctgctcgactttgtgaaaaacaaagaagacttcagcatggacggcggcttctttaaacccttaaccaaaccgggtcttggcgtagacattgacgaggccagggtgattgaacttagcaaaagcgcgccggactggcgtaatccgttgtggcggcacgctgacggatcggtagccgagtggtga

SEQ ID NO: 375690 - DNA, 204 bp, Salmonella enterica
atgctaacgcgattcctctcaaaaaacagtaaagaatccgagagaaagggggataaactctggaaaaaggattcctcttttgtccgacatgatgaggagtttaacggtctttacaatggttgcttctattgtgcattgaccgatttatcaggcaataacatacagaaaaataaaggaggttattgggaaactcaccgtctatag

SEQ ID NO: 375691 - DNA, 693 bp, Salmonella enterica
atgaaaatgattaaaataatatcagccattgccatgagttattttttaagcggttgtatgacgtcatctttactcgatactataaaaacggaaagcgcacccacgacagaagtctggaaaacagatgaaataaaaagtatcaaaccatcaacgaccacaaacggagaggaaacgtggacatttgttggtgaagacaataattatcaacttgatataaaagatgataatatcaacacaacaaccagaaatttcgtcactttactgaataatcctcatatcgataaaagaattatcgaattttccaaacagctttactgttctaccgatagtaaaaaagggaacaaacaaaatgagtttcattgcgtccgcccttcagatattggatatagttataagtctttgacggaagaagaaaaatcaaaagtcagagaggcattttatgtacatgaaaacgatcctggcagtcctttttattttacgttagcaggaaaaatccaacccaaagatgccgataatgaaaatgaaatattactaaaatcttcccataaaataaatttcacacgtgataagaagcatttctcggctaaggttttattaatgccattctctattattggcgatgttgtcactgcgcccttccaggcaattggctatattattatcatgaattctttaccggcgatgcgctactaa

SEQ ID NO: 375692 - DNA, 426 bp, Salmonella enterica
atggacaaaatatttattcatctccccaaacatttaattcgttatgaaacaggccaggctatcgattccctggctcagcgtttcagcctgcctaatgaatcttgcatgcaagattggccaatcgaggttgcggataatcgacggttggatgagtttttatcggcttatagcgaatgcaacgatgatgaatgctttgtgttaatgataatacttcttgaatgtatagataactttggtgagcagtaccataagcatccttcctggccagtaatctatgacttactggataaacatatcaccagacatatctatacagtgtggtattggtcatgtacggactgtaaggatgaagagttggaagatgctttttacatcacatcggatatgcgtgctttactaaaaaagcacgcgtatttactacggtga

SEQ ID NO: 375693 - DNA, 258 bp, Salmonella enterica
atgaatgcctccggcgtcagcgtccgccatatcaacagcgaaacctgcatgaccgcctgttactcacaaatccccagccagcaccttaagggtgactggcaggaagaagcgggatttgagaccgggcgcggcgtgaccgtgaaggtttcggaaggatgcctgaccatcatcgctgacaataacgaggtgcaggagttgcgggaacagctttatcaagctaaacaggtagttaaaggggtgaaggaagtgcttgtttag

SEQ ID NO: 375694 - DNA, 405 bp, Salmonella enterica
atgcggttagtacttgaagaatcagaaaaaaaattatcttctgatgaattgaatgaattcaaccgatactttgatgaaaaaattccattttcgtttattgatttttattccgaatttaatggtggatatccacctgataatggcgagagtaatttatttttattaggtggttttaatccaataaagtatggggatttgcctatagaaaatatttattctgatttaattgatgttttttctaatttaaaaaaaatggttccttttgcttatgatgaaggtggtaattgttttttactttcattaagagataaagactatgggaaagtatacatatggttaatggatgaaaaggaattagcttttgtatctgaatcttttgatgaatttattaatgaattatcataa

SEQ ID NO: 375695 - DNA, 240 bp, Salmonella enterica; identical to SEQ ID NO: 373927

SEQ ID NO: 375696 - DNA, 1110 bp, Salmonella enterica; identical to SEQ ID NO: 373928

SEQ ID NO: 375697 - DNA, 2928 bp, Salmonella enterica
atgagtggaactaatcctgtatttttagtccgcaaagcaaagaaatcatcaggccagaaagacgctgtactctggtgcagtgatgattttgaagcggcaaatgcaacactggattatcttctgattaaatccggtgcgaagctgaaagattatttcaaagctgtcgctactaatttccctgtcgttaacgagctgccgccggaaggcgaactgagcctcactttctgcgattactatcaactcgctaaagacaatatgacctggacgcaaatccccggcgtcaccctgccatcatctgaagccgccgccgcggcgcgccagcatatcgtcgatggtgttgataccgaaacaggcgaagtgctggaagaccacaccgaaaattttggtaacgaaagcaacagccctgcccaggcaacagccccagcccccgagctgactgttgtcgcaactatgcctctccgtcaccgcgttcttgctcagtacataggtgaaggtgagtatctttatcacgtcgacgcctcccagaaaaaagaaattctgcgtctcgaaatggacaccgataattcatatgtccagaacttgctgcttgccgccgagaatgttgaagcgttcaagaaagccattgaacacgatgttcataaggtagttaatgccatcaaaaaagtattccctgtcgatggaaaaactcctgaactggcgactgttatccagttccttaaaacatggttcgagacggagcatatcgatcgcagtttgctcgttaaggagtgggcgaaaggcaaccgtgtatcggctattcaacgcactgaaagcggcgccaacgctggcggtggcaataagactgaccgtaaccctgattacgaacacactctcgatactctggacgtagagattgcaatggccactttgcctatggactttaatatctatgagctacctggcagcgtttaccgtcgcgcaaaagaaatcgtaaagaaaaaggaaagtccgttcaaagaatggtccgcagcacttcgcgcaacgcccggtatcctggattattcccgcgccgctattttcgcgctgatccgaagcgcacaccctgagttttatcactaccccggacgccttcaggggtatatcaacgccaacttaacggagactgatcacgagaaccccaccgaggaagctctcacggctgcccgacacactccggaaaaagacgcggtagaagaagccaaccgacagcttgccgccgcgcgcggtgaatatgtggaaggcatcagcgacccgaacgacccaaaatgggtgaagaccgggacaagccagccgaccaccgaacctgaactggttaaaaatgttggcaacggtattttcgacgtgtccgctttaatgcagaactcatcaactcatggcacagaaacgaatccggagaccaccagcaatgtgcaggttcaaaaagctgacagtgatgaaaaacaggctggtgatgcggtgcaggcaggcgaaggcgatctgggtactggtaaagaagcagttaccgtagagaaccagaatcaggctgagacgcaccagaacaacgattctgtgagccaatctgaacctgaggcgcaacaaaacgtaccggaatcgcaacaagaagagccagaagcagcctggccggaatacttcgagccgggccgctatgaaggtgtaccaaacgaggtttaccacgccgccaacgggatcagctcaactcaggtgaaagatgctcgcgtgtcgctgatgtactttaacgcgcgtcacgtagagaagactatcgtcaaagagcgctctccagtgcttgatatgggcaacctggtacatgttctggctctacagccggaaaacctcgaagcagagttcagcgtagagccggagatccctgagggtgctttcaccaccaccgccaccctgcgcgagttcatcgacgcgcacaacgccagcctgccagcgctgctgagtgctgacgatatcaaagcgctgctggaagagtacaacgccaccctgccgtcgcagatgccgcttggagcttcggtagatgaaacctatgcatcgtatgagcagcttcccgaagaattccagcgcattgaaaacggcaccaaacatacagccacggcgatgaaagcctgcatcaaagagtacaacgccaccctgcccgcgccggttaaaaccagcggcagccgtgacgcgctgctggagcaactggcaataatcaaccctgacctggtcgctcaggaagcgcaaaaatcgtcgccgttgaaagtctctggcacgaaggccgatctgattcaggccgtgaaatcagtcaacccggcagcggtattcgccgacgaattgctggatgcgtggcgggagaacaccgaagggaaagtgctggtcacccgccaacagctcagcaccgcgctgaacattcagaaagccctgctggagcacccgaccgccggcaaattgctgactcacccaagccgcgctgtcgaggttagctattttgggattgatgaggaaaccgggttggaagttcgggtacgccctgaccttgagctcgatatgggcggcctgcgcattggcgccgacctgaaaactatcagcatgtggaacatcaagcaggaaggcctgcgtgcgaagttgcaccgggaaatcatcgatcgggactatcacctgagcgcggccatgtactgcgaaactgcggcgctggaccagtttttctggattttcgtcaacaaagacgagaactaccactgggtcgccatcattgaggcgtctaccgagttgctggaacttggcatgctggaataccgcaaaacaatgcgagagatagcaaacggcttcgacactggtgaatggtcagcgcctatcacagaagactacaccgacgaactgaacgattttgatgtgcgccgccttgaagcgttgcgcgtacaggcataa

SEQ ID NO: 375698 - DNA, 159 bp, Salmonella enterica
atgcttaaacaatgcggttactgccgcaaatccattgatgaaggcaaagaagtaaaaaacacacttctctatcgcaacggctcgcaactggcgagcaaagaaaaggaatattgttccaggcagtgtgctgaatacgaccagatggcgcacgaaagttaa

SEQ ID NO: 375699 - DNA, 402 bp, Salmonella enterica
atgagcaacatcaaaggtccgcttatcagcagtcagcgctacctcgacaaggcaaaggtaaacgacagagcggcaagatttaagcgttttatcgtatctgtttacccgatagttctgcgtgggcagcaatacaccatcctgatggatggccaccacaactacgcggcggcaaaactggctggcatagaacctgattaccgaccaatcaccaaaaaggtgcagcgtattctcggtgagatgtcatggcgcgagcgtgaggcattcttcatcaacaacgttacagacagcaactactactttgttgaaacaggcgaagtggttcatgagttggttatgcctgatacgtcctgcaaattccaggcgcacgcaggtaaccaatggatttttggaggtgcagcatga

SEQ ID NO: 375700 - DNA, 453 bp, Salmonella enterica
atgacaatcgacaaacgtgcgctgcgtgaagtggcggaaaaggctacgccggggacttggcgccgcacctcatcactgttcaatggcatcacggtaacgccattttctctttgcggtgaagaagtgacgttggcccatactgttgagaaacgtgacgcggaatttatcgccgcagccaaccccgccaccatgctggcgctgcttgacgagaatattcaactccagcgggaaaaagacgcaacagaggccgtagcgctggcgctgcgtgatgatatgcgggatgcgcgggagcaactggaagaagcagaaaagcaagtggaagaattcacgatgtggattaagcgtctggcccactcactcagaaacgccaagccgaacagcaagttatacggtgccgcaatggactatttgagccgtaaggggttaatcagtgtggaggatgtattgagatga

SEQ ID NO: 375701 - DNA, 810 bp, Salmonella enterica
atgaccactattaccaaagaatggctacagcagaccatcgctgaatttgaaaacactcgcgacgatattccatttggcctgaacgatgacgacgccaaaattcttattgtgctgaagcgtgcgctggcagcgcttaccgctgaacctgtggcgtggactgacgctgaagaactgcgggatttacgtacattcggtttttgcgaaatgttcacagttgaacctgtcagtaaggatgctgatatgtatcgcgttatcccgttatacacagtctcgcaaccagtaccagaacgcgaacgtattcgccgtgaacatgctgaatggtctgatgccacattcggcgatgttggccccatcggtccactgaagcacctctcgaaagaggcattggaaactgccgcagaacctagcgacctcagcgaatgggctgatatgcaattcctgttatgggatgcacaacgccgcgctggtattactgacgagcagattgccctggcgatggtggaaaagctggcggtgaacaagaagcgcgaatggcctgaaccgaaagacggtgagccacgactgcatattaaagagcagtcagcgccggtaattccggatggttggataagctgtagtgagcggatgccagaagacgagcaagaagtaattgttcataacaagttgggatatcgttatgtttcatattttgatgagcattctggactattttttgacatgcgaggcggcaatcagatgaactgcattgagcatatcttggttacgcactggatgccgctgccagcagcaccagaaccagagcagagctaa

SEQ ID NO: 375702 - DNA, 240 bp, Salmonella enterica
atgagaattgaacttgttatcagccggacaaaacagcttccggaaggtgccgttcctgcgcttgaaaaagaattaattacccgtctccagaatcagtatgaaaactgcaacttaaccatccgtcgaggcagtcaggatggtctgagtatcgtcggtgctgctgatggcgataaaaaacgtatacagagcattctgcaggaaacgtgggaaagcgctgacgactggttttatgcatattaa

SEQ ID NO: 375703 - DNA, 540 bp, Salmonella enterica
atgacgatggacgagtttatcgatacgcataatgacgataacgatcgtcagcgcaccggccacgataaagagatgtataccctgacgtacagccagaacttttcggcaataaacgtcaacgcctatatcaactacacccatcgcacctactggaatcaacctaaccaggacagctataacctgacgctgtcgcactatttcgatgtcggtgaggtgcgcgggatcagtctgtcggtgaacggttttcgcaacgaatatgacaatgagcgtgatgacggcgtgtacgtctcgctcagtattccgtggggcaacaaccgcacgctgagctacaacggctcctttagcgatgacaacaacagcaatcaggtcggctattacgagcgcattgacgatcgcaataactaccagatcaacgctggtcgcgcggataacggtgcgactctcgacggctactaccgtcatcaagcgagctatgccgacattgacgtcagtgcgaactatcaggaaggcgactatacctccggcgggctgaacatctag

SEQ ID NO: 375704 - DNA, 1215 bp, Salmonella enterica
gtggtgggtattgttctggctgtcggtccggaaaatagctatgcggaagcgcccattcaatttaatacccgatttcttgatgttaaagatgatgccagcctggatctctcccgtttttcccgtaaaggctacattatgccggggagctatcatctccaggtgctggtcaatcagagtcaaattgcccaggataatgttattacgtattccgttgataataacgatcctgataacacctatccctgtttatcgcctgaactggtatcgctgctggggttaaaacctgaaatagcagataaaatgatctggataaatgccggtcagtgtctgcaaccagatcaactggaagggatggaaacccaaacggatttaagccagtcaacgctgacggtgattattccgcaggcctatctggaatacagcgatgaagagtgggatccaccttcccgctgggatgaagggattcccggcgtattatttgactacaacgttaacagccagtggcgacatgctgaacatgatgacggcgatgagtatgacatcagcggcaacggcacggtgggtgccaacctcggcgcgtggcgtttgcgcgcggactggcaggctaactatcgtcacgaaaatgacagcgaagataaagacaactttggctccagttccgaacagaactgggactggaaccgctattacgcctggcgggcgatcccgcagctccgggcgcagctaacgctgggcgaaggatcgctggaatccgatattttcgacggctttaactatgttggcggcagccttatcaccgacgatcagatgttaccgcctaatctgcgcggctacgccccggatatatcaggcgtggcgcgcaccaacgccaaagtcaccgtgacccagcgcgggcgggtgatttatgagtcgcaggtcccggctgggccgtttcgcattcaggatattaatgaaacggtatccggcgatctacacgtcaaaattgaagaacaaagcggtcaggtgcaggaatatgacgtcagcaccgcctccattccgtttctgacccgtcccggccaggtgcgctacaagttggcagccgggcgaccgcaggactgggatcacaatatggaaggcggcttttcacctcagccgaagcctcctgggggatcgctaacggctggtcgctgtacggcggtgccatcggtgagcaggattatcaggcgctggcgttag

SEQ ID NO: 375705 - DNA, 924 bp, Salmonella enterica
atgaaccagccactacagaataaaagcttgcctgtgccatctttacgcaatatccaggcattcattgaagtggctgataccaacagcctgaatctggcagctgaaaatctcaatgttacggcctccgcggtaagccatcagatagccagtctggaacagtatctgggaaagaaacttttttcgcgcagcagtaaaggcgtcgtattgaccgctattggtgaaaaatatttaaaagaggtttcgggggcgttaaacattattggacaggctaccaaccaggtcataaatgatattcaccaggattatttacgcatacattcagcaccgagttttggattactatggttgatgccccgtctgaataaatttcgccaggcctggcctgagcttaaaattagcctgacctgttcttacgaaagtattcagttctcccgtgataatatcgacatcgatatccgccacggcctttcacaatggccgacgctggtcgtcaaaactataaaaaatgaacgtatgctcccctatacatcatcgacttatttagcgagtcatagcattcaaaacattgaagatttactgggttgcgatcttattcattcagatagcacgctgatcaactggagcaactggctgtcctggcataaggttcgcggcttgaataaaaactttatttttaattttgaccgctcctatatgagcattgaggctgcacgtatgggcatgggtattattcttgaaagcaatttactggccggacaaagcgttagccaacgccacctggcgcccgtttttacgactgacgtgagtatgccggttaacgctcaccacttcgttttgccacaccacaatgaacaaaaagagaaagtgaggatattctttaattgggtttccaaagagctaagccgcgaaggatttcagatctaa

SEQ ID NO: 375706 - DNA, 1332 bp, Salmonella enterica
atgtcacgtatagatactgtagtctgtactgacgccaggaagacaaaatatcgtttggtggttttgacgatgattttcctggtgtatgcaataaattacgccgacagaaccaatatcggcgcggtgctgccgtttatcattgatgagtttcatatcaacaactttgaagccggggccatcgccagtatgtttttccttggctacgcggtaagccagatcccggcaggtttttttatcgccaaacgcggcacgcgggggttagtttcactatcaattttcggcttttccactttcacctggctgatgggcacggtaagttcggtgtttagcctgaagatggtgcgactgggactggggcttagcgaaggaccatgcccggtggggctggcttcaacgattaataactggttcccgccgaaagagaaagccacggcaaccggcgtttatatcgcggccaccatgtttgcgccgattatcgtgccgccgttggcggtgtggattgcggtcacctggggctggcggtgggtctttttctcctttgcgatcccggggatcgtggcggcgattgcctggtatttactggttaagtcaaaaccttcagagagcggatttgtttcgcaaagtgagctggaggagattaatgccgggcgtgatatccataaaaacaccgtacgggaaaatatattaattgccgatcgtttcactttgctggataaaattattcgggtgaaaaaaatggcgcctatcgatacggcaaaaggattattcacctccaaaaatatcctcggtgactgcctggcctattttatgatggttagcgtgctgtacggcttattaacctggattccgctctatttagtaaaagagcgcggttttgatgtcatgagtatggggtttgtagccagtatgccgtgcatcggtgggtttattggcgcgattggcggcggatggatttcggataaagtattaggccgtcgtcgtaagccaacgatgatgtttaccgctatttctaccgtggtcatgatgttaattatgctgaatattccggcaagcacctgggcggtatgtgttgggttattcttcgtcggtttatgcctgaatattggctggcccgcattcacagcatacggtatggcggtttcggacacgaaaacttatcccattgcctcttctattatcaatagcggcggcaacctcggcgggtttgtcgctccgatggctgcgggttttttacttgataagaccggcagctttaattctgtatttacctatttcggtatctgcgcagcaattggtctggtggttattctcttcctcgatgagccacaataa

SEQ ID NO: 375707 - DNA, 750 bp, Salmonella enterica
atgttattaaaagataaagtcgccattattactggcgcggcctccgcacgcggtttgggttttgctaccgcgaaattattttctgaaaacggcgctaaagtggtcattatcgacctcaatggcgaagccagtgaagccgcggctgcggcattaggcgaaggtcatctcgggctggcggcaaacgtcgctgacgaagttcaggttcaggcggcaattgaacagatcatagctaaatatggtcgggtcgatgtactggtgaataacgccggtattactcagccgctgaagctaatggacattaagcgcgctaattatgacgcggtgcttgacgtcagcctgcgcggcacgctgttgatgtcacaggcggttatcccggtcatgagagcgcaaaaatccggcagcattgtctgcatctcctccgtttccgcccagcgcggcggcggtatcttcggcggcccgcactacagcgcggcaaaagccggcgtgctcggtctggcgcgggcgatggcgcgtgagcttggccccgataacgtccgcgtaaactgcatcactccggggctgattcagactgacatcaccgccggtaagctgaccgatgaaatgacggccaacatccttgccgggatcccgatgaaccgcctgggcgatgcggtagacatcgcgcgcgccgcgctgttcctgggaagcgatctcgcgtcctactccaccggtatcaccctggatgttaacggcggcatgttaattcactaa

SEQ ID NO: 375708 - DNA, 846 bp, Salmonella enterica
atgaagatgaccgaatcacaaaaagtcgccgcggcggcgtggcgcatccgccgctacgccctgcaaatgggggaagttcagggacagggctatatcggccaggctctgggctatgccgatgtgctggcaaccgcgttcagccacgcgatgacctaccgtccggaagaccctgagtgggaagggcgcgaccgcttcctgctttctcacggccattacgctatcgcctactatgcggcgctgctggaagcgggaattatcccggaagaggagctggaaacctacggttccgacgacagccgcctgccgatgtcggggatggcgacctacacgccggggatggagatgtccggtggttcgctggggcaggggctgtccattgccgtaggaatggcgctcgggctgaagcaaaagagcagcacgtcctgggtttataactctatgtcggatggggagctggacgaaggttcaacctgggaagcggcgatgtcggcagcccactatggcctgactaacttgattaacatcgttgatgtcaacaaacagcaggcggacggcgattcgcgcaaaatcctcggctttgagccgctgcatgaaaaatgggccgctttcggctggtacgtacagcgcgtggacggtaacgatctggccgcggtgattgccgccttcgacaacgcgaaaagtcataccggcaaccagccgcgggtcattctctgcgacacgttgatgggtaaaggagtgccgttcctcgaaacccgcgataagaaccattttattcgcgtcgatgctgacgagtggcaaaaagcgattgcggtgctggacgctaacaaaccggaaggagtgctgtaa

SEQ ID NO: 375709 - DNA, 993 bp, Salmonella enterica
atgagccagagtaaaccacgtttaaaaacgtccgcgatgattgcttctatcgccgatgaaggccaggcgacgatccctgcgccgtttggcgtcgcgctgtcaaaactggcggcgcagcgccctgaaatcgtcggtatgaccgcggatctgtcaaaatataccgatctacatattttcgcccaggctttcccggatcgctttttccagatgggaatggcggaacagttgctgatgggagcggcggggggcatggcgaaagagggatttattcccttcgctaccacctacgctgcgtttgccacccgtcgcgcctatgattttatccatcaggtgatcgccgaagagcatctgaacgtgaagatctgcgcagcgctgccgggcctgacgacgggttatggcccaagccaccaggcaaccgaagatctggcgattatgcgcggcattcccggcatggttatcgtcgatccttgcgatgcgctggagatagagcaggcggtaccggcaattgctgaccataacggcccggtgtatatgcgcctgctgcgcggtaaggtgccgctggtgctggataagtacgactatcagtttgagctgggcaaggcgaaactgctggaggacggcaatgatgtgctgattatctcttccgggctgatgaccatgcgcgctctggaggcggttgaaaagctacgcgccgataatatcagcgtggccgtactgcacgtgccgacaatcaagccgcttgatgaaaaagcgattattgagcaggcgtcgaagcccggtcgcctggtgatgaccgcggaaaaccatacctcggtcggcgggttgggggaggcggttgccgcactgctgatgcgcaaaggcgtacgctgcgagctggataccgttggtttacctgacgagtttctgctggccggcgcgctgccgaccctgcacgatcgctacggcatctccaccgcgatgatggtagaaaaaattaagcatcgtctgcgttaa

SEQ ID NO: 375710 - DNA, 186 bp, Salmonella enterica
gtggtttttaatcactttgtcttccacgatgcccataccagactcggcgaccgccattttggccagcggaatgcgggcatcagcggcggccagagcggcggcgcggaagattttgtctacctgttgttgcgtgaaactcgcgtactgacgctgggcttttttgacgcgcgcaaccagcgcgtttaa

SEQ ID NO: 375711 - DNA, 168 bp, Salmonella enterica
atgatggcgttacgcgttttcaggctaattagcgacttgaaaatcgcggtagaggtcgggttggttgtcggaacgatgccgcaaataataccgacaggttcagcaatcgtaatggtcccgaaagtgtcgtcttctgacagcacgccgcaggtcttttcatctttatag

SEQ ID NO: 375712 - DNA, 2430 bp, Salmonella enterica
atggctgacctgaacctgagtaccctgacggaaacagacatcatcaccaaacgcgttatgcccgccatcctgaaagctggctgggataacacaacgcaaatccggcaggaggtcaaactccgggacggtaaggtcatcgtgcgcggtaaagtggcggcgcgcagaacggtgaaatccgccgatatcgtgctctatcataaattaaacatgccgctggcggtgattgaggccaaagccaataagcatgaaatcggcaaagggatgcagcaggcgctgggttatgcgcacctgctggacgttcctttcgtcttcgctaccaatggcgatggctttatcttccatgataaaacggcaaccggcgcgattgagcgagaaattgccctcgacgaattcccaacgcctgacgaattgtggcaaaaatactgccagtggaaagggtacaccgccgcgcaaatgccgatcgtcacccaggattattacaacgacggcagcgaaaagcggctgcgctactaccagcttcaggccatcaacaaaacgctggaggctgtgtctaacgggcaaaacagattattactggtcatggcgacaggaaccggtaaaacgctgacggcgtttcacatcatctggcgtttatggcggtcaggcgttaaaaaacgcatcctgttcctggcagaccgaaacgtccttgttgaccagacccgacttgatgactttcagcctttcggctccgcaatgaccaaaatcaccgggcgcactctcgaccccgctttcgaaatccatcttgcgctctatcaggcgttaaccggcaatgaagagcatcaaaaagcgtttaagcaggtttcgccggatttctttgatctgattatcatcgacgaatgccaccgaggcagcgcctctgaagacagcgcctggcgtgaaattctggattatttcagctccgccacacagattggtatgaccgccacgccgaaggaaactcacgaggtctccaatagcgactactttggcgatcctatttacacttattcgttgaaagaagggattgaggacggattcctcgctccttacaaagtggttcgtgtcgatattgatgttgatttacaaggctggcgacccgtgcgcggccagagcgacctcaacggtgaactgatcgatgacagaatctataaccagaaagattttgatcgcaccatggtcatcgacgagcggactgaactggtggcgaaaaccattaccgattacctcaaacgcaccaatccgatggataaaaccatcgtgttttgcgaagacattccgcatgctgaacgcatgcgccgggcgctgatcaacctcaacccggagatggtaaaacgtaacgataaatatgtgatgaaaatcaccggtgatgacgaagaagggaaaggccagctgcagaatttcagcgacaagaaaaaagaatggccggtgattgtgaccacctcagaactcatgactactggcgtaaacgttaagacctgcaaactgatcgtgctggaccaaaccatccgctcaatgactaaatttaaacagatcattggccggggtacccgcatcgaacaagactacggcaaactgtggttcaccattcttgatttcaaaaaggccactgaactgtttgccgacgagcgctttgacggtatcccggaaaaagtgatggaagccacgccagatgacattgcggacccggactccgggttcaacgaaacgctggaggaagaaacgcctgacgtgtttgccgacgaagatatcaacggggcagacgaagatccggccacctacaccaccagcccgatgggcgactccagcccgttaccggaagaggaagacaaccgggtccgtaaattccacattaacggcgtcaccgttggtgtggtctcgcaacgcgtccagtattacgacgccgacggcaggctggtcaccgaatccttcaaagattacacccgtaaaaccgtgctcaaagaatgcgcttcgctggatgattttgtccggaaatggcaagatgctgaccgcaaagcggcggtgatcaaagagctcgaattacagggcatcctttgggatgttctggcggaagaggtgggcaaagatcttgacccgttcgacatgctctgtcatgtggtgtatggtcagccgccgctcacgcgcaaagagcgcgcagacaatgttcgcaagcgtaattatttcaccaaatattccgatgccgcccagagcgtactcagcaatctgctggacaaatacgccgatgcgggcgtggaagaaatcgagaatattcaggtactgaagctcaaaccgttcgaccagatgggcactctgcaggagatcatcaccgacggctttggtgacaaaggcacctatatgcaggcagtgagtgacctggaaagcgaaatttaccagcttcctccccgctccgcctga

SEQ ID NO: 375713 - DNA, 1752 bp, Salmonella enterica
atgacggtggaaaaactgattgttgaccatatcgacacctggaccacggcgctgcaaacccgctccacggcggggcgcggcagctcgggtaagattgacctgtatggcatcaagaagctacgcgagctgattctggagctggcggtgcgcggcaagctggtgccgcaggatccgaacgacgaaccggcatcagtacttctggagcgtattgcggcggaaaaggccgagctgatgaagcaagggaaaattaaaaagcaaaagccgctgccggagattagcgaggaagagaaaccgtttgagctgccggtggggtgggagtggacaacactcaatactcttgcagaaataaatcccaaaatagatgtgtctgatgatgagcaagacatatcttttgttccgatgcctctcatatcaacaaaatttgacgggtctcatgattttgaagtcagaaaatggaaagaggtaaaaaaaggttatacccactttgctaatggtgatatagccattgcaaaaattacaccctgctttgaaaatagcaaagcagcaatattttctggattgaaaaataatgtcggcgttggaacaacagaattacatgtcgcgcgtccctacagccaagcagttaatcagcaataccttcttttaaactttaaatcaccaggttttcttaaaaccggtgaatctcagatgacaggctccgcaggccagaagcgtgtgcctagaaatttctttgaaaattatccgctaccattccctccattacaagaacaagaacgaatagtaaacaactttactcaattaatgatcctctgcgaccaactggaacagcactccctgaccagtctggacgcccatcaacagctggttgaaaccctgctaaccacactaaccgacagccagaacgccgatgaactgaccgaaaactgggcgcgtatcagcgaacattttgacacgctgtttaccaccgaagccagcattgacgccttaaaacagaccattctgcaactggcggtgatgggcaaactggtgccgcaggatccgaacgatgaaccggcttctgaactgctcaaacgtattgcgcaggaaaaagcgcaattggtgaaagacgggaaaattaaaaagcaaaaaccgttgccaccgattagtgatgaggaaaaaccgtttgaaatcccaactaattgggaatgggttcgttttggtacaattacaacatctcgacttggaaaaatgcttgataaagcaaaaaataaaggcactcctaaaaaatatattcggaacgtaaacgtccaatgggataatatatccattgatgatgttaatgaaatgaaatttgaagacaatgagctttccgaatttatactaagaaatggtgatctacttatttgtgaaggtggcgaacctggtcgctgtgccatatggaataagcctggtgaattttacttccaaaaagcgttacatagagttcgtactttttgtaatatcccagaaagaattctcgccattcatttaaaaaatgacagtttgaatggtcgactggctaacttatttactggagtaacaataaaacatttacctggggataaattacagcaatacgtaataccactaatgccattaaatgaacaaaccaatataatagagaagttaaatttcctgttagatatttgcgatagcctcagcaaagaaattaaatcatcccaacaaacccagctccacctggccgacgccctcaccgacgccgccatcaattaa

SEQ ID NO: 375714 - DNA, 321 bp, Salmonella enterica
atgactaccccgcattgtattgcagaattcaccgatccagaagtctccccggaaaataaccgtaaaggcaccgtcagttatgcgagccgctttgaagatcaccagcatattccggcgattatcatgaaaggccagtggctggaagccgccggttttgccatcggcaccaaaatcgatatcaaagtgatggaaggctgcatcgtgctgaccgtgaaaccaccagagcctgagctggttgagtctttacggcaagtaagcaagctgtcagtacgtaaacaaaagcaagttcaaacgtttatccgcgtgatttcttctaaatag

SEQ ID NO: 375715 - DNA, 210 bp, Salmonella enterica
atgagcgcaagcggaatttatgaggcgcggcatcttaaagagcacagggagattgtaagtagcccgatattgttggcttttgcttatcttgctgacgggattcgtcgtatgaaacatgaaaattacctcatgttttatataaggattcgacactatatcaaaaccggtaactctcaatctttcaaagctatgtgtcagatcaggtcgtga

SEQ ID NO: 375716 - DNA, 648 bp, Salmonella enterica
atggaaagggagcttatggtcgttgaaaatttttcaggaaaatcagttgattaccaaattcacgtagggattgactatgctaaagtggttgacttgcagagcaaatggggtgcctatcgtgctgatttattgtcagctctaattactgctaaccccggtatggccactgataacgagttagcaaggaaaattctggcagataacagcctttctgattggcattgggactggtgccgcaagcttttgcaatgtaatggtgatgattatcagtggttttttctgcaaataaacgacgcagttcaaggtgtttgtgttctttaccatccaaaagaaagtcgatttgataataataaaattttctacgtggattatattgcaacagcatactggaatcgtcctcgtcctaactttacccctaaatatagtggagtaggcaaagagcttatccaacatacaattaattatgcctgttcaaactgggggtatagacctggtttttgcctacatgcactcccaagtgcagagggtttctataaccatcttggcatgactgattttggcgtcgaccatgaaaaagaaaatctccgattttatgaggcatcacaggttgtcgcatcaactctcggaggaatttcaaatgccgcatga

SEQ ID NO: 375717 - DNA, 849 bp, Salmonella enterica
atgccgcatgagaaagatttctttgtatcaaatcagtttagtgagtctgatttggaaattttactaaatttccaaaagataaaaaacagcaaaaaagtaaaagatattatttcccgtaaaccagaaatggaaaacgaaaatcaattcctacttgatgtagcaaaaaatttaacatttaacaaaaataaactatttagaaaaagagatgatgctaattctgaactcataaatttatggttatcattaatagaaaaaaagtcattaaacacctatttaaaaggaaatacaaaggtcttcacagatctggattttgaaaatctcggaataattgcaagtttgagcagggatgtacaatctattcattatatttcaagaatccttaaagaagaatatggtattattctaataattgaaaaatcattcaaaggtatgaagttagatggctgtaccttttgtttaccaaataaaacaccagtcataggtctaagtttaagatattcgagatatgattacttttggtttacattaatgcatgaattatcccacattgctctgcactatgataaattagatacgccaatcctcgatgatttagacattgacacagaaacagacgtagagattgaggctaacagagccgcagctgatagtctgatacccagagaagcaaatagagctgtctttcggacatttaatgaacctgatagtctaatatctgtctgcgaaagatttaatatacacccaataatcgctgctggtgcggtaagaaataaacacaaaaattatgttatcttctcaagtttagtcaattcaattgatgtcagaagggagcttggtttcaatgagtaa

SEQ ID NO: 375718 - DNA, 1089 bp, Salmonella enterica
atgagtaaatatatcccatttttaaaagcaaaaagcaacgaaactcaagccctcgaagagctttacaaaaaagatgctacaatcttcacacaaatcactccattcttcgatataccaagagaatcaaataatcaaacaatggaaaatgtcttgaataaagctcattctttcaaaaagagattggataataaagctttatttaaaaacatggaattttacatagataattatgacctggatgatgaaatattaattgatggagtggagcaatacgaatatatactatctctttttcgtgattacttatatattcctgtgatcggtatcaaccgattagagaaacacaataaaagtgtttacgatagcctatcaattaacggaggcaaattagccataaggttagttgctgaagatattgagagctataaaataacaaaaatgcatctcttgaagatgatggcaatcattagaaatctgaaagtagaacaattgcacttaattatagatctacgatacattcagccaactgacataaagcgactaactgacatggctgaatactttattctaaatgtaaataaagactttcactttgataagtgtattatatcagcctcttcgataccggctaatatttcctcattacttgaaacctatcaaagaaaatcgttcacgagagcggagtggaaaatttgggacacattagttaacgaaaagaaaattggtaatattatatacggggattatggaattgttagccctgattattctgatatagatttagatccgaagctatttagaaaagtttccgcaccaaaagtattttatacgtataagaataatatgttttgtgttagaggtggatctttccagaatgatgagagaggaaatggtcaatattatgatattgccacaataatccatgaccaaaaattcttcagggcaactacattctcatatggggaacaatatgtttatgatagaagtagttattcgcctaaaaaaccagataaagcaggtaatccctcatcctggattaaagccatgctgacttcacacattaagtttgttttacactgcatcccttaa

SEQ ID NO: 375719 - DNA, 564 bp, Salmonella enterica
atgctcaatgataataaaattcgcactgcattaataaattttttactggctaaaaaaccagcgccagaaaggattattgaagaattgcatatcgagaacggaagagcaatagctgatgtcgtggcagcatatagttatttgcattgctacgagattaaaggagagactgattcaattggaagaatccttactcaagctaattattataatacttctttcaacaaaattacacttgtaactacaaaaaatcatttaacatgggcattaaagcgttccccatccttctggggaatcatattagtagaattaaaagatagtaacattactttcaaatatataaggggggctaaagataatattttcttcagaaaagaaaatgctttcatgatgttatggaaggacgaaatgttgaaggtagcaaatgaagcctctgtaccagttaaaagatcacacacgaggatggaaatagccgaaatgcttagtagttcgcttaagaaaagtgatgctttgcaaactatacaaagcatcatatctaatcgactaaaattaagggatgcagtgtaa

SEQ ID NO: 375720 - DNA, 150 bp, Salmonella enterica
atgatgaggaatcgggggctgtattataatcggcaccgttactataatccggggcagggaagatatattacgcaggatccgatagggtttatggagggattaaaccagtatcaacgaccactggaacgcttcagaaagcaggagatataa

SEQ ID NO: 375721 - DNA, 225 bp, Salmonella enterica
atgagcggaaaactagcggcgcgccagaacgacatgactatgaagggcgggaaaatcgtccagggtttagcgggggcgctgattaccccggacaatacggtggcgtggcgcggggagtatgatgaatgggaaaaccaattgggccaggaaaatccggatcacctggaacaactgatacggctgccgaggcagcaatatgatgaggaatcgggggctgtattataa

SEQ ID NO: 375722 - DNA, 342 bp, Salmonella enterica
atgaaacactttattagaagtataaaaatgatctggataataatgtcaatctctatattatgtgtttctttacttagactttctcagttagattcaaattacgatataagtgaactgaatagtattatgatgtatgggatggtaataatatcatttccgacaggaataatatttgctattgttttgtttttatttttattgtcttttggtgttatttttacaaccattcacagtgaatatgttttgacagtggcaatatgggggtggtttttatttggtggatatgttcaatggttttttttggtggggaaaatgataaaaaacgaggagtatcacaagtga

SEQ ID NO: 375723 - DNA, 369 bp, Salmonella enterica
atgaacaaaatagagtttataacattaatgtcttttccaatggagtggttagaccttgatatgtatcctgatttattgtttttaaaacaacttaatggatatgaggttggtcatgaggatagttcggatcatgatcggaatggcgcgtttcattggtggttaaagaagaaaccatctaaagatgaattgatgaaattagttaggttggcacttattgatcccgaccaatttttatcggaagatatcattcgatatataaaaaagtcatcacactttgatcgtgatgtcgatgcccttatcgaaaagttacgtgatgaaaaaacgcagcaaacgaggagagccagtagaggcatgcatcgtgaccagtag

SEQ ID NO: 375724 - DNA, 1362 bp, Salmonella enterica
atgtttaaaccagaacttctttcgccggcgggaacgctgaaaaatatgcgttacgctttcgcttacggtgccgatgccgtctatgcgggccaaccacgctactctttacgcgtgcgtaataacgaattcaatcacgaaaatttgcagcttggcatcaacgaagcccacgcgctcggaaaaaaattctacgtggtggtgaacatcgccccgcataacgccaagctcaaaacctttatccgtgacctgaaacccgtcgtcgaaatgggtccggatgcgctgatcatgtccgatccagggttgattatgctggtacgcgagcacttcccggcaatgccgattcacctgtcggtacaggctaatgccgtaaactgggcgacggtaaaattctggcagcagatgggactgacccgcgtgattctctcccgcgagctgtcgctggaagagattgaggaaattcgccagcaggtgccggatatggaaatagaaattttcgtccacggcgcgctatgcatggcctattccggtcgctgcctgctttccggctacatcaataaacgcgatccgaaccagggcacctgcaccaatgcctgccgttgggaatataacgtgcaggaaggaaaagaagacgttgtcggcaacatcgtgcataagcacgaaccgattccggtacagaacgttgagccgacgctcggtatcggcgcgccgacggataaagtgtttatgatagaagaggcccaaagaccgggcgaatacatgaccgcgttcgaagacgagcatggcacctatatcatgaactcaaaagatttgcgcgctatcgcccacgtggagcgcctgacgaaaatgggcgtccactcgctgaaaatcgaaggccgcaccaaatccttttattactgcgcccgtaccgcgcaggtctaccgtaaggccatcgacgacgccgccgcgggtaaacctttcgaccctacgctgctggaaacgctggaaggtctggctcatcgcggctataccgaaggtttcctgcgtcgccatacgcacgacgattaccagaattacgagtacgggtactccgtttccgaacgccagcaatttgtcggcgagttcaccggtgagcgtaaaggccaactggcggccgtggcggtgaaaaataaattctccgttggcgatagtctggagctgatgacaccgcagggaaatatcaatttcaccctggaacagatggagaacgccaaaggcgacgctatgccggtggcacctggcgatggctataccgtctggatgcccgtcccgcaggacgttacgctggattacgcactattgatgcgtaatttctcaggcgaatcaacgcgtaacccccatgctaagtag

SEQ ID NO: 375725 - DNA, 723 bp, Salmonella enterica
gtgtggcgtgaatcggttgtaaagattgctgacgatatgggggcgctggcctgttccattgtgccagcgcatccatgggtttacggtctgggacagaacacggattcaggtggttatcttagtccggccaatgcgatgggatatcttgctaaaaagctgttatccggtggcggtagcggtgacgttatcgtcatgatggtggcggaaaatacccacgacgcttttatgcagggactgaataaactgtccaccgtatttccggcccccgtttttacgcaggtaagccgaatggcggcagccgccgcagaactcagcacggtaaaaatgcagttgccggttaaagccgatgtattgccagccagtgcgccgttatccgtctcaaccaaccggctggcgctgaatgcccagcgtgttgccgccgcgcagctggccgccgcagtcagtaccaccacaacagacctagaaaatcaggttacgggatttattcaggaacgggccggtttgctggcctcactcagccagggactggacgacctgaaagctgccagcgcgaatattttttcattcagttacagcggaagttatgccgttgctgccgctgaattgctgaaaggtatcccgcaaacaacggcagtacatactgccgcgatgatgtttatcggggattcgttatctgacttagggaagatgctacatgagccagaccgcattactcgctcttga

SEQ ID NO: 375726 - DNA, 543 bp, Salmonella enterica
atgagccagaccgcattactcgctcttgatggtgaagggatcgccatgcagaacatgctggtttcaccctctatgcagtttcaggagaaggaccagtcgggccagacatcgagcacggccaatgctgaacagggtatcaaggccaaagagctgcgcgtgtcgggtctggtgacatttgacgacgaagccgtcttacagcggcttttccagctggcatccgcaaccgaagccagcggcgcgctaaaaaagtaccgcgtcgccaatgcgacagcaacggctatcaaccttcgtgaagccacgttcaccggtcagattgatgccgtaccgcaggaggatcgccttgcctggcaggtaagtttcaccctgcgtgaaaaaggcagcgtcccggaaaaacgacaggcccgaaaaggcaacgcgacggccagcaccaagcaaacaggggcaaatggcgcgggtccggctgccggtgctgatgaaccagccgacaaaatgagctggtttgaagaaaaagtcttaaaaccggtcaacgatgcactggggtaa

SEQ ID NO: 375727 - DNA, 1725 bp, Salmonella enterica
atgaaaccaattaaacgcctgtacctttcctctgatccggtccatctgattgactgcaatatcgtgctggagctgaatgcgtgcggtcgggggtttattacggcagggacagagacagattacaccggcaaaatggtgcgtattgatgttggctatgatggtctggtcctgcgctggtttaccgggtacgttgaacggtcacagcctgctgataatggaacatgccggttattcgtgcgtgaactggtcggcatctttgacaaattgtggccgtgttcttttcagcatccaacgcttcgccagattactgactggataagtgagcaaagcgggctgaccgtcacaacgccggttggcgctgcttatgcagataaaccgatcccccactttacgcacagcggcacgggctatcagcttctagccagtctgggccgcgcattttcagtcacggattatctctggtatcagctgccggacggggacgtcttcgtcggcgctgcggagcaccgtctttttgcgggtaagccagtggagatcccgcacgaatttagccaggcatcggcaggcggaaattcaatggttgtgccgatgattcagagcctgcgccctggtgctgaggtgaacggccagcggttaaaccaggtccggctaaataacgacgacatgacaatcacctggcagccccgcaacaaagccaacggccagccattgcaaaaatcacccattcagcggcagattgaaaacgcattcccggagctggcaagcggcctgcatcttccaaaattcgccagggtggaagcgccaagcgaggatgtttcagggggtaatattgccgatccattccgcccgcgctatgccgtggatctccagctgcttgacgaagacggcaagccagccgcaaatacgccggtttattctgccgttccgctacctgtaccaatggcggggagtgagtcgggaatgttccagtttccgccccctggcacgctggttgaagtcggcttcacggaggggcggcaggataagccctttgtgcgccagattatggcggagggtcataacctgccagcggttaaacccggcgagcagttgcagcaacagcgcgatggtgtatcgcagcgcgtgacggttgccggagactgggaacgccagacggaccagacaatccgcgaaaactccatgactcgcgaagtcaccagcgacgaagagatccgcaaagtggttgtccgtgaaactacagtccaggcaacggataaaacaaccgtgcttggcacggccacacttctggccggggcggtggtccatatcagcgtgggcgattacagcatcggcacatccggcaacctgacagtaacctgcagcaaggacaattccgtcagtgttggccggaacgtgaaacgggacgtcgcgggcaatgtaacagacgacgtgatagggaatgtcacgtcaaacatcagcggcgcactgaccgaaaaaatcagcggcatccgccgaagtgtggccaaggcgcaacagctgattgccccggtggtaaagctgggaagcgaagagattaacgtcctgacactgctcactgacaccctggacgtggtgagggagctggcagagactgccgcgtcacatactcaccccaatacgggggccagcgggcaggctgcgcagttcaccgcaacggccactaaaaccggcacactgaaaagtaaatacggtcccctgatagcctga

SEQ ID NO: 375728 - DNA, 993 bp, Salmonella enterica
atgaaaatttcatcttctacgccttgtttaaactttgctccacagaaagaatattctgctgccgttgttcctcatccttcaaagaatgcctatgcggattacgttttggagacaggtaagcgaataccgttttccgccgcagatttaagcaacctctaccaaagtgtcatttacgctgtccacagtagtcgtagcaggctcatcgatcagcacacggccaatatgatcggtaacactgtacttgatgccttaagccgatcacagacctttcgtgatgccgtaatctatggcatccataataaggaagtgcaacttggctgcatcacatacagaaacgaatacgagatcaacgaagattcccccgtcggggttgattctattcacttactgacgcatagcgaattgtatgaatacgaggctggtcaagagccaattttacctatttgcgaggcgagaaaagatgaacacgaggaagcctatatcagttttagtgcggcgccagacactgactcgtgtgagatgccctcatggcaggaagggctaattcacgagatcattcatcatgttactggagccggcgatccattagaagatggtaatattgagccaggacccactgaaattctggcacgccgtatagcacaagaattgggatggtcaatccctgagttcaccgggtatgcttccccggatcgtgtagctcatcttaggacgcgcaatcttaatgcccttcgccaaacggcgacacggcatgaagataatgaggaagcttttttcgaaaggctggatgtgattagcgaaggatacgaggcgagcgctgatttcacagagtatcctgttatgtctgacatggtgaaggagctgaacaaaccacatgattttcccgggttagttatcaatgataatacaatggatgcagacccagaccagatccaactgtatcatggtcaaccttatattttcaccttcgtagacaaacataatcagcgctga

SEQ ID NO: 375729 - DNA, 486 bp, Salmonella enterica
atgaacatcgacaaacgtgcgctgcgtgaagtggcggagaaggctacgccggggaattggcgccgcacctcatcactgttcaatggcatcacggtaacgccgttttctctctgcggtgaagaagtgatgttggcccatactgttgagaaacgtgacgcggaatttatcgccgcagccaaccccgccaccatgctggcactgctggatgagaatattcaactccagcggggaaaagacgcaatagaggccgtagcgctggtgctgcgtgatgatatgcgacaggcgcgagagcaactggcagccgcagaaaagcggaacgccgaacagcgtgagtattacgagggcgttattgctgatggaggtaagcgcatagcagaactggaggcgcgggaggtcagcgtttctgagattcgcaagaataaattcatcgagaaaactgaggatgaacttgatggagaccactacactatctgtaaaaatggatga

SEQ ID NO: 375730 - DNA, 450 bp, Salmonella enterica
atgataactgcattagatattgaaaaagtaatcaccgataaagggccaatgagcaacatcaaaggtccgcttatcagcagtcagcgctacctcgacaaggcaaaggtaaacgacagagcggcaagatttaagcgttttatcgtatctgtttacccgatagttctgcgtgggcagcaatacaccatcctgatggatggccaccacaactacgcggcggcaaaactggctggcatagaacctgattaccgaccaatcaccaaaaaggtgcagcgtattctcggtgagatgtcatggcgcgagcgtgaggcattcttcatcaacaacgttacagacagcaactactactttgttgaaacaggcgaagtggttcatgagttggttatgcctgatacgtcctgcaaattccaggcgcacgcaggtaaccaatggatttttggaggtgcagcatga

SEQ ID NO: 375731 - DNA, 702 bp, Salmonella enterica
atgaaaaacattgctacgcagatggttaattttgaccgtgagcagatgcgccgtattgccaacaacatgccggaacagcatgacgataaaccgcaagttgagcaggttgctaaggtcatcaacaacgtgttcagtcagcttatggccgcgttccctgcaaccacagctaatcgcagccaggccgagatgaacgaaatccgtcgccagtgggttctggctttccgtgagaacggcatcaccaccatggagcaagttgcggccggaatgcgtgtcgcccgccgtcaggaacgtccgtttcttccgtctccaggccagttcgtcgcatggtgtaaggctgaattggcaactgctgccgggcttcctgatgccaatgaactggtcgatatggtttaccagtattgccgcacgcgtggtttatacccggatgcagaatcatatccatgggaatccaaagcccattactggcttgtcaccacactgtactcaaacatgcgagctaacgctcttagtgataccgagttgcgccgcaaggcagtcgaagaactcaaccacatggttaccaggataaaccgtggagaggtgatcccggagccagttaagcagcttcctgttcttggtggcagaccactaaaccgcgcgcaaaacctcgcgaagattgcagaaattcgggccaaattcggactaaagggagtcagatcatga

SEQ ID NO: 375732 - DNA, 906 bp, Salmonella enterica
atggcaaacactgccgaagtaatcaattttcctgtgcctgacgtggcacctaaggagccgcgcgtggcagatctcgatgatggctatacgcgcctggcaaatgaacttctggatgccgtgatgtgttctggtttgccggagactgagctgtgcatcctgatggccgtatggcgcaaaacgtatggatacaacaagaaaatggactggatcagcaacgaacagctagaggagatgattcagaagcatcatacccattgctcgacagcaaaaaacagtctgatcaggaagaaggtattgattcaggaaggccgcagggttggtatgaatatccatatttccgagtggcaaactaaaaataacggattctgcaaaacattagctaaacctgctaagaaaaccttagcggaagttgctaacgcacctaagcagaagttgctaaccacaaaagacaaactaacaaaagacaatattaaaagatctacgtccgagaattctgacgaatcctctgacaagccagcaaagaaacctcatgttctaaaacccgaagcagcgattcagagaggcaacaagtggggaactgctgaagacctaactgctgccgagtggatgtttgacctgataaaaaccatttctccatcagccagaaaacctaacctggcaggatgggctaacgatatacgcctgatgcgtgaatgtgacggacggacacatcgcgacatgtgcgtgctgtttcgctgggcgtgccatgacagcttctgggctggcaacgtcattagcccggcaaagctccgcgaaaagtggactcaactcgatatcaaccgcaacaagcaacagactggcacaactgcctctaagccaaaacttgacctgaataacactgactggatttacggagtggagctatga

SEQ ID NO: 375733 - DNA, 411 bp, Salmonella enterica
atgagttacggcctgacttgtatccaaatccaacagatgcattaccaagccaagaggcatcagccaaataaccatagaggatatttacccatagagaacgcaattgcacgaaagttagacccaccagaaatcaacccgattgagatagagagtgtcctgctcaaccggcttgcatcagtagggcagaaatcatacgccgagcatatgggcatcagcgagtcgacagtcagcaggcgtaaagctgagggatatttctgcaacatggcgaaagagctggcttttcttgggattcaggccgcgccaccggaagcggtactggtatccagaaactatctcacagccgtagagattctcgctgatgccgggctaaaggctgaacgagccaggccggatgcgctggggtgggactga

SEQ ID NO: 375734 - DNA, 504 bp, Salmonella enterica
atgatggttatagccctagcggcaacgcttattctttatgcatactggtatacatgccgggcgactgctctcgatgaaaaagagaaactgtcaaaaattacaattgattaccttaatgacgatactgccccaagcaaaatgaaggatatggcttatttttcatatctaggtgccggaaaatggtggttttttcctactgtatgcctccttgcccctatcgtattgttgctcacaaaggaaaaacacccggccccatcaaaccagttaatcaacaaaggtgacaaggttagctttcaggatgttatggactccgtcgtgtcggttaacatgaagcgtcatccagtgatatcaatatgtttcgccgctattgccatacttctttccatagtagcgatcctgacaaaggttgcttttggtggaatcaaaaaaataccaagctttagctcaagcattttgcatgtaatagacttcatgcatacattaggaaaaaaatcacactcctaa

SEQ ID NO: 375735 - DNA, 201 bp, Salmonella enterica
atgaaagccaccagctcagtacctaacagcgggcgcgccgtcccaatgcgaaacatccgtaccggcgcagcatggcaggtttcattcgactaccgagatggcacctactggcacgaaccacagggcaacctgcgcaacattcgccgaccttatgcctcacgcaccattgaaccaaatctagtgcctgcggggactcactga

SEQ ID NO: 375736 - DNA, 198 bp, Salmonella enterica
atggggacactgtacgcattagtgctgaccatcactatgacgaacggtgattaccaggatgctgttgtcggtattttcgacaaccagcagcaatgtgaagcggcagcgagtgagcaaatgggcgtcactaactgctatccagtcgaaggcatcatacatgctgacgaaacaccagcaggttatgaggcgaaattttga

SEQ ID NO: 375737 - DNA, 273 bp, Salmonella enterica
atgtgcaactgcattaatgaggtcggtgctcagatcgaagcacgactgaaagaaaaggttccggaaggtgcagaagtaagcgaaagcacttttgataccggttgggataatcaggttctttctctttccgaaggcaagctgtttgtaatgctgaaatacaaactggcataccgggccaaaaagaaaaacggcgaaatggctaaaaaccttaatcgcctggaaactaacgcaaaaatgaatttctgcccgttctgcggcgaatcgcagggctga

SEQ ID NO: 375738 - DNA, 297 bp, Salmonella enterica
atgaacgcatatctcacttatgaccggatcgaggctcagaactggacccggcattaccagcaaatcgccagagaagagaaagaatccgagctggctgacgacctggagaaaggactgtcgcttcacatgctggagtcgctgtgtatggacgagctaccgcgtcacggcgccaacaaaaaagcgataagccggtcatttgatgacgatgtcgagttccaggagcgcgcgtcggagtttgtgcggtacatggccgagacgttttcccggcatcaaattgatattgaatcagaggaataa

SEQ ID NO: 375739 - DNA, 744 bp, Salmonella enterica
atgagcacagccctttcaactatggccgggaaactggctgctcgtctcggaatggatgccgggacagacctcatgaatacactgaaaaacacagcgttcaaaggtggcaatgtcaccgacgaacagttcaccgccctgctgattgttgcgaaccagtatggactcaatccgtggactaaagagatttacgcctttcctgataaaggggggatcgtccctgtcgtcggcgttgatggctggtcccgtattatcaacgaacatccgcagtttgacggaatggaattctcctatgacaaggaggaaggcgcgtgtacctgcaaaatttaccgcaaggatcgcagtcatccgaccgttgtcaccgaatacatggatgagtgtaagcgtaacactcagccctggcagtctcaccccacacgtatgcttcgccataaaacactaatccagtgtgcacgactggcattcggttttgccggcatcttcgatcaggacgaagcagagcgagtaattgagggtaccacagcagaggttcatatcggacatgagtcggatcaccgatgccctgaactgattgcaaaaggtgaacaggcagcccgttctggcgcagaagaattcaaaaaattctggctaagccttggtaacgaggaacgccaggttatcgggaagacagagaagaaacggctttacgaaatgagcctgacatctgaaggcgccattgaaggccaaacggttgaaggagatgaatga

SEQ ID NO: 375740 - DNA, 621 bp, Salmonella enterica
atggagcaacgttcaccggaatggtttgccgctcgatgcggcaaagtcacagccagccgactttatgatgtgatggcccgagcaaagtcaggttatgcggctagccgccagaactatatggcagagcttatctgccagcgcctgaccggaaaacttgaggaaggatttaccaatgccgccatgatgcgtggtactgaacttgagccagtggcgcgtgagatgtatgcgctgaatgagttcgacgcggtaatctcagaggtaggattgattgaccaccctactattgccggatttgccgccagcccggacgggctcgtaaatgatgacggcctgattgaaatcaaatgcccgaacacctggactcacctccagacgctaaaaacaggcacgccaaaacgtcagtaccttctccagatgcatgctcagatgatgtgcacagggcgaaaatggtgcgattttgtcagctttgatgatcggctgccgccagaacttgcctatttcaaaactcggatcaacttcgatgaagttctggccgccgaaatcgaacaagaggtcgttaaatttcttgcggaactggaaacagaaatacaaaacataacgcatcaggagagcgctgcatga

SEQ ID NO: 375741 - DNA, 897 bp, Salmonella enterica
atgagatacggatctgtttgcagtgggattggcgggcgcatagcgactgtgttgccagttgaaaaaagtgttccgcgcacctggcgccgcccgttcctgaaatgggcaggcggtaaatattcgctgctgccggaactggatcgtcttatcccggctggtaaacgactgatagaaccatttgtgggcggcggatcggtgtttctcaactcagataaacacgaatacttcctgctggctgacattaatgctgatctgatcaatctgtaccagatgctggccgtagtgcctgattcggtaatcggtgaggcaataaaagctttctggcatctgaatgatgtcgaaaactacacagtaattcgtgaagcattcaacgcccagaaactgaatgcgccagaaagagcggccgcattcctttacctcaacaggcactgctttaacggcctgatgcgttacaaccttgacggttttttcaatgttggatggggaaagtataaagccccatatttcccggaagaagagatcagggcattcaggctgaagtctcacgcgtgcgtatttatgactgcgggtttcgaacgtactctcaggctggcgggtgatggtgatgtcgtttactgcgatccgccatacgaaccgatgcccggcaccgctggattcactagctacgcctccggtgggttctcatgggatagccaggtagcgcttgctgaaagctgcgtggcagcccatcagcgtggcgcaaaggtgtttatcagtaattctaccgcaccacgcgttattgaactttacgagcagcacggcttcaccctgcaccgggtcaatgcccgcagatcaatatcgagtaaaggcagtacccgagaaacagcgaacgatatcgtcgcctcactgggaatttag

SEQ ID NO: 375742 - DNA, 243 bp, Salmonella enterica
atgatgaaacttattaacagaagcaagcaatcaccagtcggtcgtcgcgcatgtgatgttgcactggctgcacaccatgagaaattcggcgattacggcagacaaaagcacgttaccaattacaccgttgtagtggatggcgtaaaggttcctgtcgaagtagttaaccgggccaccagctacgtagccaccgcaatgatcggcgtccggaaacttagaaatctgcccgcacaggcaaaatga

SEQ ID NO: 375743 - DNA, 348 bp, Salmonella enterica
atggaagaagaagtattcaccagagatgaggccgccgccttcctgaaagtggataaaggcacgattgcccagtggattaagtctggtcgcctggctgcaacccgaataaatccacataagaaaagaagcccatacctgatctgtaaaacagattgtattgcggcagtgaagaacccgatccacaatcaatccgtgaatgcggttgatgtgcaggaggataaagcatgtcaatcaaacaacgtgccggtacgtggcactgtgacttcgttacgcctggtggaagccgaattagacggtctcttgggacaacggacaaaaggcaagcgcaggaactctatgaccagctaa

SEQ ID NO: 375744 - DNA, 1014 bp, Salmonella enterica
atggaggagtttaagccacgaacatttgatgaagcatgtgttcgctggcttaacgaaaagcagcacaagaaaagcctggacgatgacaaaagccggatcggattctggaggatgcacttcaaaggaatggacctgtcagcaattacggaggacaggatcttgtcggcggtaagttcgatggtgaatcgcaagcatcgaatgaactgggaggctaaacgtgacagcctgctgcgaagaggcaaaccggttcctgaatttaaggataaaccagcgtcgctggcaacgaaggcgacgcaccttgcctttatccgagcactgttacgatgcgcggccaacgaatggcgatggatagccaaagcgccgaacatcaaatgtccagtgccgaaaaacaagcgtattcgctggttaaccaaagaggaagcggcgaacctgatccgggagcttcccgagcatatgaagccagtggttatttttgcactggcgacggggctgcgcaggtctaacataacagatctggagtggtcacaaattgatatgcagaggaaggtcgcgtggattcaccccgaggatgctaaagcaggaagggcgattggggtcgccctgaacgaatcggcctgtaaggtgttgcgggatcagctggggaaacataaccggtggatctttgttcacactgaatcatccgttcgcccggatggaacgagaacaaaggcggtgcgcaaaatgcggcctgatgctaacacggcatggcgcgcagcgttaaggcgggcgggaatagaaaatttccgcttccatgacctgagacatacctgggcgagctggcttgtacagtccggcgtgccactcagtgcgctacaggaaatgggtggctgggaaagtatcgagatggtgcagcgttatgcacatctggcaccgaatcacctgacgcaacacgccatgcaaatcgactcattcctggcgggaaatggcacaaatatggcacaaggcgctttttctgaactggtgaacatcgcgtga

SEQ ID NO: 375745 - DNA, 183 bp, Salmonella enterica
atggaaaacccccagctaggctgggggttccggaaagctttcagctttaagccagttattaaaaccccttttgatttgttaaaacatcttgcggtctggcaactgcaaaagttcaacaagaaatcaaaagggggtcccaatgggggacgaaaagagcttagcgcacacccgatggaactgtaa

SEQ ID NO: 375746 - DNA, 402 bp, Salmonella enterica
atgaaattcaagagtatcgttaaaactgtttttctttttgcactgctaacctcagctggctttgcgactggtaaaaacgttaatgtcgaattcgataaaggacaaaatagcgcccgctattccggcgtaataaagggatacgattacgatacatataacttccaggccagaaaggggcagaaagtacatgtaagtatttcgaatgaaggcgcagatacctacctgttcgggccaggaattagcgattccgttgacctgtccagatattcatctgaactggatgacaatggccagtacacgctaccggcgtccggaaaatacgaactgagagtacttcagacacgtaatgaagcccgtaaaaacaaagcgaaaaaatacagcgtcaatattcagataaaataa

SEQ ID NO: 375747 - DNA, 1932 bp, Salmonella enterica
atgatttccggagagcgcagggcgaataatgccaacagagccataactaacgggctgatagcgcttcatattcccgtaccgcttaccaccgtgcagtgggctgatgagtattactatctgccaaaagagtcctcctacacccccggcaaatgggaaacgctgccgtttcaggtagcgataatgaacgcgatggggtatgaactgatccgcgttgtaaacctcattaagtctgcccgcgtgggctataccaaaatgttgctgggggtagaaggctatttcatagagcacaagtcgcgcaacagcctgctgttccagccgaccgactcatccgctgaggattttatgaaatcccacgtggagccgactatcagggatgttcctgtattgctggagctggccccctggttcgggcgtaaacatcgcgataatacgctcaccctgaaacgcttttcttccggtgtagggttctggtgcctcggtggtgcagcagccaaaaactaccgtgaaaaatcggtggatgtggtctgctatgacgaattgtcatcttttgagccggatgtcgagaaagaaggttcgccgacgctgctgggggataaacgtattgaaggttctgtctggcctaaatccattcggggctccacaccaaaagtcaaagggtcatgccagattgaaaaggcggcaaatgaatcggcgcattttatgcgttttcatgtaccgtgtccgcactgtggcgaagaacagtaccttaaattcggtgatggcagtacgccgttcggtctgaaatgggaggaaagcaagccggagacggtgtattacctttgtgaacataatggatgcgtgatccgtcaatcggaacttgatcagaaagcaggccgctggatttgcgataacacaggcatgtggacacgcgatggactggcttatttcagcgcgtccggtgaggaggttcctccgccacgatccattacctttcatatctggacggcttacagtccctttaccacctggatacagattgtttatgactggctggatgcgctgaaagatccaaatggtgtgaaaacctttataaacaccaccctgggcgagccttatgaagaggcggtggccgaaaaactcagccatgagcttttgctggaaaaagtgattcattatgcggcgccggttccggagcgggtggtgtatctgaccgctggtatcgactcccagcgtaaccgttatgaaatgtatgtctggggctgggcgccgggcgaagaggctttccttattgataagcaaattatcatgggacggcatgatgatgaagataccctgcagcgtgtggatgccgtcattaataaaaaatatcgtcatgctgacgggacggatatttccatttcccgtatctgctgggatatcggcggtatcgatgcagaaatcgtctataaacgctcaaaaaaacacggcattttccgcgtgctgcctgtcaaaggggcctccgtttacggaaaacccgttattaccatgcctaaaaaacgcaaccagagcggggtattcctgtgcgaaatcggtactgatactgccaaagaaatgctttacgccagaatgggggcggttactgcgcctgccgacgaagccacgccttatgcgatccgctttccggataatccggatgtttttacggaggtggaagcgaagcaactggtagccgaagagctggtggagaaactggttaacggaaaattccggctgttatgggatgccaaaggacgtcgtaacgaagcgctggattgtcttgtctatgccagttcagcgttacgggtgtctgtgcagcgctggcaactggatctggaggcgctggcgacatcaaggaaaagcgaagagcaggataccccgacacttgaacaactggccgcaatgctggcaggaggagttaatggcaacaatcactga

SEQ ID NO: 375748 - DNA, 1497 bp, Salmonella enterica
gtgcaacgtaatctcccgcacatcatcagccaggcaaccagtgctccgttgctgcttgaacccgcctatgcgcgggttttcttttgcgcgttgggcagggagtcaggcattaacagcctgcacattcccggtaataacgaaagtctggatcagtcggatatggcactggtcacaggcaattttatggcgaccggaaagccgcaggcacgtttttatcaggtagtgaacggtattgcggtattacccgtgaccggaacactggttcataaactcggcggaatgcgtcccttttcagggatgaccggctatgacggtatcactgcccggctacaacaggcggtttcagatccggaggtaaaaggcattctgctggatattgacagtcccggcggtcaggctgccggggcgtttgactgtgctgacatgatttaccggatgcgcgaacataaacctgtctgggcactggcaaatgaaacagcctgttcggcggccatgttgctggcggcagcctgttcgcaccgtcttgtgacccagacgtccagaatgggatcaattggtgtggtgatggcgcataccagctacgccgaaaaactgaaacaggaagggatcgatatcacccttatctattctggcgcacacaaggctgatctgacgcccagccagaaattaccggaaagcgtctatgccgactaccagcagcgaatggacgaggccagaaagatgtttgcagaaaaagtggcccggtacacggggttgtctgtcgatgcggtaatggcgacggaggcggcagtgtatgacgggcaggccattatcactaccggactggcagatggaatggtgaatgctgctgacgccatcggcgtgatggcagaagctatcaacagtaacaagacaggaggcactatgcctgaattaagtgcagctgacgctgtcacgcaggaaaatcagcgcgtaatgggaattctgggttgcccggaggccagggggcatgaggcactggcacagatgctggccgggcagccgggaatgagcgttgctcaggcgaagtctattctggctgccgccgcgccggcggatacgaccagcaccgctgaccgtatccttgccctggaagaagctggtggtcgggaaacactcgcacagacactggcggccatgccggagatgacggtggaacaggccagaaccattctggcagcatcgccgatcgctgcggcaacgtcacttcatgatgccgtgatggcgcttgatgaggcgaaaggccgtgaagagttggcggaaaaactggctgtcatgcctggtatgaccacagatcaggcccgtgacctgctggctgccgcgccggacaaatccggtaatgcggggctgaacatgaacaacgcatttgatgctttcatgcagtctcattccccgtgccccatatccggcggcaaaggccacagtaatgataccgaaacgacgttgttgatgagtattcccggtacttcagccacctga

SEQ ID NO: 375749 - DNA, 606 bp, Salmonella enterica
gtgcagcagctctccgtcgccgcagtaaatcgctgcgtggttcggaacggaggagccaaagcagcaaatcaacacgtcgccgggctgcgcactggctgcgctgacacggtaaaaccccgtcgtctccagattatccagatagagattgtcaccatgccgccaccagtcgtcgtcccggtgaaaatccggcatatcaatccccgccagatgataggcatcacggaacagcgtgtaacagtcaaaaaccccatgtttataatgccgtccggtcaggtgtggcacacagcggaatttatgtacctggccggcgcataccagccaccacggcaggtcgctttgaacctgcagcctgcggtccacatcgctcagatacggctggccgccaggatggctgtgaaccagcgccacaatatccccctgcgtttcagccctcagccagtcctccggcgccatacggaaataatcctccggcgcggcagaaatattcacacaggggagataccgttctcccgcctgtgttctcaccacgaagccgcacgactccgcaggcgcacaccgtcgggcgtgcgccagaatatcctgttctttcatgatgatttactgtga

SEQ ID NO: 375750 - DNA, 648 bp, Salmonella enterica
atggcaacgacgcacgcactccatctggcgacaccgggcatggcgcgcatctgcctttacggggatctgcaacgattttgccgccgcgtcagcctgcaggtagccagtggtgctgaagctgtccgggcactggcggtacagttgcccggtctccggcagaaactgaacgacggctggtatcaggtacgcatagccggagacgatgttacggctgataccctgacaaccagcctgcatgacccgctgccgcctggcgcggtgattcatattgtgccgcgtctgggcggggccaaatctggcggggtgtttcaggcggtgcttggtgcggcgctgattgccgttgcctggtggaacccggcaggctggctgggagcggcggcggtatccggtatgtatatgaccggggcgtcgatggttctgggcggtgtggcgcagatgctggcaccaaaacctaaaatgtccgaaatgaggcagaccgataacggcaggcagaacacgtatttctcgtcgctggataatatggttgccaacggtaacacgttgccggtgctgtacggcgagatgcaggtggggtcacgcgtgatttcccaggaagtcagtaccgctgatgaaggagatggtggtcaggttgtggtgattggccgctga

SEQ ID NO: 375751 - DNA, 3363 bp, Salmonella enterica
atgggaaagggcggcggaaaagggcatacgccccgcgaggcaccggataaccttaaatccacgcagctgctgagcgtcatcgatgccatcagcgagggaccgatagaaggcccggtgaacggtctgcaaagtgttctggtaaaccagacgccggtggtggaccgcgacggtaacacgaatatccacggcgtgaaggtggtataccgcgtcggtgagcaggaacagaccccgctggagggatttgaatcgtccggcgccgagacggtgcttggtgtacaggtcaaatacgacaatccggtgaccagaaccatcacggctgcaaatattgaccgcctgcgttttacgttcggcgtgcagtcactggtggaggccaacagcaagggcgaccgcaatccgacatcggtcaggctgcaaatccatcttgagcgctatggtcagtgggtggtggaaaaagagattacgattaccgggaaaacaaccacacagtatctggcctcggtgatagtggataatctccctccccggccatttggtatccggatggtacgtgtgacggcagacagtaccactgaccagttacagaacaacacggtctggtcgtcgtataccgagattattgatgtccggcagcgctatcccaacaccgccgtaattggcctgcaggtggagtctgagcagttcggcagccagcaggtgacgcgaaattaccattttttcgggcggattattcatgtgccgtcgaattacgatccggtagcgcgaacctacagcggcatctgggacggcacgttcaagcctgcatacagcaataatccggcgtggtgtctctgggatgtgctgacacatccccgttatggcatgggacagcgaatcggcgcggcggacgtggacaggtgggcgctgtatgcaataggccagtactgcgaccagatggtccctgacggattcggcgggacagagccgcgtatgacctttaatgcgtatctggcacagcagcgtaaggcgtgggatgtgctgaccgacttctgctccgccatgcgttgtatgccggtgtggaacgggcagatgatgaccttcgtgcaggacaggccctcggatacagtctggacctatacccgcagcaatgtggtaatgccggatgagggcacaccgttccgttacagcttcagtgcgcggaaggaccgccataatgcggtagaggtgaactggatcgaccctgataatggctggcagacatccacggaactggtggaagacacggtcgccatcagtcactacggacgcaatctggtaaaaatggatgcgtttggctgtaccagtcgcgggcaggcgcaccgcgccgggctgtggctgataaaaacggagctgctggaaacccagacggttgattttagtgtgggtgcggaggggctgcgccacgttcccggtgatgtgattgaggtttgcgacgaggattatgccggcatcagcctgggcgggcggattctgtccgttgaccgcgcccgccgcattctgacccttgacagggagattaccctgccgtcgtccggcaccacgctgataagcctgatggatggcgaaggcttgccggtcagcgtggacgtgcagtctgttaccgacggtgtgcaggttcaggtcagccggataccggacggcgtggcggaatacagcgtctgggggctgaaactgccgtcgctgcgccagcgtctcttccggtgtgtggctgtccgggaaaacgacgacggaacgtatgccatcaccgccgtacagcatgtgccggaaaaagagtccatcgtggacaacggggcatcattcgatccgcaacccggaacgattcacggcaccgttcccccggcgatacagcatctgaccacagaaattctggcggaggagggacagtatcaggtactggcgcgctgggacacaccgcgagtcgttaagggcgcctcgttttctttgcgcctgaacgtggcggcggaagatggcagtgaccggctggtaagcagcgcaggaacgccggatacgcagtaccggttccgggggctgacgccggggcgctacaccctgtccgtcagggcggtgaacagccagggacaacagggagacccggccagcacacagttcagcatctccgcgccggcggcaccatcatttatcgaactcacccctggctatttccagattacagccacaccgcgtcaggcggtatacgacccgacggtgcagtatgagttctggttttcagacgcgcagattacggatatccatcaggtggaaaacgccgcacgatatctgggaacggcgctgtactggatagcggccagtgtgaatatcaggcccggcagggattactatttttatatccgggcggtaaatcaggtcggtaaatccgcattcgtggaggcgaccgggcaggccagcaacgatgccgcaggctatctggattttttcaaagggcagataactgaaagtcacctgggtaaggaactgctggagaaggtggaactgacggaggataacgccagcaaactgcagcagttttcgaaggagtggcaggatgctaacgataaatggaacgccatgtggggcgtcaaaatagagcagaccaaagacggcaaatattatgtggccggacttggactgagcatggaagacatgcctgacgggaagataagccagttcctggtggcggcggatcgcattgcttatattaacccggcaaacggaaacgagacgcccggattcgtcatgcagggcgaccagataatcatgaatgaggcgttcctgaaatatctgagcgcgccgaccattaccagtggcgggaatcctccggcattttccctgacgccggatggaaagctgactgcgaaaaatgcggatatcagcgggcatatcaacgctgtatctggctcgtttacgggagaaatcaatgccacctccggtaagttttctggcgtgatagaagcaagagagtttgtcggtgatatctgcggctcaaaagtcatgcagggcgtgagcatcagggagacgaacgacgaacgcagcacctcaacacggtataccgacagcgccacctatcagatagggaaaaccatcacggtgatggctaactgtgagcgtaacggtggctccggtgccatcaccgtcacgataaatattaacggccaggtgaaaacggcggaggttatcccgtataccgcagggcttccggccatgtatcagaccgttgtcttttcggtctacaccacttcacctgtcgtggatatcagcgtttctctgagggttcgtgggcagtacaccacgtctgcttccgtctggccgctggtgatggtttcccggtcggggaacaacttcacaaactga

SEQ ID NO: 375752 - DNA, 243 bp, Salmonella enterica
atgactatgtcgcgcgtaatttcgctggcggcaggggtttccctgtccgttttattttccaccgctgccgttgccgataacggaagaggaagcggtaacagcaatattgaaaaccagacccggatttataccggtactgaccgcgggcagaaacagcaccgcgaggcaaagggacaaataatcacgcggagcgtccagtgttcgctgccggcatatttacgtgacccggataatcagtgctga

SEQ ID NO: 375753 - DNA, 2373 bp, Salmonella enterica
atgccagtacttatttccggcgtactgaaagatggtacgggaacgccggtacagaactgcaccattcagctgaaggcctgccggaccagtacgacggtggtcgtgaatacggtggcatcggaaaatccggatgacgccgggcgctacagcatggatgtggagcaggggcagtacacagtcacgctcctggtggaagggtatcccccgtcacatgccggagttattacggtctacgatgattcaaaaccgggcaccctgaatgattttctgggggccatgacggaagacgacgtccgcccggaggcgctgcgacgttttgaggcgatggtggaagaagttgcccgccaggcatcggaggcatcgcggaatgccaccgccgcagggcaggcatctgaacaggcgcagacatcagcaggtcaggcagcggaaagcgccacggcagcagtgaatgcagccggagcggcagaagcatcagccacacaggcagcctcatccgcagcatctgcggagagcagcgcaggtacggcgaccacaaaagccggggaggcatcagccagcgcggcgtcggctgacacagccagaacggcggcagccgcatcggcagccgcagcgaaaacatctgaagcgaatgcagatgtctcccgtactgccgccggcgattcagctgctgccgcagccgccagcgcgacggcggcgcagacatcagcagcgcgcgccggagcatccgaaaccgccgcgaagacgtcagaaacgcaggcggcttccagtgccggtgatgcaggtgcgtcagccactgcggcggcagcgtcggaaaaggcggcagccgcatcggcagccgcagcaaaaatatctgagacaaacgctgcaacgtcagcaagtacagcagcggccagcgcaacagccgcctcgtcatcagcatcggaggcatccaatcacgccgccgcatctgataccagcgcatcactggcggcgcaaagcagtactgctgccggagcagcagccaccagagcagaagatgccgcaaaacgggcagaagacatcgcggacgtgatttccctggaagatgccagcctgacgaaaaaaggtatcgttaagttaagcagcgccacggacagtgacagcgaagcgctggcagccacgccaaaggcggtccatgctgtcatggacgaggtacagaccaaagcgccgctggacagtccggtattcactggaacgccgaccacaccgacgccgccagatgacgctaagggacttcagactgcaaacgctgagtttgttcgtaaactgattgctgcactggtcggttccgtacctgagtcgctggatacgctgcaggaactggctgacgcgctgggtaacgatcctaattttgctaccactatcactaacatgattgcgggcaagcagccgctggacgatacactgacggcgctgtcaggaaaaagcattgaaggtcttatcgaatacgttggtttacggagcacaattgataaggctgctggtgcgttgcctgctggtggtacggctgtcgcagcgaacaggcttgcatcacgcggcgcgcttccggcactgactggcacgacaagaggcagcgatggcggcctgataatgggcgaggtctacaacaatggctatccgacgcaatacggaaatattttacgtctgaccggaaccggtgatggggaaatcctcattggctggagcgggacaaatggtgcgccagcgcccgcatatattcgcagccatcgagataccgccgatgctgagtggtccgaatgggcaatgctttacaccacactaaacccacctccggattcgcatccagtaggggcggcgattgcatggccatctgatgctactccggcaggttacgctctgatgcaggggcagtccttcgataaatctgcttacccgttactggctatagcgtatccgtccggcgttatccctgacatgagaggctggacaataaagggtaagcccatcagtggacgtgccgtattgtcgcaagaaatggacggcaataaatcgcactcgcacaccgcgcgggcgcaggatactgacttagggacaaaatctacctcatcttttgattacggcacgaaatcgaccaataccacgggcaaccatactcaccagttcggcggttatatcaattcatactggggagactccaatcacacctcatttcagcctggaggtggtgcatggacacaggccgctggcgaccatgcgcatacagtttatatcggaggacacgagcacaccatgtatatcggtccacacggtcacgtcgttattgtggacgcagacggtaatgcggaaaccacggttaaaaatattgcatttaactacatagtgaggctggcatga

SEQ ID NO: 375754 - DNA, 267 bp, Salmonella enterica
atggctggcaagacagtggaacgactgaagaaacttatctggcttgcagcgcaggatgtcaaatctgaattagccgggcgtgaggtttatcaatataaagatttagcgggcctggtaggcgttagcgaaaagaactggtcagaaaccttcaccagacactggctgaccatgcgcacgatatttctgcgtcttgatcaggcgtctcttttgagtgtatcggactcgcgttcggaacaggtggctttcaacctatacgcacttaattga

SEQ ID NO: 375755 - DNA, 567 bp, Salmonella enterica
atgaccactcaaatctctgtcgaaactctttccccgattacccataaccaaattcccgttattactaccgaacttttggcgtacttatacggcacaaaaatcaaaaacatttctgataactttctgaacaacaccacgcgattcgttgtaggaaagcatttttttaaaattgaaaaaagcgaattacgcgagttcaagaacagacccgaaacaatcgggttagttggtaaaaatgcccgttccctaatcctctggacagaacgcggcgctgcccgccacgctaaaatgctcgaaaccgatcaggcatgggaagtattcgagaagctggaggattgttatttcaaccagaagcaacctgtttcagcacgtcagtcccatcccgcgattccatttccgaaagaacggcgtttcattgtaacggtgtcccctgacggtactgttgatacccaacctctgcctgacgacgtatttatcggcaaagtatcgagcatattaagtgaccttcgccagatggggtggataatcatcaaacgtgaccggctggttgagacactggcgacgtggtga

SEQ ID NO: 375756 - DNA, 474 bp, Salmonella enterica
atggatcctgatatcgaaattgatgatgatacctatgatgaatgccgtgaggtgctatcacgcatacttgaagatgcatacactcaaagcgggacattccgcagactgatgaattatgcctacgatcaggaattgcatgatgtagaacaacgctggttgctgggagccggagaaaactttggtactaccgtaactgatgaggacctggagagttcagaaggcagaaaagtgattgccctcaacctggatgatacagacgatgattcaataccagagtactatgaaagtaatgatggcccacaaaaatttgatacaacacgctcatttattcatgaagtagtacacgcgttgactcaccttcaggacaaagaagacagtaatccaagaggcccggtagtcgagtataccaatattattttaaaagagatgggccacgcagcacctccaagaatcgcctacgaatttagtaattga

SEQ ID NO: 375757 - DNA, 348 bp, Salmonella enterica
atgaaaatgcacaacgatccccaatcatggcagggctggctggagctattccagagctggtggcgaggagatacgccgctgggcgctgttctgatgtcgttatttatggccggtctgcgtattgcctattttggcggtaacggtggctggaagaaaaagacactcgaaatcctgctttgcggcgccctgacgttgaccttctcatctgcgctggaatatttcggctggcccaagtccctgtctgttgcaattgggggcggtgttggtcttatcggcgtggatgcgatccgcggcttcgcaatgaagtttatcagtggtcgtatcggtggggataataacaaggtttaa

SEQ ID NO: 375758 - DNA, 615 bp, Salmonella enterica
atgaacgattctcaatttaagcaggcggctggtatcagcgccgaactggccgcgcgttggtatccgcatattacggcggcaatgagcgaattcggtattactgcgccactggatcaggccatgtttattgcacaaacgggacatgaatcagcaggatttactgttctgaaggaaagcttcaattattcagtggaggctctgaagaagacgtttggtaaacgccttacgacttatcagtgcgaaatgctggggcgtattgatggtcgccaggtggcccaccagccgcaaatagccaatctggtttacggtggccgcatgggtaacaaagacgccggagatggctggaagtatcgcgggcgtgggcttatccagattaccggtcgtgacaattaccacaagtgcggtgatgcgctgggtattgatttattgctggtgccacaactgctggagcaggaaggatatgctgcccgatccgcagcgtggttctttgtgactaaagggtgtctgaaatactcctgcgacatggtacgcgttacgcagataatcaacggagggcagaacggtattggtgatcggcgggagcgctttgagaaagcaaaatcggtgctcgtatga

SEQ ID NO: 375759 - DNA, 543 bp, Salmonella enterica
atgatagtactgctgaaattgcttaaaaaattctggaagccattagcagaaatactgctggtggcttttttgttatgtgctggtgcgtactggtgttattcacgaggttatcagaaggcggatacatcctggaaattccagtgggcgcaacgagaccttactgatgcgaccgctgcattgcagcgtgaagtaaccgaaagagcgaaagaacagcgtcgccagcacgccgcagatgaagaacggaaaagagccgatgaagaactggcaaaaatacagggcgatgctgatgctgctgagcgtgctcgcagtgggctgcaacagcagctcgcagcagtacagcggcagctcgcaggaagtgaaaccggcaggctttccgcccttgccgcagcaggccaggcaaaagccgagaccggaatactgctcgcccagttgcttggcgaagctgacgagctggcgggaaagttcgcaaaagaggctgatgagcgttatgtcgccggaagtacctgcgagcgaacatacgaaaccatgaccgttggtaattaa

SEQ ID NO: 375760 - DNA, 414 bp, Salmonella enterica
atgagtgaagaagtagaactacagcacgtgttggctctgaaagttaaagaccaagacttgatgtttcttaatgacattgtcaaccgaactaactgcggaatcggcatcacgctgtttgtgaaaggaaatgtgatttctggttctctaattgcaggaagaaaatattatggatttgtttctgaaaatctaaaagctattggttctgtaggagaggctttatcacagtatttcgaaaataaaggaacgaacggctatacaagtgataagccagacttcgaatacccaaacaactttttgcatcttgagaatgtcaaagttcggagcgatcaaggaacaatgggcgcactacaaaatgcgatgctaagagtaaaaattgacgaagtcgaaggtcatattttagggaacgttagctaa

SEQ ID NO: 375761 - DNA, 972 bp, Salmonella enterica
atggcaaaaccggactggggagcactgcaacaccagttcctcgccgagcatgctaaatccggtatatcccccaaagactggtgtgaagcgcagggactgaattacgctactgcccgccgttacatcaagaaaccgactgcgcaaagtgcgcaacaaaatgcgcagaaaaaaatgcgcactgctcaggcaaaaaaaagcgcagaaaaacttcttaatagtgaactcactccccaacagaaacgctttgtcgctgaatacctcatagaccagaacgcaacagccgcagccgaacgcgctggttacagtgacgcaagttacggaagacagctcctaacattacctcacgttgcgcaggcaattgcgcagcagcaaagagattcacttgtgcgcactttggcgagtgcagatgaagtgctcgaaaagatgtggcagctcgctacgttcgacgctaacgaaatctcgcaatatcgccggggatgttgccgttactgctggggctttggtcatcactatcaatggcgtgatgttatcgagttcgaagagagggaagcggaggcaaaagccaaaaaagggaaagaaccggacgatgctggcggatacggctacaaccacaaccgcgagcctaaccctgactgtccccgatgcaatggtgatggagtaggacgacctcattttgctgataccaccaaactatccccgatagctcgcctggcatattccggtaccaaactggtgaagggcggtatcgagatatcgaccatcagccgcgaaaaaatgtttgaagcgattatgcggcgtctggggctggctgaatccgaactggcgcaacggctgctggatctggaaatccgaaaacgcaccgccgaagccgaacgtctggaacaggaagttgagcttaagcgtaaaggcaagggcaaagccgacgagccgacagtggtcattaaactggtgaattcccctgatggcgactga

SEQ ID NO: 375762 - DNA, 1272 bp, Salmonella enterica
atggcgactgaacatgttattgagtttctgccgttccatgcggggcagaagaaaatttaccgttctccggcaaagcgcaaagtcatccgagccgggcgccgcttcggtaaaaccacgatgctggaacaggctggcggaaactgggcggcgcgtcagatgcgtgttggctggtttgctccgtcttataaaatcctgttgccgtcgtttaagaccatccgtgacctgttaaagccgatcacgattagttccagtaagaccgattcgattattgaactgattggcggcggtctggttgagttctggacgctggataatcccgatgcggggcgctcccgaaaatatcacaaagtcattattgatgagggcagtctcgtcaagaagggcatgagggatatctgggaacaggccattgagccgacgctgctcgactttgacggcgatgcagtcatggccggcacgccgaaaggtgttgatgacgagaattttttctatcaggcctgtaatgataaatcgatgggctgggaggaacatcacgcgccgaccgctgccaacccgacgattaatccggcggcgttggccagaattatcgacggtcgcccgccgctggtggttcagcaggaatataacgctgaatttgtggactggcgcgggcagaactttttcaagctcgactggttgctggaagacggtgcgcctgtcgattatccgttttcctgcgatacggtttatggtgtcgttgactgtgcgcaaaagggaaaactccagaacgacggatccgcgtgtatctggtttgcgctggataacctgccgtcgccacaccttatcattctggactgggacattatccagattgacgggtatttcctgaaagacgttgtgcctcagtgggaaggtaaggctaaacaccttagcgaaatctgccgcgcccgtatggggacgacaggcctgtttatcgaggataaggcaaccggcatcaccctgttacagcagggggccaatgagggctggaacgttcacccgatagacagtgatttaacgtcacttcccaaagaatcccgcgccatcaacatttctggctatgtggcgtccgggaaggtacgcatttctaaatacgcctttgacaaaatcgttgagtacaagcagtcgaagaaaaaccatcttctgacgcaggtactccagttcatcatcggtgaagaaaaccaggacgacgatctgtttgactgctttaactacggcgtcgcgcttggtcttggtaacggagaggggttctga

SEQ ID NO: 375763 - DNA, 1431 bp, Salmonella enterica
atgcaggacgacgacgatatttgcatgggcagcaatgctggcgtcctcagcaagattctggagggcgggagcattgaacccggtgcgcaggcgggttatgagctctgcaagctgatttatttgtttcatccgctgggcggaaagatggtcgaccgcccgataaaactggcgatgtcagaaccgcgaaccgtgcatgtgacgcgcggccctgaaaagcggttgcgggaggcgttcgagcgcgagtggaaagccataaaagccgatcgcattattgccaacacggcgcgccagtcccgaatttatggtgttggcgcagtagtaatgctgattgaaggcgagcccacgaacgaggcgacagggttcgatacgctgtataaaaaatccatcacctttaacgtgctggatccgatgaatacagccggttctgtggtactcaatcaggatcctaattctgctgatttccagaaggtgggaagcgtaactgctgcggggcaaccataccaccatagccgctgctgcgtgatgatgaacgaggacccaatttacctggcctacacgccatcatcattcggctttgccgggcgcagcgtgtatcagcgcgcgctgtatccgctgaaatcatttattcagtcgatgcgcgctgatgacatggtaacgattaaagccggactgctggtggcgtttatcaaacaggccagttctatcgtcaataacatgatgcagaaaatgtccggtattaagcgctggatgctgaaacgcggtggtaacggcgatgtgttgcaggtgggagagaatgacaagattgaatctctcgacatgcagaacctcgaaaaaccgcttgatacggcccgtaatcacattctggcgaatatcgcgacggcggcagacatgcccgcgattctgctcaacagtgagacgtttacgcgcggatttggtgaaggtaccgaggatgcaaaagcggttgcccagtatatcgacgatgtgcgcaaggatttgcagccgctttatgattttttcgtgcgcatcgttcagtaccgggcgtggtcgcctgagtttttcgaggcgctgaaaaacgatttgccggaatacaaaagtatcagttgggaggcggctttcagttcctgggtgaacaactttgattacgtctggccgtcatcgctgaaagagcctgaaagcgaaaaagttaaagtcgatgaaacacgctttaaggcgattactgagatgctgactgtgctgttgccacagctcaccaaagacccgcaaaacagggcgacgctcattaaatgggcctgtgagaacgccaatatgaatgaaaacctgtttgcggatcgtctggaactggattacgagcagcttgaacaaaatccgccggatgcaaccccgactggtgaggggaattttgatgaactcctttctgaaagagctgcgtga

SEQ ID NO: 375764 - DNA, 876 bp, Salmonella enterica
atgaactcctttctgaaagagctgcgtgacgcgattaaattctttctggagcatggttacagcagtgaagaaagtctgattatgtggactgagcgcctgcgtaatgccactgaggataaagtcggcggcgatgatttttacagatatgtgtcccggcgtctgaccgctgcctacgatctggaagttggccgggaaagggcgctgaaacgtcaccccggcgtcagccgtttcacactgaattatcttgaaccaaagctgcgggctgaactggatcggcggattatggcatcggcagacctgataaagctgaaccgtacacaggctgttgaccggacaattcagcgtttcagtggctgggcgaccagtattccccccatcacatcgataagtccaggtttatccgcttcatcgcgttccggggtggttgccacaagccagcatatcgccaaatcagctcgacagattgatttcgaacagcgccgcgtgatggtggatcagacacataagctgattgccaatatcgataacatcattgcgaccgatggcggggcgattgcggcggtatggcacagccactggcgccagcccaattatgactatcgggaaccacacaaggaccgcgacctgaaaacctatgcgatacgcggtaactgggcgttgaagaagggttttatgaaggtggggccggctggctatctcgatgaaatcactcaaccgggtgaagaggtattttgccgatgctacctgacgtacatctacaacgtccgaagcctccctgatgaaatgaaaaccgaaaaatggcggaaattcattgaaggcaacaagtcagtcggtcgtcgttctgcaaacttcgagaccataaaaaacggaggataa

SEQ ID NO: 375765 - DNA, 1575 bp, Salmonella enterica
gtgaaaacctacgctgccgggatcctgtttaagtctggcgggaaaatatttctggttaagcgtggggatgatggttcgtgggcggtaccgggcggaaaactcgaagaaggggagacgcctgaagccgcggcaaagcgtgaagtgctggaagaatgcgggtttgattattccgcaccgctgacgcctcataccctgattgatggctatgttacctacctcgctgatgatgccgagcagttcgacgcggtactgaacgatgaaaatcaggcctgtggctggttttctccggatgaactgccggagccgttgcatcccggcatggtggcaatgcttgatgccgaaccactcaatgaaaaggacgttgccgggcttattgctggcgggcaactcacatccccgcagtttttcagaaatatgtacctgtgggcgctgcgtatcaccggaacgggtgttacctggcgttctaagttcaggcaatacgcttaccgctctcccgagaattacctcactgatgatttcctcgcccggtgctctggcctgccggttatctggctgcacccggagaaaaacgcgctgaacagcgaggagtacgccgcgaggactatcggtgcgattgcgtttgcctggatccagggtgatgaggtgtggggaatggcccgcatctacgacactgacgccgccacgattctttcaacgcggcaactgagtacatcccccacggtgacgggcggcgatgacgttctgatcaacgtcgacggtgaaccgctactgctggaggggaacccagttttactggatcacctggctatttgtgagcagggcgtctgggacaagctgggggaaccgacgggagttaaatccgacacacttttgaacgaggtccagaaaatggatgaagaaaaagtattagcactcattaaccaggcgctggacgctcgcgaagcccgcgcaaaggccgacgccgaggaaaaagcaaaagcagatgcagaggccgcagaaaaggcaaaagctgatgaagacgccgcccgccagaaagaggaggaagaaaaggctaaagcggacgctgaggaaaaagcgaaagcagatgcggaggcagaagaaaaagccaaagcggatgccgaactggaaaaaatccgtgccgacatggaagaaatgaaaagccgcgtgccgcaggaactcagcgatgaagagcgtaatgaaattgctgatacccagtgtaaggccgacagcgtgtttgcttcatttggtgagcgtgcgccgcagccgatggcgggggagcgcgctattccataccgccgccgcatcatgacccgcctgcaaaaatactcatctgattataaagaagtggatctgcattccatcgcagacagccagctcctgagtattgcggagaaaaaaatctatgccgatgcgcaggcatcagcggcatccagtctggagcccggcgccgggttacgtgaagtcatccgcaccgacgccaccggacgccgtatcagtacctttatcggcgatccgtccgcaacatgggcaccgttccaggccgtcagccgcaaagtcgctggcatcaaacagtaa

SEQ ID NO: 375766 - DNA, 873 bp, Salmonella enterica
atggcgagtgcattgtcagttaatccaatgcagaccactaacgcgcgcggcacgttctacgcgaaatctgatggtcttatccagggcgtggcgctggacgatccggcggcacgttatgcgctggcttccggtacccttggcagtgatgaaataaaacctttgtggggcggactgccggttaacgaactggtaccgggcgcctcttctgcaccacgtggcagcattatcaaacgtgcagccagcctttcacaactggtgggcttttccgtgttcaaccaggcacacaacggcctgaccacgccgcaatccccggtaccgcttctcctcagcaatatgagcgtgtcgttttatcgcctgggctcaggaatgcgtgttccggtcaaagcctctgatgccgtgatctctctggccagcgcggggatttctgttaatcagccgctggtgtggaattttgcggaggattgtctggatgtgttcagcactgcggcggctgatgtggctacaaccgctattacctggactgcgcctaccgcgagtctggcgggatttgcgaccgcgacgactgccagcgcgcacggcctgaaagttggggcttatgtcgcgatttctggcgcagttccggcggcgtacaacggtactgtccaggtgctcagcgtaccgtcggcgacaacattcacttttactccggtttcagtgccttcaggcaatgcgaccacgcagggaaccacaggcgcggcaaaagagcaggatgtcgcccttccggtaaaaatcatcgaaatgcagatgggtaacagcaaaaccgtttcttacgattcggcgacgggctttgctacctggaacgacagcgggaacgctgcggtaattctgctgtaa

SEQ ID NO: 375767 - DNA, 1032 bp, Salmonella enterica
atgccagctattacacccgcttatcaaattgtaaatccgtcgtacatcatgccggaaatgatcctgtcatatcagcaggcatccggtgcgttttctgtcatggcaagcggtaacccgctggttcgcctggcagacggcgaccagtacgtttatatgaaacgcctggatattcgcactcaggtcacctcaagccagtcaggtaacgccaaccagttaccctctgtggcactggaggcgcgaatggtcagcacgccgacatatatgttccgtgcccgcgccatttacgatcatcacgatatggccgcagcggggaactgggggattgcgcttccggaagcccagcgactcggtacccgacaggcaatttttcagcaaatgcgtaacgcgctgctctatggaatgaacccggcgggcggtgagggggtactgaacaccaacggtgcgatcactgtcagcctgccggcagacagccgcgggaacactaccgtacttacttacgatcatggcgaaatggcggtattcctgctggcgcagattcaggcgatccgcacccgaactatgcaaatgggccgggcgtcacgcatggttatcctcggtcctcagcgcacgctgggtaccatggaaatgcagcagatcgttcagttgaccagttaccagcgtccgggcggtggtacttccacggtgaaaggtaccgttaatggtgtgggggatgatgctgattgtgaaattgaatggggttatgacgatacgctgattggtgccggggcaaacggaacggatgcgatcgtcatcgccatgccggaggtcgagcgccctgaggttaacgcgaaaatcaacaccaacgaattcgccagactgagtccgtcactggaagccacatcactgatgctgtgcgacatggcggcaccgcgtgaaattcccaccccgattgcgggcggggcgatcgatgtgctttccgaactgcgttccacctctggctgggtacttcgccctgaagcgctgaccatcatttcgatgaagtacagcgattaa

SEQ ID NO: 375768 - DNA, 486 bp, Salmonella enterica
atgaaactgtacatcgccaataccaccaaacagcgccacgatttcgcctggcgcaaaccggagacggggcgtcttgtgtatcacccgattaatgcaggctctcaggctgttgtcattgacggtacccgcgccgaaatcgaccttattattcagcagcacgccgattacggtttgattgatgcgacaaaaatcgaccagaaccgcatttatatcgggttgtgttacagcattgataagccggtggcgtcgaaagttatcgaaaaggccatgcgggataacgacggtcacctgaaccgtgcggcacacgatcgccgtcaggcttccgtactggcaacaaataacgccctgactgagcaggaaaatggttacctcggtgagctggaagtcagtgcagagcagcgactgagcgccaccgatgaccgtgacgaaacagcgtttgttgatgagacgctggcggtcaacacgggaactaaaaagaaaaaataa

SEQ ID NO: 375769 - DNA, 426 bp, Salmonella enterica
atgcctgaactggccggatttatcctgtttatccgtaatacgatgggagttaatgccgacgcgttagccgatgatgatccggccattagcctctcctggtcaatgtccctggactgggtgaaccggcagatcgcctgtatcagcccggttctgtattcgcaggctgtttataacctcgcggcctcctttctgcttaacttcggccctgaagttgctttcggtccggtacgcgaaaaactgggtatcaataattttactgctggcgttatcagcgcctcttcagatgaatcaaccagtcagacgcgggttgtcagtgacgcactgaaaaacctctctcttgcagatctgcaacaactcaaggacccgtatggtcggtggtatctggcaattgcgcagcagtacggtgatttgtgggggctgacgtga

SEQ ID NO: 375770 - DNA, 432 bp, Salmonella enterica
gtgaaacttcacctgggcgtgatggacattccctatgaaaacgagaatacgaccaccggcgatgtggccgaaattcttgaagggaaataccggatcatgcagacgttctttgaccgccacggcgaggaaattgcacagatgatgagtaatgaccttgccgccggtctcgaaaatatgctggcaggcgcgccgcttcctgtggatcccttcgcggaatccatgtcacaggtacatcacctctttgtcgctttccttgataacgaagagatgaacggcacagaaggtgtgcctactgcccgtgcactggaggggattagcaagcgttttaaaaacaggaagggagagccgcggccctcttttatcgataccggtatgtttcaggcgtcaatgcgtgcctgggtaagcggggtgctgaatgccttccctcagtga

SEQ ID NO: 375771 - DNA, 939 bp, Salmonella enterica
atgccttccctcagtgaactgtcacaggcaaagacagaactcaatgcgtcgctggtgcaggggctggatgatatcagccgttcggcatccgttacgtttactaaatatgtccggaaagtgcttccccttgatggtttcgttttctgggtgaaggcgtcagttcttgcggatgatcctgatactgaaccggatacaaaggaggtaaaaggctacctgcacctgaccaccgaatctatccaggatgaggaacagctctacgataaaaacgtggtgaccttcaccgcgcaggccgatattgacccgtttaatgatattggttctgaggtgctttatatcggggagttttacggcattcagtttgctttctcgcgacgttccgggctgaacgaaccagcgaacatttaccattacaccggacatgccatttatccgcatatgatgtcgcagattattaattctgccgacgatatcgaccttgcggatgtggtggtttccaactcattaccgatctggctctcgctgagtcagttcatgccgatgtacccggcaatgctttccgtacaaaacctcgtaccgccctacgccacagtgaaatgcggagaaccgagcccggtggccggagccttctgtctcgacgagaagcagaaccagtatcaactggtttctgaagacgtgacgatcaccgtgacgggcctgcgtaatgctgccgttgaggatttcctgcgctatgtgcaggactacacgctcagcgataaagccgaaatgggcgtaatgaatattccggtgatacaggatgagcgcaccacgcagaatgagctcaacattatcgccatgcggaaaaaggtcaaattcaaagttaattactaccagcagcggatgaggaacgtcgcccgcaggctgatcacgtctgcaattccgtccatttacgtggagaaataa

SEQ ID NO: 375772 - DNA, 1395 bp, Salmonella enterica
atggcaattgttaatattaatgtgtcggtgacgaatccgccaaagccgtcgaacctgcttaaatccggcgccctggtctctaccggcggcacgacgttaacacccggcagctttcaactgctgacctcaaaagacgatctgaaatcgcttgtatctccggctaaaactatctcagcgattgcctgggcaaccaatactgtcaccgtcacgctggcagagtcgcccggctggagcgatggcgataaggttcccgttattatagaaggcgttgcaccgaaaggttacaacggggcatttacggctactgtgaccggtgacaaaaccctgacctacacgctgaatgcagatccgggaacggctaccacaatggggaccgtaaccgccgtcgctgcgggtgaaatccagcagatgaataccacgtactgggcgcagggaaccagccgggcggtatacgttctggaactgggggaattaagtgttcctgctgccgttgcagcgttgagcgacttcattgatgaagatatttcactgggcaacacttaccagaaatttttctcttatctggtaccgcgcgagtgggatacagaaaccacctttaagacgctggcgaacaattacacctcgccgggctctctggtgaaattcttcgtcaccacgacgattgcaacctacgaagcatgggtatccggaaaatatccgaacgtcttcgcaggagttgaggctccgaccattggcgctacagagttttcgatggccgccccgtttcagtcgtccctggctaacgatccgggttcgtccaacatggttccgccgatggcgtaccgctttatgtatggcgtaacggagtatccgcctgcaggtaacggcaccctgctgaaaaccctgcaggataaccatatcaactatatcggcacggcggcagaaggcggactgagcaataaaatgctggtggcgggccacatgctcgatggtatgccgtttaactactggtactccgtcgcctggtgcgctattaaccttgagctggatctggcgaatgaagtgattaacggttctaacactactgttaacccgctttattacgatcagcagggaattggtcgcctgcaacggcgcgctttgaaaactctccgttccggtatcagttacgggctgattctcggtcaggtgattgatacgcagctcacgcaggaatcgttcaacgcggaatatgaaaaaggctcttatgccgggaacgcggtcatcaacgcagtaccgttcgctgactataccagcctgaatcagtccgattacgccgatggaaaatataacggcctgagcgcggttgtcactccgcgtcgtggttttgagtccatcacttttaatctcaacgtgaccaattttgtgggggcgtaa

SEQ ID NO: 375773 - DNA, 438 bp, Salmonella enterica
atgccaaatccattagtaccgcagggctttcttaaccgtgtcaggggggcggtaactgtcacggatattccggcgctgaatgtcaccgcgtcatttctgggtaaggatgctatcagtatgcggccggattcggctgcaacggacattatccccacgctgaccggaaccgtggggagccaggtaccttatcagcaggtcacaatcacgatgcatttactgcgaacgcaggggctggcggcgagctatcagaaccgtttcgcttctgatacgtcgctgggagaggtcgttatcacgccggatgccggcaccttcggaaactacacggtcctgaatgcatatctggtgaattttaatgaactgaccatcaacggtatggatgccggatatgttgtgacaatctccggttatctgatcaccaacgataaaatgtggggctaa

SEQ ID NO: 375774 - DNA, 588 bp, Salmonella enterica
atgaccgtgaaaattgaccgaaaactgaactttgtcagcaccatcacccgcgatgacggctcactggtgtatctgcatgttgtgccgttcccgtatgaagtcgttgaggaaaattgcgtactgctggggaatctgttcaataactttttctccctggtgggttcggtaggcgcgccccgcgtggcggcgatgatgctgcgaaaaatcatcaaagcgcggcaggaggcaggagatcttcagccaggaatgccgaacattgtcgatgagatacagcgtctgacaacgatcatctggaacgataacggaacctggaaaacgtcttcgctggaggctgcattcaggcaggaaattatcaccgatgatgagtaccgggaagttgagggcgaggtcgttttttttatggtgagctctgccattcagaaagcgaacctgatcgcaccgacggtggggaaagcgctcgatatgtacagtgggcaactcgtgtcattgagcgctatggcgtatcgcgattctttaccgacgtcgaaaacggttaccgataccccgaccccggaagccctgccggaaccctcacacataccctcctga

SEQ ID NO: 375775 - DNA, 2055 bp, Salmonella enterica
atggcggctaaatccattgtcgaaattgatgtgcaggacgagaaatttcagtcgttcctggaaaaattcaatgaataccagaaagcgctcggcgaattacctgaacaatggcggggggcggttcacggactcggcgaggccgcaaaggagaccgaacgtgtccgggatggtacggaggggattacaaaagcgttcgctgatggcgttgcggcgttagcatctgttaatgacggtctcgatcgactcaatggtaatctggagaaggccacaaaaacccagacggagtttaacaagaagtccggcggtgcgcgcaatttcctgaataaagccagcaaggatgcgaaatcgctggcaggtcatattaaagatgccacaaccagcctgctttcatggggaaccgttctggggcttttttccgggctggctggtgcgggcggactgtgggggcttaaccacctggccggcaatgcctccgcacaacggtttactgcgatggggctggggacgacggcaggcggccttaattcgactgctgtcgattttcagaaagcgctgggtaatcctgtaggaactctgggtgccatacgtgatgcgcagcttgatttgagtaaacgctggcagttccgggcaatgggagtcgataacccggacagggatcctgctgagcttttgcctgaaatgataaaagcggcgcgtgatatttttgtgcgtaacggcagcacgcagcagggggcggaagcctacgggctgacgaactatttcactcttgacgatctgaatcgcttcaaaaaaatgagcgatgaagaaatcgatgcgatggcgaaacaggcacagcaggacacccgccgccttcagttgacggaccagcagcttcgccagtggcaggatttcaacattcagctcgaccgcagtaaggtcagtattggcaatacgtttatccggggactggcaccgctggcgccggtgctgggaaaactttcggatgccttttccgacgcgattgaaacggtccttaaatcgccggaactggggaaatggattgatggcctttcagacggtatacgccggtttggtaactatctggcttctcccgaatttcagaaagatgttgaagctttcatatccggtgtggagcggttgggccgggttatcggcaaggtcattgactggataagtggtaaatccggcatcacagcggatgatattaaatcccggtcatcgatactcagcgacgagaagcacaccgatcccgttaccagtgagacttacaccccgggtggggatgatgatccgcgtgtgtggtcgtggctgaaaggggtaaaaaaattcttttcatcaggagatgttaagccggtcgacgggaaacaggctgatgttcatgctaaggggcgaaccattgctgacaggttcaataaccctgtgaatttacgttatgccgcaggttatgaaaccgccagtaccagaaacgggaaatttgctgtgttccccagcctggatgagggcgttctcgctgctgcaaaacaactgcaaatatacggcacaaagggcatcaacaatattcacgatattatcagtaaatgggctccatctaacgagaacaatacgaaagcatatatcgggcatgttgtgaatgcgactggccgcagtgaattcgaaaagctgaatttaaatgatacccggacgctcgcgaaattaattactgccatgtcagtaaaagaaggtgctggctcccggttaagtgaagagaaggtcacacagattatcaataatgccggaggtcattttcaggaatcgcagaaaaaatctttgcaggatataaatccatccgacagcgtgcgggaacaatatcttgctcagtatggttctgaattgcccggtaccagcaaaagtaacctggtcgaacagccagtgcagccgggttcggggaaaactgaccagatactgcaacaaattctggataaccagaagcgtggtcatgctcaggggcttgttgtttataacaataccggcggtaatgcgattgtatccagtacgcaacttggagggttcggttaa

SEQ ID NO: 375776 - DNA, 717 bp, Salmonella enterica
atgtcatttacccgcgagctctacaagctcggttttgaaatctccccggttattctctgcgatggtgtggcgcagagtattcccggcggcatgttgccgatagtcgccctgacccagagcgccagctacgtttcaggtctgatggggggggctattgaactgacggatctggataagtatttctgccactggcgagcggcgcccggtgggacaatggttgattacgacattggtcgttatccgtttgcaaatcaggcagtggcagccaacgcgcttctctcgcagccgctgcgcattccaatgctgatggatgcgccggtaaatgaaaacaccggtgctatgacaaagctggtcacgctgagttcgttgcaggccgcattgcaggcgcacgccagtcttggcggaacgtttattgtggcaacgccgggaattatttacagcaactgcatactgaggacagtgcgtgatgttaccgggtcgaatgatgctttaccgcagcggcaatggttatgggattttgagcaaccactgctttctgaaaccggggctgagcaggcgataaacagttatctgaataagattgataacggggacaaggcaacagaaagcgcctggaccagtaccatctcggcgattggtaatacctcactcggcagtagtgtatcgggtgcagttattggcttaatcggaaaactgagcggggcatttaatttatga

SEQ ID NO: 375777 - DNA, 276 bp, Salmonella enterica
atgagcgtgtctttttatcccttctccggtaacgaacagaaaagcatggtctttactcccgttctcgatggtgaggtttataactgccagacgaaatggaatattgccgcccagcgctggtacctcaatatcacggataactcaggccgtcggcaactgacaattccggttattggttccccaaaggattacgacattaatttactggtgggggcattcagcaaaaccagaatggtatggcgtgtttctgacggtcagatcgaggtaattaactga

SEQ ID NO: 375778 - DNA, 1044 bp, Salmonella enterica
atgcgtttctacgatattcagatttttactgctccggatgctaagggtaactccggtacgctgtacagacagtacagtagccagaaaaacggggtatttaacccggggtgcctgatggttgaattcgaccttctccgttttggtgaatccactcccaaaggacagagccgcatcactgtctggggcatcagcccgcaggaaatgcaacaggccagacaggatatgtttggcatgaccataaaaatgtgggggggaatgtcaaaagggttgccgctggcgaaaccggaacagcgtggactggtgctggaagggacaatctggcaggtactggggaactggcagggcaccgagttacggctggatctcattgtgaccgccggtcctgtgtctgacgttaacccgttaccgctggcacccgtaaatttaacggtgccgtggaataagggggttaaactttctgtcgcgctgacgcaatgctttcagacgctgggaggtgactaccggttctcagtcagtatcagcgatcgcctggtgaataattatgacagcaatatgttttgcggcagtctccaggaacttgcaaccagacttaagtcgctgagtaaaagcatcattaaggacagtgattattctggtgttgaaatagcgatggtgaacggcagggagatccgggtattcgataacgattttgctaaccaccaggataaagattccagaaaaagcgcctcttacagaagtctaaatcccgtgcagattgaatttaccgatcttgttggtcagccgacctggatccagtttggtacggtgagtattccctgcgtcatgcgcagcgatattcaggtgggcgattatatccggatgccgaagaaattaaggccgatgatccaggcatcgtcatactcacagtttcgtgatgactcggcttttacgggggattttctggtgtcttcggttcgtctggtgggtaacagcagacaaccggacgcaaacagttgggtaactgttatcgaggcgcatccaacaggggggattgctgcaacatga

SEQ ID NO: 375779 - DNA, 717 bp, Salmonella enterica
atgagtataaataaaaagctcaattttggcggcaatatgaataatttcgccgaccagaaaatagccgcggctatgcagatggccggaaaaattttacccgcagaggttgtcagtcagtccgggaaaatggtcactgttacctttttgctgcgggacattccctacacgttgcctcagttgaccattccgctattcggtcctcagtacatcagatacccgatgcaaaaaggagataaggggatagtcatcccggcagatacctacctgggcggcgccagcggtctcggagggggaacggctgatctgacgccccctgcaaatctcagtgcgctggtgtttttacccatcagtaacacggagtgggagaacgtcgatggtcaggtactgacgctgtacggaccggagggggtaaccattcgtgatgcgaaaagcaacactacgtttctgctcacaccggaaagtatcactatcgccacacctgaaaaattcgaagtgacggtgggcagtaccgttctgacgctcaccgctggtgcctggtcgctgacagggcagagtggaacactgactgacagtgcggccagcaccagtccgaaaatcatgctggagggctgggaaaaactggttcagtgggttaacagccacaggcacagcaatggtaatgacggacaggataccggagggccaacgtcacaattcaacgggagtattaccgaatga

SEQ ID NO: 375780 - DNA, 333 bp, Salmonella enterica
atgaggacatacggacgagataaagacgggaagtgggtaacggtcacgactgacgaaaacgggtttaacgattctgtgtatctcacaacgctggtgcagaatctgaaactgtccccgcaggaatccccgttttttgctaatcacggtataccggctaacggctcagttattcagcagatactgccgaccttctacgtaaaccggcttcagcagcagttcagtaaatatttttcctccctgcagattgcgctggcggatgttgatccccctgtgtacaacatttcggcgattaccaactcaggctctaaaatagtggctcaggtgtatgtatga

SEQ ID NO: 375781 - DNA, 492 bp, Salmonella enterica
atggcccgtaccgaaatttggttacgtttaatgtacgtcggcgacctttatggcgaggcgatgttgaacatggcgaattcgcttattcgccagcctcagataaatcgcacgcaccttcaggaggctggtcttaccgcgcggcaagctgaacgttttttacagcttccagcaggtgtgcttgatgagacgttacgctggcttgaactaccgcagcaccattttctgtgtgcggatagtgaaatttatcctccccaactgcgtgctattgacgattatcccggcgctatttttattgacggcgatcctgcctgtctgcatacctgccaacttgccgtcgtagggagccggagccactcttggtatggggaacgttggggacgtctgctttgcgaaagccttgcgaaaagcggtttgacgatcaccagcggccttgcccggggaattgatggcgtagcacacaacgccgcgatgagtatggggggaaaagtgtag

SEQ ID NO: 375782 - DNA, 162 bp, Salmonella enterica
atgccacttatcgactacatcaagaaatactacaatggcaatcaggcatcctttgcccgactgaccggcgttcagcccgcccaagtgacgcaatggctggataaaaaattcattgtggtggatcacactctctacagcccgcgtcgcaaactcggcacataa

SEQ ID NO: 375783 - DNA, 1704 bp, Salmonella enterica
atgatgaaaccagtaaaacgcctttacctttcaacggatgaaatacacctggctgacgccagtctggtgctggagctgaacagctgcggacgtggctttattacggcacagacgaccacagactacaccggcaaactggtacggctggatgtggggtattccggtttacttctgcgctggtttaccggctatgtggagcgttcacagcctgctgaaaacggttatcagcgtctgtttgtccgcgagctggctggcgtatttgaacggatgtggccatgctcattccagcatcccacactgcgcgatgtggccggatggctggaggaaaacagcgggatcagcattgcggtaccggatgtgccgtacagtgataaaccgatcccccatttcacccataacgggacgggataccagctgctgaataacctgggcagggcattcagtatcacggattacatctggtatccattgccggatggttcgctgtatgtcggaggtgcagaaaaggcgctgtttgccggacgcccggtagaaatcccggcagagttcagccagggaacggcgggtggtaattccatgacattgccggtaatccagagtcttcgtccgggcgtggacgtgaacggggaacgcgtgaccaaagttcatctgacgaatgacacaatgaccatcacgtggacaccacggaaccgcgccacaggtcagccattgcagaaaacaccggcgcagcgccagatagaaagccattacccggaactggcttcaggtcttcacctgcccaaactggccagggtggtggcacccagcgaggccgtaaaaagcggtaattttgccgacccgttccggccacggtacgctgttgacgtgcagctgcttgacgcggacggcaacccggacaaccagacgccggtatattccgccgtaccgctgccggtgccaatggccggtaacgattcgggaatgttccagtttccaccggaaggaacgctggtagaggtggcgtttacgggcggcaggccggataagccctttatcaggcagacgctgccggatggcaccagtctgccggacattaagcccggcgaacagctgcaacagcagcgcgcggaagtctcgcaacgcgtgacacaggcaggagactgggtacgccagacggatcagaccatcagtgaaacatcgatggcgcggacggtgaaagccgacacggaacggcgtgaactggtcagccgtgaaaccacggtgaaagccacggataaaatcacagtactgggtaccgccacgctgatggccggagccatacagcaggtcagtgctggcgacttcagccaggcggtaaaaggaaaccggctggccagtattacaggaaatgaagaaaccgaaatcgccgggcagcagtccacgaaagtggccggcgccatgaatgttgatgtggggggaaccctgacagaaaagattgccgcattacgtaaatccgtggcagcggggggtcagcagattatggggccaaccgtgcatatcggtagcgagggcgtaaatacgctaaccatgatgctggacaccattgatttactggcagagctggcgcagcagtgcgcgagccattcgcaccccagtgtcggtacgccgacgaacgcgggcgcatttaaccagacggcagcgaaggccgggcagacccggagcaagtaccagaacatcatcgcctga

SEQ ID NO: 375784 - DNA, 651 bp, Salmonella enterica
gtggccgtattcgcctttcagaatgccggcggtttctttggcaatggtcttgtagcgttcgcccgtcagcacgttgagcaccgcctgagtgccgacaatctgcgaggtgggggtgaccagcgggataaaaccgaggtcctcgcgcacgcgggggatttccgccagcacctggtcgagtttgtccgccgcgttctgctgcttcagctggctttcgaggttggtcagcatcccgcccggcacctgcgccacgaggatacggctgtcgtagcctttcagctggccttcaaaggcgtgatactttttgcgcacctcgcggaagtaggcggcgatattttccagcttcaggatatccagcccggtgtcgtgctcagtaccggcgagcgtcgccaccagcgcttcggtggccgggtggccgtaggtggcgctcatggacgaaatcgccgtgtccacgccgtcaacacccgcctcgatagccttcagcagggccatctccgccatgccggtggtggcgtgacagtgcaggtgcaggcgcacctcaaaacgttttttgatttcgctgaccagctcatacgccgccatcggtgtaagaatgccggacatatccttgatggcaatcgagtcaacgccggtttccagcagttgctctgttaa

SEQ ID NO: 375785 - DNA, 696 bp, Salmonella enterica
gtgcgccggactggtggtgtaggagagtgtgccctgggcgtgcgcgccgtggctgcgcaccgcctgcagggcggccttcatattgcgcgggtcgttcatggcatcgaagacgcggaacacatccatgccgtttttcaccgcgcgttcgacgaagcgctccaccacatcatcggcgtaatggcggtagccgagcaggttctggccgcgcagcaacatctgcagcggggttttgggcatggcttttttgagttcgcgcaggcggacccacgggtcttcgccgaggaagcggatacaggcgtcaaaggtggcgccgtcccagcactccagcgagccgtagcccacatcatcgagctgagcggcaatcggcagcatgtcatcaaggcgcaggcgggtggcgaacagggactggtgggcgtcgcgcaggacgacatcggtaatggcaatggtcatggattcctccgggaattaagggttaaggcggcgatggtggtggatagcggcggcaatcaccggcttgaggcgggcaaagtcgtccgcgggcgcggcggcggcaggtgccagttttggcgccggagccggttcagggaagaaacggttgacggcggcggacatgccgcggatggcgaaaatcagcaggaacagaaacgccagcacgaaccccatgccgaggaacatcagagtgaagccttcacctaa

SEQ ID NO: 375786 - DNA, 795 bp, Salmonella enterica
atgattggcctgagactggacggttacgatcccgaccttcaccacgatgccgctgtggccttttgtattcgcgccagggatgatgaactgtttagccctcgccatcagcatcgcaagggacagttgattctcgctctgcacggcgcgattacctgcgaggtggaaaatgcgatgtggatggttccgccccagtatgccgtctggctccccggctcgctgccgcacagtaatcatgtgaccgcaggggcggaactgtgctttttatttattgaacctgcagcggtcgtcatgccggagcgttgctgcacgctgaaaatttcgccgttatgccgggagttgattttgtcgctggcgcgcagaaccgatcccgaaagagcgcaaatgccaacgcagcgccttattcaggtgttgtttgatgaactgccgcagcagccgcaggaacaattacaattaccggtatcggggcatccgaaaattcgccaaatggttgagacaatggcgcaggagcccgcgcgatggaatacgttagggcagtgggccagcgtattcgcgatgagcgagcgtaaccttgcccggctggtcgtcaaagagacgggactaagctttcgtcgctggcgtcatcagttgcaattaattctggcgctacaagcgctgatcgcgggacgtaatgtacagcagacggcgcaaatgctgggttatgattccaccacggcattcattaccatgtttaaaaaaggcctggggcagacgccaggccagtatctgacgggcgagttactgcttccccacaattaa

SEQ ID NO: 375787 - DNA, 1230 bp, Salmonella enterica; identical to SEQ ID NO: 373873

SEQ ID NO: 375788 - DNA, 474 bp, Salmonella enterica
atgtttacaattaatagtactaacagggtggcgagcacaatcgctccatatgcatgtgtaagcgatgttaatttagaggacaaggctacatttttagatgaacatacctcaatacatgcgaatgattcttctttgcaatgctttgtcttaaatgatcagcatgttccgcagaatacattagctacagatgttgaaggctacaatagaggattacaggaacgtataagcctcgagtaccagcccctggaaagcattgtttttctactcggcacccctgcagttttagagactaaagagtctttatcattaccagtttccccggatgctttaacccaaaaactattaagcattagtagcaatgatgaatgtaaattatcaggtagcaccagttgcactaccccagccagtcataacccaccgtccggttatatcgctcaatacaggcattctgcagaggttttcccggatgaataa

SEQ ID NO: 375789 - DNA, 186 bp, Salmonella enterica
atgccgatcatagcaccaattccccgtaccgaacgacgcctgatgcagaaaactatccataaaacgcgtgacaaaaaccatgcccgcagactgactgccatgttgatgctgcaacccgggagacagtatcggccacgttgccagaacgctctgctacgcccgttcacccattggacgctggattaa

SEQ ID NO: 375790 - DNA, 1008 bp, Salmonella enterica
atgatagtaataaataattattttagtggtgttttaaaaagaggaataccgatttatactgaagagttagttcttcaaatgaaaaaggactctatgcaagtctgtgaattaacttgtccaaaagtcctataccctttacctgcttttatacataattttttattcatattctatgaacaaatacttactccgcttattggacttatattaaagtcaaaatttaatatctatccatataatagtacatcaattatagacgcgtacttgggtaaatcagtggttattattcatgatctaataagcttaagaaaaaagaaccattctttatccgcgaaatatgtgtcatattgtatgctcaaagcatcacaattaaaagccgattatatatatatatcaaaaacaactaagcgtgttatagatagcattgaactctttaaaaattgtaaaggctattatttcccaaacacattttttcgtttcgaggaaattgcgaaaaaaaatacgattcttgatcttggatatatattattggtaacaggggtgggtgataataaagatctcgatggtgctttgaaattatattcatctattagcaaggatgaacgattgccgcttaaaatattaggctgtggaaatgccatagagagggtaaaaaaaataattgatgaccatagagtccaaagtgaaattgaagttattcctttcctggatcttgatgatgttgtaagtctttattgtaactctacctttatttgggcacattcgaaatatgagggttatggaagagctgtagcagaggctaagttgtcccataaaaagattttatgtacacaaatatcagcctttatggaacaaaaagatgaaaatgtatatctttatactaatcaaaatgactttcacatccaatataaagctgtgttagctagcaagtataaagatatccatggacaattgatagaacatgaaatttttaaatcccaactcgagtttttatatggaaaaaagtaa

SEQ ID NO: 375791 - DNA, 822 bp, Salmonella enterica
  misc_feature (753)..(762): n is a, c, g, or t
atgaagattaagatgttttttctgacgactgcttttattacacaaagcacatacgccagcgagcttccggtcattcctctaagagatttagttaatgccgcattaacgcatcagccctctgttgctgtttcatattatgagactgaaaagaaaaacagtgacttagatctttcacgggcagcactttatcctaccctggatctaacatctggccttaataataacaggaaagagtcatcaggtaccgagaggaacgttgaaaataaggtgtctttatcataccgaataacggattttggagtgaggggggctaatatcaggaaatctgaatatgaaagagataatagtaaaactgactatgaaaaaacaaagaatatagtgtctcaggaggttgtgacaacctattacaacatcagtaaatatcgtgaaatgattgatggcgtaaatctggagaaagagttttataaaaagatgctggaaactttttcgttgctggtatcttccggtgtagcgatgcaatctgatatgcgtaaagtacaagtatctatcgatgcattaaataccagaagcattatgtatcagtcgatgttggatgatgaaatgtataaaatgcagaatatgactggtctgaatttatcgccagttcagattcaaagcgatgaaaaattcaacctcttcaaaaaatatatctttgtcgaaagccctgaaaaacttatggacatggtgatgaaatacaacgatgactataagatnnnnnnnnnncccgaaaagccgcgaccgaagatattaatgccgcaaaatcatcctattttccgactgtag

SEQ ID NO: 375792 - DNA, 789 bp, Salmonella enterica
atgaataaaatacatgttacatataaaaatctcttacttccgattaccttcatcgcggcaactctaattagcgcctgtgataacgataaagatgccatggcggaagctgaaaaaaatcaagagaaatacatgcaagaaatccagcaaaaagagcaccagcaatcaatgttcttttacgacaaagccgaaatgcaaaaagctattgccaatatcaacgcaaaaggtggagccaatcttgcgattattgaagtccgtttcttcaagggcgggtattcattcattcgacaaagcgttaacacccctgctaaagtagagatgtttaaatttaacaacggctactgggggggaccttcgcctgtcaacttaaccatctttggcactataacagaggagcaaaaacaagaagcactaaaagaggctttattcaaattcgactcgatcaatttcagcattataccagagcgtattcaggaaacaattaaacgtgctaacgccagtggcatcatttccgttacggaagatagcgatatcgttgtacgagcagagatagctcataatggcgaattcgtctatgacattaccatcactgctaaaaatagagcacgtgcggtaatgaccttaaataaggatggttctattgccggatatgagatcaaagaacctttcgacccaaaaaaagaagccgaaaaagcacagcaacttgttgaacaatcgagaaaagacattgaaagtcagcgtaaaaaagcagctgaaaagatgaacgaaatacagcagacatttaaaaaatag

SEQ ID NO: 375793 - DNA, 1062 bp, Salmonella enterica
atggataacgccaatgcgcgtctcgctaaagaccgaaacggctctgatattccaaatccagccttgtttgttcaaaacattggtttgcagggtactgtaaataaagctgacggtgctattcagagatccggcgacaacatggaaggaccgcttggcctgacacgaacgtcctcttttggtgtgggtactgagaactcgctcggcggaaattccattgccatcggtgacaacgattccgggtttaagtcaaatggcgacggtaacattgcgctgatggcaaataatgttcttgcaggatatttttcagagaatgagttacagcaccgcgaaaaaatcctgacgaaagtattcaaggcgttagttgaaaataactggtctccgggggctgggggcttaggtgcgcaacttaatagtggcgcaccttttatgcttccttcgattcaacgtccaaataatgataataattacttccccttctggaaacaaattgtcagtctgctggctggctatccagttgcagcatcaatgggaattatgacaagtggacaaacaaatttcccgcaaatcgtcattcacgcaaaaacagattttgatgtaaatgacaaattatggatttttgatgtggcatcaggagagttcagaagccccggtcgtttgttaggtactgaaatatttctttcaggaaagacgcgaattgcggccgatggaaacattaacagtgatgtctggggcggctggctgactgattatttaaataatacctataacaaaaaaaatacagcaagtctgggtgatacaggttggtatcgtgacgaatccaccgggtttattgagcaatggggaacgctaggaagctctaacggaacgtataatttcccaagggcatttcctaataaatgttttgctgtgtttgtgacaaataacaatgaacagggaggcgttgttgacaatgcttatggttatccagtcagcacgacacaattttttgctgcaactaaagacagtgcttcggcacataccattagcggttatccggtcgcatggcgtgcaatcgggagatga

SEQ ID NO: 375794 - DNA, 213 bp, Salmonella enterica
atgagcagctccatcacgaaacactgcaatgaagaagttaacattgacccgttaagtcgccgggaaacgaaagcagagtcggcgaaacctacatgttcgttgagaccttttctgctactgtcatcagtcccctcccaattactgaccaagtttgggttaaaaccgatacgggggatgagacacagattccagcctttggtatcacatttataa

SEQ ID NO: 375795 - DNA, 774 bp, Salmonella enterica
ttgcttgccgaagaaataaatattctttccccactggtaaaaaaaggaattagcccatataccaattttcttaacaagaaacaggcgtatataaaagttaagtctgaaattaatgatattgaaagtagcatcactttaaaaaaagatgatattgagttggttgttaatgatattgaggcgcttaataatgaattgcgactatctttatctaaaataatatctaaaaatcttcaggaacttgaggttgttaactctacattaaaagtaatagagaagcagataaatgaggaggatatctattcaccggttgacggtgtaatttataaaatcaataaaagtgccactactcatggtggtgtgattcaggcggcggacttactttttgaaataaaaccaaaagtaaggactatgctggccgatgtgaaaatattacccaaataccgtgaccaaatatatgtagatgaagccgttaaactggatgtgcagtcaattatccaaccaaagataaaatcgtataatgcgactatcgataatattagccctgattcctatgaggaaaataccggaggaacaattcagcgttattataaagtaattattgtattcgatgttaatgaagatgatttacggtggttaaaaccaggtatgactgttgacgccagtgtaattaccggaaaacacagcattatggaatacctgttatctcccttgatgaaaggcgtggacaaagccttttcagaaccagttaatactaaacgattagatacaccttga

SEQ ID NO: 375796 - DNA, 207 bp, Salmonella enterica
atggcgatgaaatactcctggttccatcatcacgactgcacaaccgagcaggccgacacgctgatatcggattatcagaagcggggcgtaaggacagaaaagagcctgaaccctgacttcattacctggactgtcagcgcgaaattacctgaatattcacgccgggtgcggacgccaaaatccttatgccaaaaggtctgggggtga

SEQ ID NO: 375797 - DNA, 603 bp, Salmonella enterica
atggcgcacgaattacaactcatcaagcagtcatctggaattctgatccccgcaacgccggagaccagtgatattctgcaatcaaaaatcaaactcggcgccgtgctggtggctgagttccgtcaggtgaggaatcctgcattccatcgccgctttttcgcgttgcttaatcttgggtttgaatactgggaacccaccggcggcgccatttctgccaatgagcgcaaactggtaaacggttatgcaaagtttcttgctgcatatggagggaatgagggcgcattactggatgcggctgaacagtatctggaacagattgcaaaccgccgggtaacgaacggaattagcctctgtaaatctttcgatgcataccgcgcatgggtgacggttgaggctggccactatgacgccatccagctacctgatggcacccttcgcaaacatccccgcagcatcgctttttccagcatggatgaggtcgaatttcagcagttgtataaatccgcgcttgatgtgctctggcggtggattttatcacgtacattccgtactcagcgcgaggccgagaacgccgccgcccagctcatgagcttcgcggggtga

SEQ ID NO: 375798 - DNA, 516 bp, Salmonella enterica
gtgcgccgggctggtggtgtaactcagggtcccctgggcgtgtgcgccgtggctgcgcaccgcctgcagggcggccttcatattgcgcgggtcgttcatggcatcgaagacgcggaacacgtccatgccgtttttcaccgcccgctcaacgaagcgttccaccacgtcatcggcgtagtggcggtagccgagcaggttctggccgcgcagcagcatctgcagcggggttttgggcatggcttttttgagttcgcgcaggcgcagccacgggtcttcgccgagaaagcggatacaggcgtcaaaggtggcgccgccccagcactccagcgacccgtagcccacgtcatcgagcgcggcggcaatcggcagcatgtcatcaaggcgcaggcgggtggcgaacagggactggtgggcgtcgcgcaggacgacatcggtaatggcaatagtcatggatccctccgggaattaagcgttaaggcggtgatggtgaatggcggcggcaatcaccggctttaa

SEQ ID NO: 375799 - DNA, 666 bp, Salmonella enterica
atgccaaaaggtctgggggtgaacatggctaaattaccgcgccgtaagtgcaaagtttgccgggaatggtttcatcctgcttacagcaacgttgtctggtgttgtcctgaacatggcgctatctacgctctgaaactgcgtgccaaagaaaagattaaagccgcagccaggcgtatcaaagagaaacaccaggcggataaggccgaacgccagcgccgtcaggctaagcgtgagtcgttcaaaactaaagctcagtgggataaagaggcgcaggccgcctttaaccgttacatcaggatacgggatgaaggtaaaccctgcattagctgcgatgcgccgctggttggtaaaagcaatttcctgaccggaagcgccatcgatgcaagccattaccgctcgcgcggtgccgcctcacatctcaaattcaacgtattcaacgttcattcggcctgcacgcgctgcaaccggcagttaagcggtaatgcggtcgaataccgaatccgcctcatcaggcgtataggcctcgaaagggtggagcgtcttgaatcagacaatgcgccacgccgtttcgatatcccgtacctgaaacgcatcaaattcatattcacccgcaaagcccgggcgctggagaagcgccgcgcacgtcgacaggataatgcagcatga

SEQ ID NO: 375800 - DNA, 204 bp, Salmonella enterica
atgaccgataccgcccatagcgaccagttgctccgctttatctaccgcatcggcaaaatcttttgctcggtacatggcgagcgtcggagagagtttttcgtgagcgaaaggctcagaggcgtccgttgcactcacctcccctatcagaaccttgctattttcaggcacaaaaatgccggcaatctctgcgattgtagccgctga

SEQ ID NO: 375801 - DNA, 360 bp, Salmonella enterica
atgcaaaaaatccagcaaaaagagcaccagcaatcaatgttcttttacgacaaagccgaaatgcaaaaagctattgccaatatcaacgcaaaaggtggagccaatcttgcgattattgaagtccgtttcttcaagggcgggtattcattcattcgacaaagcgttaacacccctgctaaagtagagatgtttaaatttaacaacggctactgggggggaccttcgcctgtcaacttaaccatctttggcactataacagaggagcaaaaacaagaagcactaaaagaggctttattcaaattcgactcgatcaatttcagcattatacacgtcaggaaaaataatgccagctatatttga

SEQ ID NO: 375802 - DNA, 978 bp, Salmonella enterica
atggttaacaatagattaaaaatggtaattgctatccttatagttttctcgttggtgtattcaataggatttatcacaccaatgaactctgatgactatacttatgccctaagagagctttcgctttctagcgtaaaaatgcactatttgggatggagcggaagggttgtgtcagatacgatcagcacatctctattaaagtttttctccccgcatatttacaatgcaataaactcagcagcgctaacattaatggtgttgtgctggacaatgatcccagctacattaacaaagtcgtcaccgtccccatatgtgatgattttcttatttttcttatacttcattgcaaatccagccctcggtcaaactaacttctggcttgttgggtcagcaaattacttatggaccaacatgttcattgccatttatatactaatttctatatatttaagcaatggtaaaaaatccaatttaatactctttgtatatgccatatcatcgatatttgcaggttgctcaaatgaaaatacatctcttgtagttgtattaatttctgtagcatatttctttataatgaatagaaataaatatttactgattggcgtattcggatctgcaataggcgcgggggttctcctgctggctccgggaaacctatcccgtgcgtctacaatacaagactggtacaatcaaccacttgcatggagggttcttgagcacttttcagaaaggctgccatcagcaatgggggcatattggcaggtctatattgcatttataatactactaatctctgtagtgttatcaaggaatagtagcagcaaacttatgtttggaagctttttattcatactgggtgcaattgctgcaaatgttgcgttccttgcatctcctgcaatgcccagcagggctctcaatggagcactctgctttatgattctttcgatttcctctattactcatcaattaaatcaataa

SEQ ID NO: 375803 - DNA, 720 bp, Salmonella enterica; identical to SEQ ID NO: 370758

SEQ ID NO: 375804 - DNA, 546 bp, Salmonella enterica; identical to SEQ ID NO: 370759

SEQ ID NO: 375805 - DNA, 1053 bp, Salmonella enterica; identical to SEQ ID NO: 370760

SEQ ID NO: 375806 - DNA, 1146 bp, Salmonella enterica
atgagcaccgcaactgactttaagacactcctcgacaatataaaaatagataatgcaggccagattagtaaaaggtatggtcgtataactaaggctttgaaccaatacttttataacttagattctaagacagccaattcactacaggttggttcctatgggcgcttcacagggattcgagggatctctgatcttgatatgctttactttctacctgcaactgcatggccaagattccgagatcgacaatcgtatttattacaggttgtgaaaacagaaatcaagaaaactttcaaaaatacagatattcgcggtgatgggcaagttgttgttgttaaatttaagaatcaagaggttgaggtagttcctgtattcagtaatgaagatggcacttttacatacccggatacacatgatggtggatcgtggaaggtatgtaaccctagggccgaaatgtcgtcttttagggcactgaatgatgataggaagggacatctgagacgtctatctaaaatgattcgagcatggaaagctcgtcatgaagttgagataagtggattcttaattgatacactgtgttataattttttctctaatctaactgaatatgatgataagagtttcaaaagttatgatcaactttcgcttgattttttcactttcttagagaatgaaggtgaccgagtattttattatgctcccggtagtcgctcaaaagtgagcgtaaaaaaatcatttaataaagtagcaaaattaacaaaagaatattgtgaagaagctttatctgctacaagtgaaaactcaagaaacttagcttggaaaaaagtttttggcaggccttttccaaattatacgacaaaagcactcagtaatgtcaatgtatctgaacagtttattgaagatcaatatgagatgaatttatatggtaatatatctcacccatataagattaaatggaaaataaaaaatgtaggtgatgaagctgagcgccgaggaaatgttagaggtgaaattttagacgatgaaggcggttctgagcgtttcgagaccgcagatttctcaggacctcattttgttgaatgttatgttatttatggtaatcaagttgtagcaagagatagaatcgacgtacctatacataattag

SEQ ID NO: 375807 - DNA, 516 bp, Salmonella enterica
gtgcgccgggctggtggtatagctcagcgtgccctgggcgtgcgcgccgtggctgcgcaccgcctgcagggcggccttcatattgcgcgggtcgttcatggcatcgaagacgcggaacacgtccatgccgtttttcaccgcccgctcaacgaagcgttccaccacatcatcggcgtaatggcggtagccgagcaggttctggccgcgcagcagcatctgcaggggagtcttcggcatggcctttttaagctcgcgcaggcgcagccacgggtcttcgccgagaaagcggatacaggcgtcaaaggtggcgccgccccagcactccagcgagccgtagcccacgtcatcgagcgcggcggcaatcggcagcatgtcatcaaggcgcaggcgggtggcgaacagggactggtgggcgtcacgcaggacgacgtcggtaatggcaatggtcatggatccctccgggaattaagcgttaaggcggtgatggtgaatggcggcggcaatcaccggctttaa

SEQ ID NO: 375808 - DNA, 1563 bp, Salmonella enterica; identical to SEQ ID NO: 371927

SEQ ID NO: 375809 - DNA, 468 bp, Salmonella enterica; identical to SEQ ID NO: 371581

SEQ ID NO: 375810 - DNA, 843 bp, Salmonella enterica
gtgaaaactgtaacagggttaacgaaagtcaggcatagaaatgaggttggcgttactctggcatctctttctctttctgcgaaacgggttttatttctcgcactttgtcagattgatacaaaggaaatgttgaatgatgatattttggaggttgatgctgattttttttctaagacaactactttggataaatatgctgcatatgcggccttaaaagaaggtgcaaaagttctggcttcaacgacattagttttaaatagagatgatttaaaaaccctatctaatgaattgggaatatcaacatctaaaaacaagatacctgacagattagatttaaatttaaccgaattttgtgcctattatgatcatttggctactgttcgtattaaatttactaatactgcaaaaagatacttttcaaaacttattggctctgaaaacagatatacaacacaggtgttaaaatctgttgttatcttgaacagtgtaaactccacaaacttatatcaggttatcagaaaatactatagtttaaaccctgcgagtaaatccttcgaaatttcagttgaccaactgaaagaggaaatggggctttataatattgaaaatggtgagaaggtatacagatatccaaagtactctttttttattcgtgatgttataaacaaaagtataagagaaatcatagaaaagacagagataagggatataaaattttcagtggcaggaaaaaaaggacgtatggtgcatatgctaagatttgatttttctctcaatgaagatatttctctttctgatgatgaagctaaattcttggaagagtttgataaaaaagtcctctag

SEQ ID NO: 375811 - DNA, 252 bp, Salmonella enterica; identical to SEQ ID NO: 4288

SEQ ID NO: 375812 - DNA, 282 bp, Salmonella enterica
atgacctatgaactggcttttgaccgtagagcactgaaggaatggcagaaactcggccacaccatccgtgaacaattcaaaaagaaactggcagaacggctggaaaatccacgcgtacccgcagcccggttacatggtcatgctgatcgctataaaatcaaacttcgcgcatctggctacagacttgtatatcaagttattgatgagaaagtcgttttactcgttattgctgttggaagaagggaaagcagcgaagtctaccagatcgcagatttgcgctaa

SEQ ID NO: 375813 - DNA, 324 bp, Salmonella enterica
atgcaaaactacgctaagtctgtagccacagagattttacgtcaacttggtggtaatcgttttattgttatgactggtgctaaaagtttttcttactttgatgaaaacggtgagtgcgggttaactttccgtttgccgtccaattttgcaatgaaaggcatcaacttagtaaaaattaaactggattttactgatacgtaccaggtgaaattttctcgtgtacgtggtgctgaagttaaagatatttcaagattcgataatatctattgtgatcagttagcgtgtttatttacacaggaaacagggttacataccgtgttatag

SEQ ID NO: 375814 - DNA, 246 bp, Salmonella enterica
atggataaagataagataattaagaaaaacagaggtaattactcctatgtaatcagaacgatggatgaagatggggatgcggtttttcacgtcttaaaatatgttaagacaattgataaaactaaaagcaggaaaacagtaagaaaattgataatggacgaaaaactcaacctggcatcattgatgcttctggataatgggattttgtgtgattgtctgacaaaaggggatgaaaatgcagaataa

SEQ ID NO: 375815 - DNA, 216 bp, Salmonella enterica
atgcagaataaacctacacctgaagaagtaaagaatgcacgggttgcggcaggtcttactcttaaagaagctgctgatatttttggttatcaactgaattcctggcagatgaaagaaagtgcaggtaaggccagtcgttctttatctgttggtgaatatcagtatttattactacttgcaaatatgcatccggtttataaactggtaaaaaaataa

SEQ ID NO: 375816 - DNA, 330 bp, Salmonella enterica
atgaaagtattaacttttaaaaatgatactgtctctgttggtgatatctttgtatcatcctggggctatgagcaaaccaatgtaaccttctaccaggttctttctgttcacggtaaaaaaaccgtcaccgttcgcgagattcgcgccaattcagaatataccgattcaatggtcggctttaaaactcccgttttaaatgattttactggtgaatgtcttaagcgccagataaaagattttggtgatgagctggcaatcaaaatcgaagattttgaaactgcgtataaaactctaccggaagaaaaacatcgattttcttcttactactaa

SEQ ID NO: 375817 - DNA, 237 bp, Salmonella enterica
atggcatcaaagggaaaaccggacgcccacccttttcaacgtcatttattgctgataatatgcgttccgacattttattcctcgcaacagaatcaagtgtcacggtatcaggttgccccacaacctgataccatctttatctttactttattaacttctcaattgcttcttttttggctttctcctgttctgatggtgggtatgcaaggtcataccagttatcaatacaatgaataa

SEQ ID NO: 375818 - DNA, 273 bp, Salmonella enterica
atgacaaaacatgattttgtgtcctttgtcagtggagaattgcggcaaggcgctgtacgcttttctcttgcttttaacagcaaaggagaaattgttctgcactggactaataaagcaggaatacgagtatggcggatattaagtggtaatcgtggcaaaaaaccaagcaaagctaaccttgaaagaatgagtaacttccggcgctggctttttgatgcccgtcagggcatggaaggctacactcagcaacctgaacagagcaaccttagctga

SEQ ID NO: 375819 - DNA, 294 bp, Salmonella enterica
atggctgaacatacgtgtgtctgcgaccagaaactcgatcaatgccgtaaggacagtgccgtcaggttcgctccgcgaacggtctggcaggaagcgcaagcgcagtcccgcgcaatatatcagaaagcacctcccgaaatacgggagggcttcggctattcagctaaggttgctctgttcaggttgctgagtgtagccttccatgccctgacgggcatcaaaaagccagcgccggaagttactcattctttcaaggttagctttgcttggttttttgccacgattaccacttaa

SEQ ID NO: 375820 - DNA, 546 bp, Salmonella enterica
atgaaaaaagttcaattcagaattgatgaaaatcagcatgatgatttgctgaattgccttaaaactctttatccggatgaaccagctttaacagtagctaaaggcatgaaacttttagcaaatgctttattaaaaagtaaagctgtcagtaaggatataaatacgttttttgataataatgattttatcaaaacaacgatgtacttaacaggtaaacaaagggctgatattgaaagagctgctaatcgtcacggatggacgttatcacgagaatgtcgttaccgcatacagacgacacttgaaaatgaactggatttctttgaccaggaactgctgatgatgaatcgttgccgtaattcaattgataagatcggtcgtaatttccattatatcattgttaatgatcagaccagggttcttgataaagatggtttctatcaggatgcggagcgtcttacaacagaaatttttaatcttaagaatcagtttgagaattacattatgttatgtaaagggagaactgtttcaaataaagtggagatgtga

SEQ ID NO: 375821 - DNA, 1167 bp, Salmonella enterica
atgggcgtttacgttgataaagaacatcgtgttaaacgaaagtcatcagaaaatggtcgtaagtcagctttcgctcacaaagtcaaaaatggtggaaagaactatagccgcaatgttcaggaacgtatcaaccgcaagggtgccagtaaggaggttgttgtcaaaatatctggaggtgctattactcgtcaggggattcggaacagtattgattatatgagccgtgagtcagagctaccagtgatgagtgaaagcggtcgggtatggacgggtgacgaaattctggaagctaaagagcacatgatagatcgtgctaatgatcctcagcatgtgatgaatgataaaggtaaagaaaataaaaaaatcacacagaatattgtcttctcgcctccagtttcagcgaaagtaaagcctgaagatttgctggagtctgtcaggaaaacgatgcagaaaaaatatcctaatcaccgttttgttcttggataccactgtgataagaaagaacatcctcacgttcatgttgtttttcgtatccgagataatgacggtaaacgcgctgatatcaggaaaaaagatttacgggaaattcgtacaggtttttgtgaagagttgaagttaaaaggttatgacgttaaagcgacccataagcaacagcatggacttaatcagtctgttaaagatgcacataatacagcaccaaaaagacagaaaggtgtttatgaggttgttgatattggctatgaccattatcagaacgataaaacaaagtctaagcaacattttataaagctaaagactcttaacaagggggttgagaaaacatactggggggctgattttggggacttatgttcgcgggaaagcgttaaagcaggtgatcttgtcagactgaagaaacttggtcagaaagaagtaaaaatcccggcgctcgataaaaatggtgttcagcatggctggaaaacggttcacagaaatgagtggcagttagaaaatctgggggttaagggcgtagacagaacaccttcagccagcaaagagctggtactgaacagccctgatatgctgctgaagcaacaacagcgaatggcgcagtttacgcagcagaaagcatccacgttacagtcagaacagaagctgaaaacagggattaaattttggggcttataa

SEQ ID NO: 375822 - DNA, 519 bp, Salmonella enterica; identical to SEQ ID NO: 79283

SEQ ID NO: 375823 - DNA, 648 bp, Salmonella enterica
atgttatctacttctacttttcttgcgcttgccatgcaatgcgctgccagcgttcatcccgacacaacgcacgaagtcgccagggttgaatcaggttttaacccatatgcgattgcggaaataataccaaaggctaaacgcaaacctggtgataaaggcgtagtatcttactttcctgaatcaaaggaggcagcacttaagatcgttaaaaacattgaattacggaatcatcgttactctgtaggacttatgcaaataacgagtaccaattttgcaaagtttggtacaacagcagagaaaatgtttgatccatgcgaaaatcttaaggtatcagaaaaaatactggttgactgttataaacgaggtggcgacttagtgcgtggtctgagttgctattattccggcaatccagaaacaggagtaaagccagaacctgaatttaataatacaagttatgtacaacgtatagggtttagccctcctgataataaaaaaagttttattgttccttctgtaaaggaaatgattaaaaaggagaataagacgactatcacacctgaagaaatcattatatatcctcaatacgccatgcgtggcactgtatcaaatgaaaaggaaacaaaagatgttgaaattaaatctgaataa

SEQ ID NO: 375824 - DNA, 297 bp, Salmonella enterica
atgttgaaattaaatctgaataaacgttatttaacgctttctctatttatggctgcgttgatgctttgtgttgcagaacctgcttttgcggatgatgtgtctacgaagacaactggttttttacagaaaataattgattttttaacggatattcgtaagcctgcaattacaattattgctcttgttattgggtatattgcgatattttctcgtcaacatacctcatggatagtcccacttgttatcggaattatcatctttattgtcgcaccatatattcctgactggcttgcgtaa

SEQ ID NO: 375825 - DNA, 2754 bp, Salmonella enterica
atgagtactctttttaaaggtcttacgcgccctgctttaataagggggctgggcgttccgctctacccctttcttggaatgtgcattatttgtgttctgcttggtgtctggattcatgaggctatgtatgccctcattcttcctggctggtatgccatcaggcgtgtaacacagtttgatgaacgcttttttgaccttctgtatctgagaactcttgtcaaagggcatcctttatcaaacaagcgattcagcgcagtccattacgcggggagccagtacaacgaagttgatatttcaaaagtggataactttatgaagctgaaagaccagtcttctgttgaagagttaattccgtactcttcacatatcactgataatattatcgttacaaaaaaccgggatttgctggcaacctggcagatagacggtgcttactttgagtgtgttgattctgaagatttgtcaattctgacagatcagcttaatacgcttatacgtagctttgaagggaaatctgttacgctttatcctcatcgtatcaggtgtaaaaagggcgtcagaccagtatttaacagtaaaattccttttgtgaacagagtaatgaatgattattacgagtcattccctcagtctgaatttttcgagaataaattatttctgacgatttgttttaaaccttttactacggaggataaagtaacacatttcttttcacgcagtaaaaaacaaaaagatatctttaaagagcctgttaatgaaatgaatgaaatttgcgacaggttgaatacctatctgtcccgttttcattcccgacgtcttgggctttatgaagatcatggggttgtttattcagatcagttatctctgttccagtatctgctttctggtcgatggcaaaaggtcagggttagcagtagtccgttttatacatatctgggaggaaaagacctgttctttggtaatgatgccggacaaattaccgcgtcagaccatgcccggtattttcgttgcatagagattaaggattattttcaggagacggatgccggtattctggatgctctgatgtatctccccgttgagtatgtcgtgacatcgtcctttactgcgatggataagcagtcagcgattaaggcgctggatgatcagatcgataagctggaaatgacagatgatgctgccaaatctttgctggcagatctgaaagtcggactggatatggtttccagtggatatatttctttcgggaaatcgcatcagactgtggttgtctttgcggattcaccggagcgtctggtgaaagataccaatatcgtgacttccactctggaagatttggggctgattgtcacttattcaacactgagtcttggtgcagcttattttgctcaactaccaggaaattatacgcttcgccctcgtctgagtaccctcagtagtcttaattttgccgaaatggaaagttttcataatttcttttcaggaaaagacaaaggaaatacctggggggaaaaactgattactctccgggggtcaggtaatgatatctaccatctgaattaccatatgacgactgaacatcagaatttcttcggtaagaacccgacgctggggcataccgaaattctcggtacgtctaacgtgggtaaaaccgtattactgatgacaaaagcatttgccgcccagcagttcggtacgccggaatcattccctgcaaacagaaaactgaaaaaactgaccacggtttttttcgataaagaccgggcaggtgaagtcggtatacgggcaatggggggatcttattaccgggtgaaggagggagagccgacaggctggaatcctgccgcactgccgccaacaaaacgtaatatcgcttttatgaaggacctggtgaggctgctttgtactctcaacagtgagccgctcgatgattaccagaacagcctgatttcagatgcggttgaacgtcttatgcaacggtcagatcgctcttatcctatcagtaaactacggcctcttatccaggagccggatgatactgaaaccaaacgtcatggacttaaagcccgtcttaagccgtggacgcagggggaagagtttggctgggtgttcgacaatcgggaagacacgtttgatgtcgataacctggatgttttcggtattgatggaacggagttcctggataataaggtgctggccagtgctgcttcattctatctcatctatcgggtcactatgctggccgatggtcgcaggcttcttatctacatggatgagttctggcaatggatcaataacgaagcgttcagggactttgtttacaacaagctgaaaaccggacgtaaactcgatatggtgcttgtcgtagccacacagtcaccggatgaactgattaaatcacccattgcggcagcggttcgtgagcaatgcgccactcatatctatctggcaaacccgaaagccaaacgtagtgaatatgttgatggtttgcaggtcagggagctttattttgacaaaattaaagctatcgatccgctgtcccgccagttccttgttgttaagaacccacagaggaaaggtgaaagtgatgattttgctgcttttgccagactggagctgggaaaagcagcgtattacttaccggttctcagtgcatcaaaaccccagttagaactgttcgatgaaatctggaaagaaggaatgaagccggaagagtggcttgatacctatctggaacaggcgaacctgatttga

SEQ ID NO: 375826 - DNA, 759 bp, Salmonella enterica; identical to SEQ ID NO: 79286

SEQ ID NO: 375827 - DNA, 288 bp, Salmonella enterica
atgaaaagtatcgctactgctggccttgtcattatatctgtttttagtctttctggatgttttgaagaaacaaaatcggttgattggtggaaggagcaccacgatgaatctttaaaaaaagaaatcgaatgtaagaaaacaggaagtgatagccagaattgccgaaatgtgaaagaggccaactttcgttatcaacagttacacgcaactcccccatcttttaaagatgcattcaaaaagatggagaaagaacaaagtgaattttttaaagaagataataaaaaatga

SEQ ID NO: 375828 - DNA, 1131 bp, Salmonella enterica
atggggctggttactggaattcctgctgggtcagatttttccggtaatgtaacgtcccctgctccggcaggaggcgtaccaggatttgaatctgattttttccaaacaactcatcaggttatctttgatatactaaataaaactgttgctggaaaattaaatgaatattcatctattgcttatgaattaggtaaatatggtgtttctatatatgtgctgtggtatgcgtttactgttttagttcgcaaacagcaatcgcctgttcctgattttatctggaatgtatgtaagttttatgtgatattgctcttcgtaaaaaactctggaggtatgctgatatctgcaacaaatgcaatcgatggactaagagaaagtcttgcaggaggtgatccttggttgtggatagatcaactttggacaaaagtaattcaagttgcaaaggttatttgggataaagatacatctactgttccaattgccggtggtttatcctctttatttgtatatttcggtggaatagtggcattgttattatgctcaatagtgtttttttctgccgaaattacgctcctgttgttatctgttacagcccctatatttgttttatgtatcgcttttggcttcctcaggcaaatgtttaatagctggttgcagcttaacttcagttcgttattaatatttctctttggagcactagcgttacgggctggtacatggcaactaaatgtaattctgagtgtaactattgcgtcagataaacaggatttacttcaggctggggctacagctttggcttcgggcttgtttatgggctttgttatctggcaggcgaaaagttatgcttcacagattgcaggtgtgggtgttgaaggtgccatgcagggcgcagccgctatggggattggtgctggcgttttcggtgcatcccgtatggcgcgtggcgcacttggtatgggcagaaatgccggtattggtgcatggaaaggtctgcgtcgtcaggaaggcgggtttggtcagtctccgggaataacgggtaagaccgctaacctggccggacagggcgttaatattggtgccaaaaagcttcgtcaggcagctattgagagggcaaagaaaatgtatggagggtga

SEQ ID NO: 375829 - DNA, 714 bp, Salmonella enterica; identical to SEQ ID NO: 106316

SEQ ID NO: 375830 - DNA, 930 bp, Salmonella enterica; identical to SEQ ID NO: 4307

SEQ ID NO: 375831 - DNA, 1206 bp, Salmonella enterica
gtgactgaacaggaaaataaaatcccgactgcaaccgaaattgaacagcagctacgggaacgcagacagaaagaactggaacaggccgggaagactccggaagaagagcctggcaagccagcattgcagcttggtattgaaaaacttaaaaagtcacgtaaagggatgattatcctcgtcgtgggttttcttctgcttgctgccggtgtttctgtttattatatcccgtccattatccgttctgtgtcgtcaggggatgagaaacccgcaagtcagccgcttgcaaccggagcggctaaacgtcagaccggactgagcgaagatatcgatccttttaataccgcacagaaaaaaacagagaaaccagaggaagaaaaagtcatttcttctgaaaagactgaaccgccggaaaataaacagcagagcttcagccgtgcacttgatgtttctcttgatggcagccaggcaggaaacagcagcagttcagcgggaacgtcagtttcacatactgcggccagtgagccagaaagcgataaaaaggatgaagcaaaagcaaccgcacaggctacagaatctgcgccactggcgaaaataacgaaacttccatatgacccaaatttgtttatcccggaagggacatcaattccctgttcactggacaggcgttttgtttctgacctggcggggaaactggaatgtacggtcaacagcgatatatacagcgccagcggtaatgtaaaacttatcgaaagaggaaccgccgcaaaactgatgtataaggccgggtctttaaatcatggacaagggcgtgtgtttgttatggcttacaagctacgtactcgcagtaagccttttattgatattcccctggttgactcacaggcggctggcgcgttaggcgaagccggtgcttctggttggattgacactcatttcagtgaacgttttcttggtgcaatgatggtcgggatgataccggatttaagtcaggccgccagtggtattgcacagaacaacagggacagccagaccgactatacggcaaacagtcgccaggcttttgctgatatagcacgcgaagcattttctaatagtgtgaatattccgccaacgctttataaaaatcagggcgaaattattactctgattgtcggtcaggatctggatttttcaggtatttataaactgaaaatgaaagggggttaa

SEQ ID NO: 375832 - DNA, 1032 bp, Salmonella enterica
gtgaataacgaaaacagacatctgatttatgatgtggtcaacgattatttttatcactggctgaatgagattgatggtgtcacggaaatcgctgttaaccgaccaggagaaatatttataaaggtcaggggaaagtggcaatggtatgaacaaaagatgagttacagtgattgtctttcttttgcatccacactggctgattttcatgacggtggttctgtgactcctgaatatcccctgcgttccgccacgcttccgggtggagaacgtgttcaggttgtgatcccaccggcaacagaaaaagatactgtttctataacaatccgtaagccgtcaggtatttttatcagtcatgacaaatttataaaacaggggttttattcacgcgtcggtggtttaagtggtgattccattatggaagataatatttctgctttaatcacttccgaatattttgaacgggttatacctgaatcactgagtcaggggaaaacgatagttttctgtggagggacggggtctggtaaaactacctttgcaaatgcctgtctggaatatataccgcatcatctgcggtgtatttctattgaagatactgatgaagcaaaattcagattccataaaaaccatgtaaaactttactatccggcagagggtgagagtaaggttattacctcagcgagtcttctgcgttcctgttttcgtatgaatccggacaggattctgatgacagaaatcaggggggctgaggcatgggattttctgaaagcatcgagttcaggccatgcaggaaacatcaccaccgttcacgaaagtagtcctgaatctgccgtgcttgggattgtccagcgatgttatatgaatcctgaatgtcagaatctaccattcaatgtcattttaagacgtgtactgagtaatattgatattatcatgagtattaaataccttgatgatgaagattttcggttcgcttccggtatttactacaaacaacttcattttgatgactatttcagaaaactgaaggagtga

SEQ ID NO: 375833 - DNA, 1836 bp, Salmonella enterica
atgtctttaaaactcccagataaaggccagtgggcttttatcggtctggttatgtgtctcgtgacatattatactggttctgttgctgtttacttcctgaacggaaaaacgccgctttatatatggaaaaattttgattccatgctcctgtggcgaataataacagagagtaatatacggacagatatcaggttaaccgctatcccctctcttttatcaggtatggtttcgtctctcatcgtgcctgtttttattatctggcaactgaataaaacagatgttgctctttatggtgacgcgaagtttgccagtgataatgatttaagaaaatcgaaacttctgaaatgggagaaagaaaacgatactgatattctcgtcggggcatataaaggtaaatacctgtggtataccgcaccagattttgtatcacttggcgcaggaacccgcgcaggtaaaggtgccgccattggtatccctaatcttctggtcagaaaacactctctgattgcgttagatccaaaacaggaattgtggaaaattaccagtaaggtgcgtgaaatactgctgggtaataaagtttatctgctcgaccctttcaacagtaaaacacaccagtttaatccccttttctatattgatttaaaagcggagagtggggctaaggatctgcttaaactgattgaaattctgtttccgtcttatggcatgacaggggcagaagcgcactttaataatcttgcgggtcaatactggacaggactggctaagttgcttcatttctttattaactatgagccgtcctggcttaatgagttcgggcttaaacccgttttctcaatcggttctgtcgtcgacttgtacagcaatattgaccgggaactgatactcagtaagcgggaagaactggagggaacaaacgggcttgatgaaaacgcgttgtatcatttgcgcgatgccctgaccaaaatcagggaatatcacgaaacggaagatgaacagcgttcaagcattgatggttctttccgtaagaaaatgagcctgttttatctcccaaccgttcgtaaatgtactgatggtaatgatttcgatctccgtcagttgcgacgggaagatatcactgtttatgtcggtgttaatgcggaagatatatctctggcttacgattttctgaacctgtttttcaacttcgttgttgaagtgacattgcgtgaaaatcctgattttgatcccaccctgaaacatgactgcctgatgtttcttgatgagttcccttcgattggttatatgccaattattaaaaagggatcagggtatattgcaggttttaaacttaaactgctgacgatttatcagaatatcagtcagctaaatgaaatctatggtattgagggagccaaaacgctgatgagtgctcatccatgccgtattatctatgctgtcagcgaagaggatgatgccgcgaagatatcagaaaaacttggatatattaccactacatcaaagagcacaagcaagagccgtggacggtcaacatcacagggcgaatcagaaagtgaagcccgaagagcactggtgcttccacaggagctgggaacgctggactttaaagaagagtttatcatcctgaagggggcgaaccctgttaaagcagaaaaggcactttattaccttgatccgtattttatggacagattaatgaaggtcagtcctaaactggcatcattgacgatggaactaaataagacgaaaaaaatatttggtgtgaaagggcttaaatatccgtcaaaagaaaaaatgctctccgtaggagaactggagtctgaggttttattatga

SEQ ID NO: 375834 - DNA, 414 bp, Salmonella enterica
atgaaaaaaatacttatgatcagtattcttttcctcacagcctgttcctctccacctgaaccgccacaggttgaatgggaaaaacggcctgaagttatgaatacacaaataattaactggacaccaacatccaacgttattaaatcagataatataaattcctcatggagtaaggtgttacctggttttaaaccagaaaatcgtctttacgatgattctgttttttatgcagttgcccactctgaaaaaatagttgtaaggacatcttcttttgatagttactggtctgcgaaagactggctaagaaaaaatggtgcaacaggtgttattgaatatcagccactaaaaagatggttgaataatgactatgttgaaatctatctttcgagaataaatgttcagaggttaccatga

SEQ ID NO: 375835 - DNA, 303 bp, Salmonella enterica
atgaaaaagatatgcaaaagtctaatcgtattttttactgtgtcctggctgacagcacctgcgtatgcatctgacccttgcgcttcggtactttgcttatatggaaaagcagtcgggcaaggtggagggagtgagtgcagaagtgctgaaaaggatttttttaatattctgaaaaagaaaaaaggaagcattcgctggagtaaaacttttgatgcccgtaaagcatttctgaatcagtgttcaacggctgatcctgctgctatatcgaaaatcatgagtaagtttggtcgtgtcagaggttaa

SEQ ID NO: 375836 - DNA, 402 bp, Salmonella enterica
atgacactggaccaactgcttgaaatccacgaccgcgctgggctgagcacctatgaacaggaaacaattatatctttcattaaccagcggcgaggtgactttggtgtaaaagcgttgccggaaattatgcctccagtatcttgcggctggatctccagaagaacaaaacagcgttctcaggagcaggcagacgaaaatagctggaattattataaacagaagattcaggaatggataacgctaatcgaattgcatgaggcatcacttaccaggggggaaaagctaaagcgctttgtgggaaagcataaatggtggttaggaggcacttgcgcagttatcgcatcaattacaagcactgtgatagctagctggattctttcgttatggacttgggctaactga

SEQ ID NO: 375837 - DNA, 312 bp, Salmonella enterica; identical to SEQ ID NO: 40708

SEQ ID NO: 375838 - DNA, 861 bp, Salmonella enterica; identical to SEQ ID NO: 5314

SEQ ID NO: 375839 - DNA, 558 bp, Salmonella enterica; identical to SEQ ID NO: 7707

SEQ ID NO: 375840 - DNA, 3006 bp, Salmonella enterica; identical to SEQ ID NO: 10984

SEQ ID NO: 375841 - DNA, 510 bp, Salmonella enterica
atggcaactgagtgggtagatgtggctgataatgccgttaaaattgggctgggtgcattaatcaccattgttggtggctggattacactgaaattaacacactgccacgaaataagaaaagatgcaatagctcagcgactgcgggatatagataaaaaaactgaccgctatatagattttctttcttcatcgcaaacgctaatgcagaaatatctttatgaatcatgtgatccaggtagcgaggactacaccaattatatgcggttgcataatattgtaagcctgacatcctcccctgaattgcgaatctatgcttttgatactcagtccaaagtatcgcaatttatcctgctcagaaagcccaacgaaccagaggttattgattcctgtcgcaatgccgcgagaaacgccgtttctgtgcttcagggggcagtgagtgctgaattgcttcaggataaagcagcacttcaggacaaacaacatgcatggtgggctttctggcgaaaataa

SEQ ID NO: 375842 - DNA, 957 bp, Salmonella enterica
atggaaatagtatcatttaaagtttctcagtataggtctatttcaggggagatatcctctgataactttaatggattaaccattgttgggcaaaacaacagtggtaaaacaaacctattaaaagctatgagggttttttttgaaggaaaatttaatcctgacttatatgactatgaaaaagataagccacatggtgttaagcaaggacaaactagttttgctgtaagatttactttttctgaaagtgagctagatgatgtctctgaggatttgagccaagacgatgatgatgacgatgatgactcgattattgaacttggtgttttaggggagcaagaagaacctagtaattctatttcatttgatgatggcagctctaaacaacaagaatcaaaaccaactcaatcaagaggcagaaagctaagtttgagagatagatatttgcagctgtttaacatgattgatgactccaggttaaattcacctcaaaacgaagtgaccgtacatctgacaatatctaataaaaacaattacttttacactgtctttaaaggttacaagaggaaacctgaagtaacttcctccatgtatacatctgttgaaagaaggttcatagaaaaaatactttctagttttgagtgtgtgtatataccatcgtcaaaaagtattgatgatatatatcataatctattagttccatatgttaggagtgaagtagcttcagccatgaaaacatcggttcaagtgattcatgataaactgttggaagtgtctgaaaagataacaaatgaaatgattctaagcggtatagatgactgtagctttatgattaaagctccgccatctcttgatgagttatttggtcgctttgaggtttcaataaaagatactattgagaatgtgatatcgagtaaaggtatggggctacaatgcttatcttcattttttcatcaataa

SEQ ID NO: 375843 - DNA, 1329 bp, Salmonella enterica
atgagccgcagggaattgttcagcgaatttcttgaaaatttgaatcttgaccttaaacaggcaaaaaagatcagctatcactatcgaaaaataaccaagtcattaaatcttgcgttcagaggaacgagttcccgggtagcaaaccgcttgaaagtggggtcagtaggcagacatactgcaataaaaggcatatccgatctggacatgctttatattatgccccccaatcagtatgaatattataaccgtaaggataatggtcaggctgcattgcttacagatgtcagaaacattttagcggaagaatatcctgaccagacggtgaaaaaggacagactggttgttcagatcatctttaaaaacttttatgtcgaggttcaacctgtattcagacaggatgatggcagctttaaattccctgaaagctataatgggggagcatggcgcattacaaaacctcttcacgaaaaggcggctatgaccgcattttcgcgagataaatccaataatctgcgcaagctgtgtaaaatgatcagagcctggaagaacctgcatggcgtcaatatggggggcttactgatagatacactggcgtatcgatttctttcatcaacatcagattatgacaataccggaaatggcagcctgggagccctcgccagagacttttttgaatatctgtcaaatgaggagaaaagggaaaggtatctcgcgttaggcagtaatcagtatgtacgtgttaaatctccctggtttggccgggcagcgaaacatgcgtatgaattatgttgtgatgccttagacgctgaggggtctgccagtgaaaatgacctctggcgcgaagtgttcggacgagccttccccagacgtaaggtgggtattatggaagccagccttggtctggaatcgcatgcggcagatgcagctccctggatcgataccgaagaatttatagaggataaatatccggtggatatcaggcactcactcaaccttgactgtaccgtaacccaagatggtttccctcccagaagcctgagagagatgcttactagaggatttcgcctctccgctcggaaatctctccttttccgggcagacttgacagaaatggaggcagaggaaccctacaccgttatgtggaaggtactgaacgtgggtgacgaagcacgcagaagaaatatgatccggggacaaatcgtttcggacggcggctactgtacaaagaaagaggccaccgacttccgcggagatcacgtggtagaatgctatgtgataaaaaatgaggttgtggttgcccgggcccagattgaagttcccataaactga

SEQ ID NO: 375844 - DNA, 645 bp, Salmonella enterica
atgacttcaaatgtaccaacaagctttgtccgcgcttatctgagagcttcaacagcagaacaggatgcttcgcgtgccctggaaactatcgaggcttttaccagggaaagaggcctgatcatttgcagctactatattgagaatgaatccggcacccgtcttgagcgcccggaactttttcgtcttctgagagattgccaacaaaatgacattttgcttatcgaggatgtggacagactttcccgcctgtcaggggaagactggaatacgttgaagaaaatgatccggcagaaagacatccgggttatggcggtgaatgtgccgacgacatggattaattctggtatgagtgagtttgacagccggttgtttgcagccattaacgatatgctgctggatatgctggccgcagttgccagaagggactatgaacaacgtcgggaacgccagaaacaagggatagagaaagcaaggaaagacggcaaatataaagggcgtaaacctaatcaagccagacatgatgcaattatcaggttgatagaaagcggtagctcctggacacaggtacagaaagtgctagggtgcagccgtggcacaatcagtaatgcgctaaaacgtaaaaccgggcagaaatccagtaagtag

SEQ ID NO: 375845 - DNA, 621 bp, Salmonella enterica
atgaaagtgatctcatttctgaatccgaaagggggttcaggtaaaacaactgccgtaatcaacatagccactgcgttgagcagaagcggatacaacattgctgtggtagatacagatccacaaatgagcctgacgaactggagcaaagcaggcaaagcagcatttgacgtatttacagcagcatcagaaaaagacgtctatggaattcgaaaagatctggcggactatgactttgctatcgtggacggggcaggttcactctcagtaatcacatccgcagccgttatggtaagcgacctggtaattatccctgtcacccccagccctctggatttctccgcagcaggaagtgtggttacagtcctggaagcacaggcttacagccgcaaagtagaagcccgctttcttatcacccgtaagatagaaatggcaaccatgttgaatgtgcttaaagaaagtatcaaagacaccggtgttaaagcatttcgtacagctattacacaacgtcaggtttacgtgaaatcgattcttgatggcgacagcgtgtttgaatccagtgatggcgctgcaaaaggtgaaatagaaatccttacaaaagagatagttagaacatttgagtaa

SEQ ID NO: 375846 - DNA, 231 bp, Salmonella enterica
atgtcacttgaaaaagcgcatacgtcagtaaaaaaaatgacctttggtgaaaacagagatctggaacgagtagtaacagcaccagtatcatctggaaaaatcaaacgtgttaacgttaattttgatgaagaaaagcacacccggtttaaggctgcatgcgccaggaaaggtacatcaattactgacgtggtgaaccagcttgtagataactggctcaaagagaacgaataa

SEQ ID NO: 375847 - DNA, 2136 bp, Salmonella enterica
  misc_feature (1412)..(1421): n is a, c, g, or t
atgagactttttattgcagaaaaacccgcagtagcaaatgatattgttaaggcacttggtggcaattttacccgccatgatggctggtttgaaagtgataacgccattgtgactaactgttttggtcatattatcgaatcacaaccgccggaaaactataatcctgaatacaaagcctggaaggttgaaacgcttcctttacgtctttatcccgtgaagtatcagcctgttgaaagtgcagcaaaacaggttaaaacgattctcgaacttatcagacgtggagacgtgactgaaattgttcacgctggcgatcctgatgatgagggacagctacttgttgatgaagtcctggaatatgcaggaaacacaaaacccgtaaagcgcgttctgattaacgacaacacgcttccggcagtgaaaaaggcactggcaaatcttaaagataatcgtgatttcaaagggctttaccttaaggcgctggcgcgttcagttgctgatgccgtctatggtttctccatgacgcgtgcttacaccattcctgcaaaagccagaggatatcagggcgttctgtctgtcgggcgcgtccagacgcccgttcttggcctgattgtgaatcgtacccgtgctaaccagaaccataaatccagtttttactacaccatgaccggagtctttcagcgtggtgctgatgttatcagggcgaactggaagccaggggaatttgctccgctgacagaccgtaaattacttgataacgcgtgggcagacggaacggcagcatcccttgcaggaaaaccggctacagttgaagcggcagcaactgatgataaaaaaacggctgcgccgttgccgtttaacctggtcagactccagcaatacatgaacaaaaagttcaaaatgacggcacaaaaaacgctggatattacgcaacaattacgtgaaaaatataaagcgattacttataaccgctctgattgctcatatctttctgatgaacaattcagcgaagcgccgcaggttatcgatgccctgaaatcagtctttcctcagtcgctggatattgattctgcacgtaaaagcaaagcgtttaacagtgaaaaggtgactgcgcatactgctataatcccgaccgccagtgtgcctgatgttaacgcactcagcaccgacgagcgcaatgtttacctggcgatcgcacaacactatcttgttcagttcatgcctgaaaaagcataccaggaagtatcggttgccattcagtgtggtgaggagtcgttctatgcccgtgccagaaaaacaactgacagcggatttgagggggttcttggcgcggaaaccacagacgaaggtgaatcagaagataatgatgattccgcttttgaactgctctgtaaaattcgcacaggagaaacacnnnnnnnnnngaagaaaacaacaccgccgccgttattcaccgaagcctccttgcttgctgcgcttgttcgtgtcgcggattttgtcactgatccaacgattaaaaaattgctgaaggataaagataaagacaaaaaagatgaacatggcggcattggtacgccagctacccgcgcagccattttggaaacgctgaagaaaagaaactatatcacgctggaaaaagggaaacttattcctactgataccggatatgcgcttattgatgccctgcctggtatagcggttaatcctgatatgacagcattatggtctgaaaagcaggctgccatagaaaatggcgacctgacggttgaacagtttattaatgagctgtacggtgaactgacaggcatgatttctgatgttgacctgggcgagatgaagattgagcccgctgcgccagcagggcagtttcaacgcctggactctccctgcccttcctgtggtaaacatattgttatcaggccgaaaggttatttctgtaccggatgtgaatttaaaatctggagtgagttttctggtaagaaaatcacccaggcacaggccggaaaactgcttaaatcagggaaaaccgatttgattaagggatttaaaaagaaaagtggtggaacgtatgatacagttcttgtccttgaggataagaaaacagggaagctgggttttccggcaagggctaagaagtga

SEQ ID NO: 375848 - DNA, 462 bp, Salmonella enterica; identical to SEQ ID NO: 79302

SEQ ID NO: 375849 - DNA, 1044 bp, Salmonella enterica; identical to SEQ ID NO: 372415

SEQ ID NO: 375850 - DNA, 792 bp, Salmonella enterica
gtgggaacaacaaaagattgggttatacaagtcgaggaaagtcgccgtgaggaatggatacgagagcggctttccagcccagatcttgaggaagattctgaagaatggcagttacttgaaaaggactatgacgagtatcaggattttctttctgatatggctatggaagaatatgaaaccgaaaaatggttaaaacagcatccacatacagaaatttataaaatagcaataaaccttttagaacaaataaaagaagagggaaaacaatctacaagtgaagttttcataaaaatgaaaatcgcatacattgtgacaataatggaaaactgtcttagcgaaatgattaaaagcgttgtattgtcacataacagatatgtagaaaatgccataagaaacataaatgaactgaaagcaaagaatatctctctgtctgaattgataaataaagagtctaatgcaaacaaatatgtacaggagtacctttcagatattctttatcatagaatccaactggtagttgaaatatataaagcagtcctgcaacctaagcaatatccacgttttccactcaaaaatatcaatgaattgatgaaactgaggcatgacatagttcatcgtaacgggaaaacgaaaacaacggatgaaaagatacatacattcaatacagctacgctcaatgatgcgtttaaagttgtagaggagtttcttaataacatgatgaatttgatcagtgatgctgttgagcatcatgagaatgagcagatagccagagatcttgaagacgagttttga

SEQ ID NO: 375851 - DNA, 180 bp, Salmonella enterica; identical to SEQ ID NO: 79306

SEQ ID NO: 375852 - DNA, 1152 bp, Salmonella enterica
atgactggaaatctcaatatgggcactaacgatattaataatgccaagaacattaccgcatcgggaacggggatctttggtggggatgtttcttccgcagggaaaataatcgcagcacaagaaataatagcgcataatggttatggtgatgccatacattttggcggcgatgctgttaataacgactatgaaataaccatgtctaaggataagaccttatctattcatatggcaagcaatcgaacagatctcactacgctgaaaattagtggagggctgtctacgattggtaatggaacgattagtggaacattagatacaggtaaaagtatcacatccggtggacaatttaatggtcataacggtggtggtgatagtttcagtattggtggtggagatgctaacgattatgagttcagattagatactgttaagccgctaaccatctggcgaaatggtggcaccagtactgaaacaaggcttcaggtttttgggaaacaaaccaaccaaggtgattttgctattactccggggacaggaagcactggtagtattgcagcatctggaaatattcagggacatactctacaacctacatcgacgaatacaactggtgggacatgtccaagtataggcctgatatctaaagacaacatgggaaatatattatcctgcgttaatggaaaatggtctgttgtcagtaacctgccagttggttcacctgttccttggccttcaaatacagcgcctgtaggttggttaatatgcaggggacaatcttttaatactgccctatatcctcagttagcaaaagcctatccaagaggaagacttcctgatttaagaggagtatttattcgagggctggattcgggaagaggacttgactcaggaagagttattaattcttatcaggatgatcagattcaaaatattacaggtcatatggcggctgatgtatcacagagtggaaacatcggtaaatatgtgagtggcgctttcgcggatagtggtgcgttaggtgaaggtgatgaaggtcataaaagcaatgaagtaaggaaatatacgtttgatgcttcgagagtcgttcgggcaggtaatgaaacaagacctaagaatgttgccatgaattatatcgttcaggcacaatga

SEQ ID NO: 375853 - DNA, 348 bp, Salmonella enterica
atgatgatgaaggaaactgacgtggtcgagaaggccttcttcatggccgacatggtggagaaacgcctgcattccccggacgatgtccatcgggtgtttatgtctgccaccggtatcagtcgcggggagtatgacagaagtataaaaagtcccgccgtgaatgacatggtggcattacaggaacggttgtttaaggaatatggcgtgagggggacgccttccgtgtatgtccgtggccgttaccacatcaacaatgccgccttcagcgcattctccgtcgaagacttcaggagccgttatgctgcggtggtccggaaactgctggccggtaaccctgatgccgactga

SEQ ID NO: 375854 - DNA, 186 bp, Salmonella enterica; identical to SEQ ID NO: 372430

SEQ ID NO: 375855 - DNA, 555 bp, Salmonella enterica
atgggttacccgcatgctgaagtatccagcgaagggccggggagcgtgttaattcatgatgatatacaaatggatcagcaatggcgtaaggttcaaccattacttgcagatattcccgggttattgcactggcagattagtcactctcatcagtctcagggagatgatattatttctgcgataatagagaacggtttagtggggcttgtcaatgttacgccaatgcggcgctcttttgttatcagtggtgtactggatgaatctcatcaacgcattttgcaagaaacgttagcagcattaaagaaaaaggatcccgctctttctttaatttatcaggatattgcgccttcccatgatgaaagcaagtatctgcctgcgccagtggctggctttgtacagagtcgccatggtaattacttattactgacgaataaagagcgtttacgtgtaggggcattgttacccaatgggggagaaattgtccatctgagtgccgatgtggtaacgattaaacattatgatactttgattaactatccattagattttaagtga

SEQ ID NO: 375856 - DNA, 300 bp, Salmonella enterica
atgacaaaaccagcatcaaccaccaaaaagccacgcaagcagcacacgcctgaatttcgtcaggaagctatgaaactggctgaacgcattggggtggccgctgccgcccgcgaacttaacctgtatgaatcacagctctacaactggcgaagcaaacagcaaaatcagctctcttcttctgaacgcgagcaggagatgtccgctgagatcgcccgtctgaaacgtcaactggcagaacgggatgaggaactggccattctccagaaggccgcgacatacttcgcgaagcgcctgaaatga

SEQ ID NO: 375857 - DNA, 258 bp, Salmonella enterica
gtgagattaagtgagattctttttcctgccagtgaatatggaactgaacagttttttagtgattttgaaaagataaactccatttcattacctgtcttagtgtttgatctcaaagagagtgttcctgtgattgtcattagtcttgatgatgtcagctactgtgatgttctggacgaaatggatattgattttatgaaatgtgattcgctggcagaattgcttaccagcgataagctggatgcgttatttaaggattga

SEQ ID NO: 375858 - DNA, 171 bp, Salmonella enterica
atgaaaaggaaacgggatactggcggagtattgtgtgtttttttgatagctgtttcatacaatgttttggttaatgtaaatattcagtcacatagcgcctacatagcagagaatacaacaacttttattagtgttaatctctacatcgataacaaacaagagaaaaagtga

SEQ ID NO: 375859 - DNA, 129 bp, Salmonella enterica; identical to SEQ ID NO: 370387

SEQ ID NO: 375860 - DNA, 180 bp, Salmonella enterica; identical to SEQ ID NO: 372498

SEQ ID NO: 375861 - DNA, 129 bp, Salmonella enterica
atgggttatgtgtttcccctcgaaattcctcgaaatttcctcgaatttctgtattccgggctttttcgttatatcagatccaaatccagtttaacatttcttttacagcaaaagcagagcatcacgtaa

SEQ ID NO: 375862 - DNA, 453 bp, Salmonella enterica
atgagcggcttgtttagcgcgcgcttgcgctttacgcgcttcacgggccgcgatgacggcgctattgtctggcagactacccgcctgaataaccaccggttgcgtggcctgcgcctgtttctcttttacccgcgccagcgcagcggcaatggcatcctgatcttttgccgctggttgtaccgctgcgctcttatgacgtgcaaggcgggcggctttttcgcgctccagtcttgcctgacgagcctcaaaacgcgctttggcttcggcggcgcgtttttcttcaagcctgatcgcattaatctccgctttttcctgacggaaatattggacgagcggaatattactggggcagacccaggcgcaggcgccgcattctatacaatcagcaatatggtgagcggtagccttgtcatgctgctgccctttgctgaaccaataaagctgctgcggtaa

SEQ ID NO: 375863 - DNA, 291 bp, Salmonella enterica
atgcgccaggatgcgaataccttccacaatctgcgcggcgcagtcctgcatcagacgatcgtccgccgtaatgtaaggttcgcactctgcggcattgataataagcgtggtgattttatcgccgccgccctgcaatttaacgccggtgggaaaccctgcgccgccaagcccggcaacgccatactgatgaatgcgttcaatgagcgcttcacggctgtgggcgcggtaatcagaccagccctcgcgttcaatccagcggtcctcgccgtcggcatcaatgatgacgcttaa

SEQ ID NO: 375864 - DNA, 969 bp, Salmonella enterica; identical to SEQ ID NO: 369743

SEQ ID NO: 375865 - DNA, 126 bp, Salmonella enterica
atgaagtataagaaaaataagaaaatcatcacatatggggacggtgacgactttgttaatgtagctgggatcattgtccagcacaacaccattaatgttagcgctgctgagtttattgcattgtaa

SEQ ID NO: 375866 - DNA, 666 bp, Salmonella enterica
gtggtcctgcgcgtagtaaccaatacgcgcgttttccgaccatttaacggtgccgtgatcggcgtccagatcgccaaccagcgtcttcagcagcgtagatttacccacgccattggtgccgagtaccgccagcttctccccgacttcgagcagcaaattgacatttttaaacagcggaccgttatcaaaacctttcgtcaacgcttccacttccagagcgttacggaacagttttttatcctgctcaaaacggatgaacgggttctgacggctggaggctttcacctcttccagcttgattttatcaatctgccgcgcgcgcgacgttgcctgacgcgatttagaggcattggcgctaaaacggctaacaaaagattgcagctcggcaatttgcgcttttttcttcgcattatcggccaacagacgttcacgcgcctgggtcgccgccgtcatatactcatcatagttacccggatagacgcgcaagtcgccataatccagatccgccatatgcgtacaaaccatgttcaggaagtgacggtcgtgcgaaatgatgatcatcgtgctgtcgcgctcgttcagcacctgctccagccaacggatagtatcaatatccaggttgttggtcggttcgtcgagcaacaggatgtccggattagagaataa

SEQ ID NO: 375867 - DNA, 444 bp, Salmonella enterica
atgctgctccagcgggatgcccacccccaacagcagttcgcccgcgcgcgcctcagcggaataaccgtccatctcgccgtattttacttccagatcggcgactttatagccgtcttcttcgctcatttccggcaaggcgtagatacggtcgcgctcctgcttgacttcccacagttcgccatgccccataatgacagtatcaagtacggtgaatgtttcaaaagcgaactggtcctgacgcagcttaccgatgcgctcattcggatcgagggaaacattgcccagcgtcggctccaggtcgccgccgaggattttcataaaagtggactttccgctaccgttggcgccgatcaggccgtaacggttgccgccgccaaatttgacggaaatgttttcgaacagcggcttactgccgaactgcatggtaacgttgctggaaactaa

SEQ ID NO: 375868 - DNA, 1581 bp, Salmonella enterica; identical to SEQ ID NO: 370870

SEQ ID NO: 375869 - DNA, 144 bp, Salmonella enterica; identical to SEQ ID NO: 372441

SEQ ID NO: 375870 - DNA, 351 bp, Salmonella enterica
atggcgtctgctctgaccgctttcccggaagacggggatttcggccggatatggtacgaccggctttgtatcgaatttaacagcgacggcggactgagtccggctgaactgcgggttatccgactgctgctgcggggctataacagcgggcagattgctgccctctgttttcgcagcgtcaaaaccatttcagcccagaaaggccaggctttcaggcgcctcggcgtcaggaatgatgccactctgttgccgaccctgatactgctggggatggtgacactgtacaccgacctgaaccgggttcattcactggaagaggacggcccgatatgcgggccggaggccggataa

SEQ ID NO: 375871 - DNA, 1506 bp, Salmonella enterica; identical to SEQ ID NO: 369529

SEQ ID NO: 375872 - DNA, 597 bp, Salmonella enterica
atggcatcagataatagatacagtattaacttcacgctatctgttttagaaaaaacagaagcaagcaagctgataaaagaacatgaaaaacaagagcatatagaaccatatggctatatattgcttataaaaaaagcagcgttgttagttctttcatttgctgcattatttgattttataatactttttggtttgattgctctcgccccaaaagaccctggttatgtagaaagagcaaaatttctttccattattacatttacactaatagctatatttatcgggttattatatatatatgattatttgatgaaaaaagtaatgaggactaactatttatcagaaataagagattctgaactaatgttacgtctcaaaataaatcgttcatacattgagcaaatcatgaaaattggtagttcgaaggttttctggaataacataaaaaaaacataccgtgagaaaggatttctatttatccagacaaaagaaaacagatgcataatcattccagaaagagtttttaaaaatggagaagaaaccgaaaaattatataattttgtaaaggagcaaatagcaaaaaacacaatagaatga

SEQ ID NO: 375873 - DNA, 225 bp, Salmonella enterica
atgagaatattcattgtattagctggtcttctcttgggatgctggaacttatttgataactacagatcctataaaaaaggagtttataaagagcatcgcaagatggctcctcctgtttattattatcggggagatcatacttttgtcatacggatagtaattgattcacttttaagtctggtgattattggctttgttgtctggttctggtttaaaactgcttaa

SEQ ID NO: 375874 - DNA, 312 bp, Salmonella enterica
atggataaaaacgtcgttgatgcgctgaaaacgctattagaagcgttacgggaagaagtggtaacagaagtcacatcaaaactaaatccttcggcaagccatattcctgaagaaaacagtaaacaaatgacagcaaaagcaagactactgaatttccggctaaccgaagcctatgaagaaatcctggaagctgaagctatcaggactggtcagagcaaaacaaccgttctcaaagcggcgctggccgctttcgatagcctggacgagaaccggaaaaaccactggctgcttgaatctgcaaagttaggttag

SEQ ID NO: 375875 - DNA, 576 bp, Salmonella enterica
atgacgcaatcagagatgctgaaattaattgccagacatggttataacgttggatttggcgctaagaaaaactttgccacctatgatctaatttgtaaggcatccggttggattagctttatttctcttgctgtcggtgtgttcgctctttttattcctgagctagccacaaacgtaatttccgcgatattaattatatttggtgttgctacaatgtacattcagttttatgactcggaaaagcagagttatgaaagtgcggggattgagcagacaaaaatttttaatgaacttgaagttatttaccgcaacgtaaaaagcgatgcaaactttgactatcagcatacacaacaatccatcgacgctatcatgtcccggttttacggcacggtcatcagcaaacagatcttcggaagtaactggtacgcacattataaattttactgtgaatttgagaaaacatgggttgaagaagaactaaacttgacactgaaggacaaaatcccgctttcgctctgctttctcgccggtctggcaatcattttcattatagctgtcatctggaaaatgctctga

SEQ ID NO: 375876 - DNA, 1326 bp, Salmonella enterica
atggcaacaaaaaaatacgaactaacaaaagaatacttttttcatggtgaattttggcaccaacttgatgataacaaaggaagattttcagcacgaattgaatattcaccgtaccatggtctgattctagattattgtatttctgacagtgaaagccccagaacatgtgaaatattatatggagtcttaaatactggagaaagatgtactctaattgggaaatttgatttcacacaagggaatattcattttgataaagggattatccatactggaaggcatggatttcccataatgctattcaatgatttttatgctcccgactcaaagatagaatattgtgatttatccttgcacggattgcaagaatttatccaccctcacggttttttcactcaattgaaacatttagaacatccaatatttatcgcaaaaggaaaccattggactcttcaacttgtcaaccatgtatcttttagcgtaattggtgatgatctattaaacataataaattgccaaaacaaagccgcactggagaacataattcatcaactaaaaaagacaaaagaattataccctgatgcttttttctccattagaaaagaacttgttttctactttaggataaaatcatctaatgatttaggaatagaagaccatatatcaaagtgctgggatatttccgggttattttcaattcttctgaacaaaccaactcttcctgaagaaataaacataaagttcaagggaaatggttcgaagacaccatgtctcttaacaacggggtttgaacaaagaactattgacctagcgctgagagaaataaaacatcaactccttccaataaacaggaagcatattaatcttgggaagatattctgcaaatggttcaaaatagcagaaagatatatgccattgacaataacatatcagtatgaaaccggttttcgaacactgcatcaagctcatactgatattatattgtttgcgactcaattagaagcaataaacaaaacaataggtggctcaaaaaatgaaaaatacatgaaacccattaatgaatatgcaagtttgtttcttattcaagagatagagatgttttttaagaaattcaacaataaatctattggtgaaaatattgccacactcagaaatgaattagcacatgttgaccgcaaaaaggagttaatgaacatattgacgattggtgattatgttaaaattggaaactacctaaaaacaattgtaacatcttatctgctatcagatttaggaatcaataacattattattgaaaaatatcaggctcagacaattcaagagtaa

SEQ ID NO: 375877 - DNA, 264 bp, Salmonella enterica
atgagtaatacatcctacaaacaaattatccctgcgacagactggtatttccgtcacgataatgtctccggtgtggcaggaaagtcaacagtataccaactggctgcatgggcgcttaaagaaaatggtgaggtagttggtctggtgacggttcgtgatgataatgggcgccctaaactggttactcctccccctgtccctggtgattatttgcataaagaacaactcaccgatgatgaaaaagagtgggcgaagagacgctaa

SEQ ID NO: 375878 - DNA, 2208 bp, Salmonella enterica
atgagtagccgggatttgacccgattttcagctgcccggcgtcatgcgatcctggtgtgcgtgctggaagaagccagagccacactgacagacgaagtgattgagctgcatgagcgaatgctgaatagtcttttcagcaaagccaaacgaacacaggctgagcgccttcagcagaccggaaagctgatccagtcaaaactgaggcagtacatcgatgtcggtcaggcgctgtctgatgcccgtgattccggtggcgatccctggctcgcaatagaaaacatactcccatgggctgaatttgtcgccagtctggatgaaacacgccatctcgccagaaaaaataattttgacccgctgcatattattaccgagaaatacagcacattacggaaatatgccccacgcatgttgtccgctttacagttagtcgcaaccccggcagcgcaacctctggctgatgcactggttgtgatcaaggatatgtaccggaagcagtcacgtaaagttccggcggcagcgccgcttgagtttgtccctgaaagctggcgcaaggtggtgattacacctgtgggtattgaccggcagtactatgagttttgtgcactcagcgagcttaagggggcgttgcgctccggggatatctgggttaaaggctcgcgccgctacaaaaattttgatgattacctcatacccgagaaggactttgacaaactcacaccggcactgccactgcccgtatctgctgattatcatgagtacattaccagccgtatgaccctgcttcagtccagacttgaagaggtcaatgccatggctgcccttggtgaactgcccgatgtggaaatatccgacaggggcgtaaaagtctctccgctggataactgcgttccggcgcaggtttcaccgctggcagagctggtttacagcatgctaccgcgacctaaaatcacggaaattctcgatgaggtaaacagctggacgacgtttacccgacatttttcgcatataaaaaatgacattacccgtcccgatacccgcttgctcctcaccaccattcttgcggatggcatcaatcttggcctgaccaaaatggcagaagcctgccccgggagcaccaaatcatcactcgaagatattcaggcatggtacatccgtgacgaaacctattcagccgctcttgcagagctggtaaatgcgcaggggaaaagaccgttggcggcattttggggagacggaacaacgtcatcatcagatggacaaaatttcagaaccggcagctcaggccgctacgcagggcaggttaacccgaaatatgggcaagagcctggacgtcagttttatacccatatttcggatcaatacagcccgttttacacctgcataatcagtcgggtcagggattcaacccatgttctcgatggcttgctgtaccacgaaagcgacctggaaatcagggaacattacaccgataccgctggtttcaccgatcatgtctttgccctgatgcatctgttgggatttgcgttctgtccgcgaatcagggatctccacgacaaaaaactgtttatcaaagggaaagcagagaaatacccggcgcttcagtcactgatatcaacgaccagcctgaatctgaaagagatcgaaatccactggcgtgaagtgctgcgtctggcaacctcgataaagcagggaaccgtgacggcatccctgatgctgaaaaagcttgccagctatcccaagcaaaacggacttgccaaagcactgagagaaattggccgcattgagcgaaccctgtttatgctcgactggttccgcgacccggctctgcgtcggcgggtacaggcggggctgaataaaggcgaagcccgtaacgcgctggcgcgtgcggtatttatgcaccgactgggagaaatcagggacagaaaaccggaaaatcagagctatcgcgccagtggactgacgctgctgacggctgccatatccctgtggaataccgtctatatggaaagagcggtcgatgccctgaagcgtaaaggggtgaagatcaacgagcaactgctgtcgcatttgtcgccgttgggctgggaacacatcaatctgacaggtgattatatctggaaaagcaaccggataccggcttctggtaagtttcgtcggctaagaccagctaaagtcgaaaggtcaaaaaacagccttaacgtacaataa

SEQ ID NO: 375879 - DNA, 738 bp, Salmonella enterica
atggcaaggaggcagattctttctctgtcggaaagagaatcattactggcattaccggacgatgagttaacgctgacccgaatggcctatttcagtgagcatgatctggcgcttatcagtgctcaccgtaaacccgccagccgttttggttttgccgtccttctttgctatctgaaaaatgtcggctttgccccggataaaaaaatctctccctctgatgcgctgctgaagcatatcgccagcaggctaaagcttaccggggatctctggcctgcttacctttccggccgggatacgacccggcgtgagcatttaaccgaactgtaccgctatcttggcgtaaaggcgttcaccggcaaaatacagcaggactgtattacgcacctgttatcgatggcgacgcgcaccgataaaggcattctcctagccgaagagttacttgtctatctccggcagaacaacgtgataatccccgcgattgatgtcgtggagcgtacctgtgctgaagtcatggcaggcggcgataaaatcgtatttcagaccctgaatgccccgttaactccggctcacagggatgccctggatcatttacttgagtcatcagataatcagccttccaggctgacatggcttctgcaaccgccgggtaaaatcaatggtaagaacgtgctgcaacatcttgatcggctcagcagcattgaatcgctggcattacctgaaggtatagatggggtctga

SEQ ID NO: 375880 - DNA, 1134 bp, Salmonella enterica
atgaatagttggatttctatgctgcaagatgccgcagagatgtttttgtttttggccgtcgagctatctttgctgtttattgtcatcagtgccggtgtgagcctgataaggcaaaaggtcccggaccataaaatccagcaattgataggggcgaaaaaaggaaaaggctacctgctggcctcgttgttgggagccgttacccctttctgtagttgctcaacaattccaatgctacgagggttgttgtcggcgaaagcagggtttggtccgacactcacttttttgtttgtttcaccgttgcttaatcccattatcgtggggttaatgtgggttacctttggctggaaagtaactttgttgtacgcgatcatcgctgccggtgtctcagtccttgccagtatcgtattggatttactaggatttgaacgtcatattgttgatcacaaaaactcagcatcaagtggttgcaccacgaaatgcgatgattccgaagcttcggtaaaaacgtcggcgggttccagttgttgcagcactagctcgactcaattgcctttaaaaacgagttgctgtacttcatcagcgaaccccataattaacttaaggacggtaaagaacgagcagaacgtatcagcgtgttgttcatcaatatcatctgaacaaccagctgttagctgttgcagcagcgagaatctgggcaatgtgaatctcacaacgaataccacctctggcccaataaagttagctatgaaagatgccttacagcagtttaaggatgttctgccttatcttttgttaagtgtattaataggttcatttatttatggctttatcccttcagagtggattgcagctcatgccggagcagataatcccttagccataccgctgagtgcagttgttggtattccgttgtatatccgcgcagaggcagtgataccacttgcatcagtgctgatgactaaaggaatgggcctgggggcattaatggccttgataatcggtagtgctggagcgagtttgacagaagtaatactgcttaaatcaatgttcagaatgcctatgatagtcgcttttctgacagtaatcctgggtatggccatacttatggggtatctgacccaattgcttttttaa

SEQ ID NO: 375881 - DNA, 324 bp, Salmonella enterica
atgcaactggaagaagtagctaaagcactaaaagagctgggtcacccgacccgtttgttcatattcaaacatcttgtaaaagctggagaacaaggtttgcctgtaggtgaattgcaaaagcagcttggcattccctcatcaacgttaagtcatcatatttcagccctggtatcagtagggctcgtcacacaaaaccgggagagtcgaacgctcatgtgtgtctctcaatacgaaatactggaagctatcatcgaattcttacgtgaagagtgctgtgtaaacagtaaaacagatgttgcggaacacgctggcaaaaatggataa

SEQ ID NO: 375882 - DNA, 576 bp, Salmonella enterica
atgcaatatgcattgcttgatggatttgaacgaaagtttttgctggatgttcttgaattcggtgttctgaaggactggaaagaaaatccggtaaaagaacttcctgatattgatgaatctgctcaccccttccatgtctgttatggtggatatttattaaatcctggtgtttcagattcagatattagcagaaaaataaaagaccagacaggattctggctggcagctattgatgatacccgcatggattgtcattcaatagcttattatgatattcacacactccctctgatttcgtgtggtcatcaaaagatagttccttttgccgcgttaataaaagctgatgaatgcatcatttcaaaaatttcttcgtattctggttttgctgtaacagcctttttgagaattaaagaccaggatatcgcaactaatatacttaaccgtgaggggatttttgcttttaatggctgtgaacgcagattcagacatccagtaagtgaagataactggcagcaggcagtatcagaagaacgcgctattcgttgtgcaaacagattaattcaatgtaaaggataa

SEQ ID NO: 375883 - DNA, 588 bp, Salmonella enterica
atgtacctgcatattgtccctaaactctttcatcgcatggcgaataaatgtactcttaaatccatcgccatacctgaacttgatttaataattgatagcgaatcattgtctgtgggaagaccgtggcctaataaatgtgtatgggttggaatgctgaaaggcagaaaatcagttaatggtcttattttgcaaacagataaaaaattaagatggtttactaccagatacacctgggatattgaagatatggggctaatttaccatcagattaatacttatataaaagataatgagtttgatatggtgtcacaggaaattcttttaaatggttcttttgataagtggagtgacagggtgcattcagcttatgaaaataagcctccagccagaattcagcccaaaatggagtccttattaaataagcctggtgaaaacagtcatgatatgtggaaagagttcgaatggggtgacttccttctgtccagagaagaaagccttttacttcacactattcagtctgaacgattgaatacagattgttctttattcaaaagacaaccgtctattgaaagtgcattagttatataa

SEQ ID NO: 375884 - DNA, 360 bp, Salmonella enterica
atgatgacaaaacattataaagaacgattcaataaaagaattggtggtgaagttcagattagtgctgatatccgtgtcagtgatttcatgacagaaggtgcagcttacgtcactataacggaatcaactgaatcatccctgtatgagcaaatctgccagtatgccttgcaacatggtgaagatttacaggagatgtttaaggatgaaaaatatgaatatatgtcctgttttgttcgtgatgtggcaacattcagagctaattttgaaaacgaagagacgttaaaacctctgtttaatcatggtaaaggtgacactgttgaatttgttatcagtgttcctgaaaaaagagtcgaggattaa

SEQ ID NO: 375885 - DNA, 186 bp, Salmonella enterica
atggggattattattcgtctgttatacggaagtctcccatgtatacccgcccttacctaccgccgtgatcatttttgctttccgggccggtcctacttcgccgataaagataaagttaactttgctgctagccattgcattcacgtatatctgaaacagttgagatggttatcatcgctttattag

SEQ ID NO: 375886 - DNA, 642 bp, Salmonella enterica; identical to SEQ ID NO: 31871

SEQ ID NO: 375887 - DNA, 123 bp, Salmonella enterica; identical to SEQ ID NO: 8077

SEQ ID NO: 375888 - DNA, 1263 bp, Salmonella enterica; identical to SEQ ID NO: 67462

SEQ ID NO: 375889 - DNA, 513 bp, Salmonella enterica
atgaggatttttttaagcgtgattttattcctgtttactgcttttcagtctgcaaatgcaggtggaatacctagtgctttagcaggaatactttctacattaaacctggaaatccaggggaaagttattcgtgttctcgatggcgatacaatcgaagttttacaggataaaaagcccgtcaggattcgcctggcaaacatcgatgcaccggagaaaaaacaggctttcgggcgctggtcagcaaatcagcttaaagctctgctcgcaggacaatccgttaccgtctcttatacgcagacagaccgctacggacgcattatcggtcatgtgttcacgacgaacggcacggatgccagccgctttatggttcagtctggcgctgcatgggtatatgaacgttacaacgtggatgaatcattaccggctctgcaacgggaagcgcaggaacaaaaacgcggtttgtgggccgacgcaaatccggttccaccgtgggaatggcgtattagaaattaa

SEQ ID NO: 375890 - DNA, 435 bp, Salmonella enterica
atgatgaataaatttagttatgtcaatcgtatgcttcggcaagtttttgtttttagttttatcacggccccatcaatagctttatttgttgtttttatgtttttttcgtttaataactcaattgctggttcatttttaaaagaggccagggggcttataaccgatactccttctgataaggttaacgtctgtcttttcgaaaagggcgtaccacaggatatggagttgacaaactccacaactgaacatgtattaaaaaataaatgtataacaacgttagttgatgctgctgactggcaggaatctgttgacggttccattcgatatttttattggtcgtcagttgttattggctttgtggtctggcttacccttaattttcgtgcactggaagaactattttatcgtagaaacagaaaaggagacgttgaatga

SEQ ID NO: 375891 - DNA, 258 bp, Salmonella enterica
atgaaaaaaaaagaaaagattgattttcttaatgcaataaaagcagggcactctggctttatagctggtaatcctgctcatgcattggatgataagactatgaacgtcatcattcataactacgaggcaacgattgcgcccggtaaagcaggtaactgcaaagaaactcctctcacaaagtattgttcgaggacaataccagagcgtatttcagttgaagaaatcaatgaggttaaaatttatccagagttattctga

SEQ ID NO: 375892 - DNA, 1134 bp, Salmonella enterica
atggggattgtcactggtataccggatggtactgatttatcaggtaatgtaacctctcccgcaaatgcgggaggtgtttctggatttgattctgatttttttcagacaactcatgaagttatatttaatattctcaacaagagtatatctggaaaattaagtgaatattcagatgtggcttatactcttggtaaatatggagtttctctgtatgttttatggtatgcttttactgtattagcaaggaaacaacagacacctgtacctgattttatctggaatatctgtaggttttacataatattgctttttgttaagaatacagggggaatacttacatcagcaacagatgctattgatggattgaaaaatacattggcagggggagatccgtgggtatggatggatcagttatgggtgaaggttatacaagttgcaactcttatttttgataaagatacatctactgtgcctgttgccggtgggattggtgctttattaacttatgtcggtggtgttttggcattattgctttgttctatagtatttgcatctgctgaattaacattactattactttctgtcactgcgccaatatttatcatgtgtctgatgtttggtttacttcggcaaatgtttaatagctggctacagcttaattttagctcgttactggtttttctatttgcagcattagcactaagagctgggacatggcaattaaacatggcattaagtacgtctattgctacagcatcagaaaacaatcttcttcaaacgggagtaacttcattagctgctggcattttcatggcctggattatctggcaggcgaaaagttatgcttcacagattgcaggtgtgggtgttgaaggtgccatgcagggcgcagccgctatggggattggtgctggcgttttcggtgcatcccgtatggcgcgtggcgcacttggtatgggcagaaatgccggtattggtgcatggaaaggtctgcgtcgtcaggaaggcgggtttggtcagtctccgggaataacgggtaagaccgctaacctggccggacagggcgttaatattggtgccaaaaagcttcgtcaggcagctattgagagggcaaagaaaatgtatggagggtga

SEQ ID NO: 375893 - DNA, 228 bp, Salmonella enterica; identical to SEQ ID NO: 12387

SEQ ID NO: 375894 - DNA, 150 bp, Salmonella enterica
atgtcggaacgcatattatcagcaataaatgacattgaaaagggtgggcgtccggttttccctttgatgccattccatgtctttcctgagtatatggcattactcagaaaaacactggaaaaaaaggcacaaaagagaacagataaataa

SEQ ID NO: 375895 - DNA, 132 bp, Salmonella enterica; identical to SEQ ID NO: 33583

SEQ ID NO: 375896 - DNA, 819 bp, Salmonella enterica
atgaacttactgagcgttacaaagaaaacaaaaattcgccacagaaatgaaattaacagcacattctcatcgttgcctttgtctgccagaagaattttgtttatggctatggcgcagattgattcacgtgaagagttatctgagggggcaacctttcgtattacggctcgggaatatgcatttatcgctgatattgatgtaacaggtgcttaccggcagttgaaagagggggcagaagaacttcaggccagtgttattcgcattcctcgaaatcaacttctcacacctcagggcaatcaaagctctggacatacgaagaagagaggtaaattaccttctgatgcagtcaggcttatgaacctgactgcgttttgtgattatgttgaaagtgaaggatatattgatattgctttttcacatgtcattgagccatatatcacgatgttaaaggattcttacactactcaggttttgatatcgtctgtaagactcgctgatcaaaattcaaatatgctttatcagtttatcaggaaacaatacagcagtggtaaaaagacatttttcgacattgaagtagatgtattaaaggatgaacttgaattattcagaatagataatggcgaaaaagtttacctttatcagaattttaaggattttaataaggtttttctgcaaaaaaatattgaaaaaataaatctcgaagttaaaatcgttgagagagtcgcaagaagagcatcaaagctaaggttttcgtataaaatagataaagaaagcgaaggacttgataccagaataccgtatggtttcagaggtgcttaa

SEQ ID NO: 375897 - DNA, 843 bp, Salmonella enterica
atggagcaaataaaattacataaacaaggtggtgcggcagtaattatcattcctgccagtatgatagaaaatacaggatgggaagatggaaccttattggatgtactagaaataaatgaggctcttcatataagaagaaagacagaatcaggagctttagctactaaagcttgtccttctcttttttcatctactatgaggcatgttaattacgataaaatcattagatataatagcggattaaatctgttagttaatgaactgtcatgttcggcaagaagggtcttttttatttgtttatattattactttgaaaataaacttgaatcggataagtcgctattgatcagggctgataagtatgcagaatttgttggtgttgatcgttctgtcgcatataagcaaatgaaggatgcagcagatttcttttcaagaaataaaaaattaattacacattgtgactatatttcgaatgagggattgcttcgtgttatgttttcgtctaagacgataaattatattacagcgatagactcccgtaaatatcaggttaccgagcttcctctaaaatctgctttgtctcttcaaggaagatactcatggcctttatatcaactgataaaatttagccatcttaaatctttcactataggtgtagatgaacttaagaaagaaataggttatattcaaaatcaaaagttttctttctttaaaagagatggaatcaatatagctattgatgaaataacagaaaggacagatgttaaaaacattaaatgtgttaatgctgaaaggcagggtagaagagtcagcaaagtccgttttgagatcgaaatgaggtaa

SEQ ID NO: 375898 - DNA, 444 bp, Salmonella enterica
atggctaaaatctatcaattcccccagggggacgaacgcggtaaattcaggaaagaaatcgccagagaacgtaagaaacgttttgcggtgaaaacagggagcatttttgttaagtggcttggctggggatggttttatcttcgtcttctggccgccagtgttttacattttgtctctgtttttgtgttagccattcttggtgcgtttaaatgggctgtgttctggctgggggggattttgtgtgtcatcacctggtatcatctcgatcaccagttatggacgccacaaaatctgaccataccggtgattacggcaacctggattttgggactgctggctgagcctctgatggagctgctcaacaaaactatgccctggcacaagttacttgttcccgaacctgcggatgaaagcaccgagaacagtggcgagataagccagtaa

SEQ ID NO: 375899 - DNA, 450 bp, Salmonella enterica; identical to SEQ ID NO: 370862

SEQ ID NO: 375900 - DNA, 465 bp, Salmonella enterica
gtgatttccctggaagatgcaagcctgacgaaaaaaggtatcgttaaattaagcagtgccacggacagtgacagcgaagcgctggcggccacaccaaaggcggtaaaaaccgttatgggtgaggtacggaccaaagcgccgctggacagcccggcattcactggaacgccgaccacaccgacgccgccaggcgatgctaaagggcttcagacaacaaacgcggagtttgtccgcaaactgattgccgcgctggttggttccgtactggagccactggacaccctgcaggaactggctgacgcgttgggaaatgatccgaactttgccaccacggtactgaataaactggcgggcaagcagccgctggacgaaaccctgacggcgctgtcaggaaaaagcgttgacggtcttatcgaatacgttggtttgcgagaaaccataagtcgtgccgccgatgcattataa

SEQ ID NO: 375901 - DNA, 816 bp, Salmonella enterica; identical to SEQ ID NO: 371193

SEQ ID NO: 375902 - DNA, 210 bp, Salmonella enterica; identical to SEQ ID NO: 371192

SEQ ID NO: 375903 - DNA, 351 bp, Salmonella enterica
atggcgtctgctttgaccgttttcccggaagacggggacatcaaccggatatggtacgatcggttttgtatcgaatttaacagcgacggcggactgagtccggctgaactgcgggttatccgactgctgctgcagggctataactgcgggcagattgctgccctctgttttcgcagcgtcaaaaccatttcagcccagaaagttctggctttcaggcgcctcggcgtcaggaatgatgccaccctgttgccaaccctgatgcttctggggatggtgacactgtataccgacctgaaccggtgtcattcactggaggagggcggcccggaatgtgggtcggaagccggataa

SEQ ID NO: 375904 - DNA, 144 bp, Salmonella enterica
atgtgggtcggaagccggataagtatcactgaaagttattttatcatgttcatgaaattcgtttattacgcctgtctggccgtcgtcatattaatggcaatggtcttttgtgtgtcagtgctttttattctggaaaactcatga

SEQ ID NO: 375905 - DNA, 1077 bp, Salmonella enterica
atgagcgccacctacggccacccggccaccgaagcgctggtggcgacgttggcaggtactgagcatgacaccgggctggatatcctgaagctggaaaatatcgccgcgtacttccgcgaggtgcgcaaaaagtaccacgcctttgaaggccagctgaaaggctacgacagccgcatcctggtggcgcaggtgccgggcggaatgctcactaacctcgaaagccagctgaagcagcagaacgcggcggacaaactcgaccaggtgctggcggaaatcccccgcgtgcgcgaggacctcggctttattccgctggtgacccccacctcacagattgtcggcacccaggcggtgctcaacgtgctgacgggcgaacgctacaagaccattgccaaagaaacggcgggcattctgaaaggcgaatacggccacaccccggtgccggtgaacgccgcgttacaggcccgcgtgctggaaggaggcgctccggtgacctgccgcccggcagacctgctgaagccggaactggctgaactggaagcggacgtcaggcgccaggcgcaggagaaggggattcagcttgcgggaaacgccatcgacgacgtgctcaccgtggcgctgttcccgcaaatcggcctcaaattcctcgaaaaccgccacaacccggcggcgtttgagccactgccgcaggcggaagccgcgcagccggtgacaaaagcagagaagcctgccgcttccggtatctacaccgtggaagtggaaggcaaagcctttgtggtgaaggtcagcgacggcggcgatatcagccagctcactgcggctgcacctgctgcctcttctgctcctgccaccgccccggcaggcgccggcaccccggtcaccgcgccgctggcgggcaacatctggaaggtgattgccaccgagggccagagcgtggccgaaggcgacgtgctgctgattctggaagccatgaagatggaaaccgaaatccgcgccgcgcaggccgggacggtacgcggtatcgcggtgaagtccggggacgcggtctccgtgggcgacaccctgatgacgctggcgtaa

SEQ ID NO: 375906 - DNA, 1014 bp, Salmonella enterica; identical to SEQ ID NO: 370937

SEQ ID NO: 375907 - DNA, 129 bp, Salmonella enterica
atggagtgtggacagaaaagtctactgattacccggcaattaataaagcaggattactggtttaccgtaatggttatggtgatgccatacattttggcggcgatgctgttaataacgactatgaaataa

SEQ ID NO: 375908 - DNA, 138 bp, Salmonella enterica; identical to SEQ ID NO: 372437

SEQ ID NO: 375909 - DNA, 5235 bp, Salmonella enterica; identical to SEQ ID NO: 369922

SEQ ID NO: 375910 - DNA, 1686 bp, Salmonella enterica; identical to SEQ ID NO: 370959

SEQ ID NO: 375911 - DNA, 14601 bp, Salmonella enterica
ttgggtaacttcacctttacagcgcctgaaacattgactgatggagcatataatctggaggcagaggccaagactgctgatgggagcggtagcgccaaacttgtcattactatcgattccgttaccgataaaccaacatttgaactttcgcctgaaagtagtgtgtccggtcataagggcttaacgccgaccttgacgccttcaattgttggtacggcggaagagaatgctaaggttgacatttatgtagataataaactggttgccagcgttgatgtcgataaagatggaaactggagttatgaatttaaggataatgaattatctgagggcgaaaatagtataaaagtcgttgctgtagataaagcaggtaataaaaacgaaacgacggatagtatcataaccgacaccattcctccggaaaagccgacgattgagctggatgatagtagtgattccggcattaaaaatgacaacattacaaatagcaccctgccaacatttattggtgtggcggaacccggttctacagtctctatttatcttggacttaaacatcttggtgaggtcattgttgctaaagatgggacatggagctatacgcttactacgccgctcaaggatggcgaatacaatataacagcaacagctactgatattgccgggcatacctcagcgacggcaaatctgccttttactattgatacacgtatcagctatttcagcgctgagattgaaacgacgaatgatagcggtattgtcggagataacgttactaacaatactcgcccaacctttacaggtaaaactgagccaaatgctattatcagtgtcataaatagtgagactggcgaagaggttatttttaaagcgaatgacaagggcgaatggacgttcaatttcacttccgactcagtggaagggattaacaatcttacgttcactgttgaagatgtcgctggcaacaaaaaggatttttcctttagttacgttatcgatactattgcccctgtacctccgacggtttctttggaggactttgttgttttaccgaatggtataattttatcagggaatgatttaccggctttagtcggtacggcagagccaaagtctaccatcttattgatgcgagatggtaaattatatgacagcattgaggttgactcaaacgggacctggaattatcagtttagtaataaatttcttcagggcgcctatgatattgaaatcatctctcaggatgccgccggtaataaatcctctactgttaaatattcttttactattcaaactgaagttgtacctccaaaagcggaactcgatgccagtgatgattccggtgcaaaaggcgactggattaccaataaacataatgctctgacattactgggaacagctgataggtttgctaccgtaaatatccttatcgatggtaaaacgataggcgtgacgactgcggatgcagacggtaactggaattttgatatttcccgaaatctgtctgacaatgtttataagattacggttgaatccatcgatcctttaggaagaacgtcatctgtagattatcagcttaccattgatagctttacgccgatccctactgttatgttgcatgatagcgctgattctggcgttaaaggcgatatgattactaaaattaatacgccgttgtttaccgggatggctgaagctaatgctaaggtttccatctatgttgacggtgtgttaagtggtgaggctattgctggcgatgatggtgtatggaattttcaatttaccacagcgttatccgatggctcgcatgacgtaacggtaaaagtagaagatattgccggtaatactgcctcctcatcagcgtataatttccaaatcgtaacgcaaacgcaaaaaccaacaatagagttggtcaacgatacgggggttgataatacagaccatattattaatgaaaagaatcctgcactgacaggaaccgctgcaccctattcaacggttaaactctatattgatggcgcactgatcgctgaggtcagaacaaataaagatggcagatgggagtataccctgaaagccgatcaaggtttggttgatggcgatcatagaataaccgcttcagttgaagatatcgctggcaacattgcccattcggatcctttcttaattagcgtcgatactgctatttcaataccgatagtttcattgagcccggattcagattcgggaattgcagatgataatttaacgaatatcgttaaacctaccttgcacctaaaagatattgatccggacattatcagtgttcaggtatgggatgccatgtctgatacgcagatcggtgttgccacgcaacaacctgatggttcatgggcctatacctttacttcagatttaacggaaggcttgcatcaggtttatgtcaaggttgaggacattgcgggtaataaagcgaacagtgcggtattcgattttactatcgataccacagtatcaacgccggtgatttccctgctttctaaggatgatacgggggttacaggcgataacctgaccaatatcaataagccaggttttgctatttccggtgttgatgccgatgcgcatcgggtcgtcgtacaggtgatgcataatggcgtgagcgaagagatcgaactttcccacctcaatggtagttggttatttacaccagggaatacgtgggcggatggcagctacacgttaacggtgaaagtagaagataaggcaggaaataccagctattcagcgccgctgacggtcgttatcgatacccaaatcgccattgatggggtggaactggtcaacgatagcggtgtgaaaggcgacaatatgaccaacgacgaccgtccccactttcgtgtgacggtacctacggatgtcaatgaagtccgtctgagcattgacggtggtaattcgtgggttcaggcaaccccgggcgtggcaggcagctgggagtatatctggccgacagacctggcagatggtcaatacacgctaacggtggaggcgactgataaagcaggcaataccgtgacgaagaccatcgatttcgcggtggataccacgctgtcagtgccggtcatcgtactgaatagcgcggacgataccggtgtccagggcgataacatgacgaatcgcacccagccgacatttgccctgcagcatattgatgatgatgccgttcgcgttacggtcagcgtggagcatggcggcgtcaccaccacatttgacgccacgaaaggcacaggcggatggacctttacgccgccgacatcatgggcggatggtgattataccctgagtgtgtcagtcgaagataaagcggggaacaccagccattctgcatcgctgacggtgacggtggacacgcaaatcgccattaataacattgaactggtcaatgacagcggtattcccgacgataatctgactaataacgtgcgtccgcacttccaggtgacggtaccgacggatgtcaacgtggtgcgcctgagcattgacggcggcaagacgtggttcaacgctacccagagcgcgacgccgggcgcctgggattatatctggccggatgatgtggccgacggaggctataccctgacggtagaggcgaccgacaaggcgggaaacaagacgacgcaggaacttgatttcaccatcgataccactctgtctgtgccgaccctctcgctggacagcgcagatgacagcggcatcgcgggcgataatatcaccaatgttaaaacgccgggctttaccctcaacaatattgataccgatgtcagccgggtgatagtggaggtaatgcacaatggcattaaacaggaggtgccactggttcagaccggcggacagtggcgctttgcgccgaccagcgactgggcggacggcgactatatcctgacggtgaaggtagaagatagggccggaaatgtgaagcagtccgcgccgttgacggtgacagtagatacgcatatcgccattgaccgtattgaactggttaacgacagcggtatccccggcgataatctgaccaatgaagcgcgcccgcactttcaggtgacagtaccggcggatgttaacggtgtaagactgagtattgatggcggcaaaacgtggtttgacgccacgcagagcgcgacgtcgggcgtctgggattacacctggctgacgaatgtggctaacggccctcacaccctgatggtggaagcgtccgacaaggcgggaaacaaaacgacgcagaaactggacttcatcatcgataccctgctgtcagaaccgactattaccctggacagcgcggatgatagcgccgctggcgataacatcaccaacgttaagatgccaggctttaccctcggtaatatcgacgccgacgtgaccaaagtggtggtgacggtggcgcatgatggtaagaaccaacagatagagttgattaagaacggcggtgtgtggcgctttacgccgggcgcagcctggaccgatggcgactatacgttgacggtaaaggtagaagataaggcgggtaatacaaattattctgcgccgctgacggtgactatcgatacgcaaacgtctattgatcgcattgagcttcttaatgacacgggtattgtcggggataacctgaccaatgaagcacgtccacagtttcatattacggtaccgacggacgtgaactctgtgcaactgagtcttgatggcggcatcaactgggttaacgcaacgctgacgtctgacggcgtttgggagtatatatggccgacagatctggtcgaaaatacgtataccctgacagtgaaagcaaccgatgttgcaggcaacacggcgacggaaacgctcaattttatcattgataccacattgtcgacaccgaccatcacgctggatagcgcagatgatagcggcaccgccaacgataataagactaacgttaaaacgccgggttttattatcggcggtattgattctgacgtgactcaggtcgtcgtgcaggtgatgcgcgatggtcacagcgaggaggtggagctgacgcagactaacgggcagtggcgttttgtacccggcagcgcgtggactgatggcgactatacgctgacggtaacggtgaaagatgaggcgggtaatattcgccactcagcgccgttgacggtcaccatcgatacgcaaatcaccattgaccatattgaactggtcaatgacagcggtattcccgacgataatctgactaataatgtgcgtccgcacttccaggtgaaggtaccgacggatgtcaacgtggtgcgcctgagcattgacggcggtaagacgtggttcaacgctacccagagcgcgacgccgggcgtctgggattatacctggctggctgatgtgggagagggtaagcataccctgacagtggaggcgaccgacaaggcgggaaacaaaacgacgcagcaactggacttcatcatcgataccctactgtcagaaccgactatcgtgctggacagcacggacgacagcggaacaaaaggcgataacctgaccaacgcgaataagccgacgtttatactgggcaatattgacgcagacgcgcggtatgtcacggttgaggtgcagtatggcggcacgaaagaagtgctgacggccaccaaaggcgcgaccggcatctggagcgtaacaccgaccggcacatgggcagatggcgactatacgctgacggtgagggtggaggatgatgcggggaacgtaaaatactcagcgccgctgacggtcacggttgatacccaaatcaccattgatgttattgaactggttaatgataacggtattcccggcgacaacctgaccaatgacgttcgtccacacttccgcgtcacggtgccaggggatgtcaacgaggtacgtctgagtatcgacggcggtaatacgtgggttcgtgcaacacagggcacggcagggatctgggattacacctggccgaaagatgtgaccgacgggctacataccctgacggtagaagcgaccgataaggcgggaaataagacgacgcagacgctcgattttaccattgatacccggctgtcaacgcctaccatcactatggatagcagggacgatacaggtgccattggcgatcatattacgagcgtcaaaagaccgggctttaccattggcaatattgactccgatgcgcaatcggtcattttgcggatcacacagggcggcaatagccaggaagtgacactaacccaggttggaggacagtggcgctttacgccagatgctgactgggcggacggtagctatacactgacggtagaggtaacggataacgcaggaaacgttcgtcagtccacgccgctgatagtgacggtagatacgcaaaccagcattactgatattacattggtcaatgatcatggcgtgcctgatgacaatctaactaacagcacccgtccgcagtttgagatcacggtgccggcggatgtgaattctgtgcaactgagcattgatgggggcgcaaactgggtgagcgcggcgcagggtattgaaggcgtctggggctatacctggccaacggatatgggcgatggaaaacacaccctaaccgtcatggtcaccgacagagcgggcaatacggcgacgcaaacgcttgaatttttcatcgacacccggttgtcgacgccgactattgcgctggatagcacggatgataccggtacgcctggcgatgatatgaccaatcgcacccgaccgacctttattctgcagaatatcgattcggatgttatcaacgttacagtcagcgtcacgcataatggaacgacaacctcgtttaccgcgacacagggggctggaggctggagctttacaccgccagcgccgtggggcgacggtgattatacgctgacggtgacagtggaggatcgggcgggaaatacgcgtccgtctacgccgctgacggtgacagtggatacgcaaatagccattgatcatattgaattagtcaacgatagcggcgtccctggcgataatgtgacaaaacatgtgcgtccgcagttccagatctcggtaccggatgatgtggaaaaggttcttctgagtattgacggcggcacgacctgggttaccgcaatcaagagttcgacggctggcatttgggattacacctggccgacggatatgccagagggacagcataccctgaccgtggaagtgactgacggtgcgggtaataagatgacggagacgctcaatttcactatcgacatcacgttgatgacgccaaccattgagctggcgcccgatcaggataccggacagaataagaacgataatctgaccagcgtcactcagccagtatttgtgttggggagtatcgataaagatgttcgacacgtggaattgagtattgagcataacggcacgtttaaaacggtggtactcaccgaatcagccgacggctggcgctatcgaccggattctgctttggcggacggtagctacacattcaccgtgacggtaacagatgtggcaggcaaccagcaaacatccgcgcctttaaaggtgacgatagacggtacgttgactacgccggtgattgaactggcagctggcgaagatagcggtactgttggcgatcgcctcaccaatcacgatcggcctgtgttcgacatacgccaggttgattctgacgttacgcgcgtgatggtcaaagtaacttacaacggtaaaacgcacgaggaagcggcggtattcaccaatggtcaatggcgctttacgccttctgcgagctgggctgatggctcatatcagttagccgttgtggtggaagatctggcggggaatgtaaaagagtctgcgccgtttgaggtgcgtattgacaccacgacaaccattaacaatatcgtattgcttaatgatactggcgtgcagaatgatcaattaacgaatgttgccaaaccgtcattcagaattgacgttcccggtgatgtcgtccaggtacgcgtaaccctggatggtggcgctaactggaatgtgatacgcaaaaatgccgacggacagtggatttttgacagcccgaatactctggttgacggcacatatacccttcgcgtagaggccacggatgaggcaggtaatattgcgaataaagatttagtatttaatatcgatactaatatacaggttccgactattgctttagacgcaggacaagataccggagcgaatacagccgataatatcactaatatttcacgacccacctttacgattggtaatgttgaccccgatgttatcaaagtcgtggtgacgattgatggtcatgattataacgcgactaaggttggggctggttggcaatttacgccaggcaatgccattccggatggttcttataatattaccgttacggttgaagataaggccggaaataccgcgacatcgaaaccattacctgttgtgatagatacgacggctgaaattgaaagcgtcacgttggttacagatagcggtgatagcgatgtagataacattaccaaagtcgacaagccgcagtttagtattgttaccgctgatgatattactcatgtgcgcgttaaaatcgataacgccgctaattggattgaactcacaaaaggaggggatggccgctggatatttaatgtcggttcggcattacctgatgggcaacacactctcttggttgatgtgactgatatcgccggcaacgttgcgcaagaaacgctgcagtttacgattgatacgactctgcgagagccgacaattgtactcgatcccacccatgatactggtgatgatactaatgataatcttaccaggattaacaaaccggtgtttattatcggtaatgtcgataatgatgtatcacacattgtggttcatattgatggtcgggattacaccattgaaaacacaggggggaatttaacctttacgccggatcaaccgctgtctgacggtcagcatacgatctctgttaccgtaacggatattgctggtaataccaaaacatcggccgaactgaagattgaaatcgacacgcaggttcagattgacagtgttacgttaacaacagatagcggcgtcaacgatcacgataatgtcaccaatgctacccgtccctcttttgaaattgcaacgcctgatgatgtgacatcggtgctggtttctttcgatggcgtaaactggacgcccatcagtaaaaatgcggccgggcagtgggaatttactgcaggtagcgcattgcctgatggtcattatactctccatgtccaggcgacggatcgggcagggaatacggcaaattccacgctgggcttcaccgtggatacgcagattgacggcctgagcgtcgtgatgctggacgacgccggaaaggattctacggatggtattacgaatattacctctccacgttttgaaatttcagccagagaaccgctgcagagcgtgacggtaattttaaacgggaaatccagcacactgactcagggggcaggtaataaatggctgtttacccctgatacaccgttagtggatggaacttacaaaatagaaatagtggctgaagatatcgcaggtaataaaattagcaaagaggtatcattcacaatagacactattgtttctgatcccagtattgatttgctggatgcggatgatactggcgaaagcgctgttgataatattacgagtgtcactaaaccacgtttcgttattggcaatgtacccgccgatattgatactgttgtaatcagaattaacggcgtttcttatccggttacggcaaatggcaataacctctgggaattccaggttcccgttgcgttaaacgatggcgtatatgaagccgttgttgtcttcagagatattgccggaaatacttctgaaactaagctgccctttaccattgataccacgacaagcgtcagtgtcagaatggagccagcgtctgataccggaaattccaatagcgataaccttacgaataagcaaaatcccaaattcgaaggtactgcagagcccaatgcgaaactggtgattaccattgttgacgataagtcaggtcgggaggttttaaaacaaacgattacggttggcgctgatggcaactggagtgtgacgccgaatatactgccggatggcatgtataccatcaacgtcgtcgcaacagatgtcgcgggaaatactgcgcaaacgcaggaaagattcactatcgatacggttacgatcgatcccaccattcgcctttcggatccatctattgatgatcagcatgaagcaaccagcctgcgtcctgagttcaaagggtttgccgaagcgttctcgacgattatgattcagtgggatgggaaagtggtcggctcggcaaacgccaatgcgaatggcgaatggagttggacgccgccatcagtattagcgccaggctcctatgttgtgagcattgttgccaaagataaagcgggtaatgaatcgtcgcaggtcgactttcctgtcgtaatacctgttattgatgtcacgcctccaaccataaagctcagcgaggagagcgatagtggtgccttaggagactttaccacgaataataaaacgccgaccctggttgggaacacgttacctaatgcgattgtgagtatttatgtggatggcgtgaaggtcggcgaggcgacagcggatacagcgggtcgatatactttccagttatcggaaatgaaagatggccattatgtcgtccaggtgggtatagtcaaccctcgcgataatagcgaactgcgttccaccgccgttgatgtcactatcgataccgaggttgctgaactggtatggaatatatctggaatgcatgagggcggatatatcaatacggtgacgccggagattggcggcaccagtgagccaaacagcaaaatcactatctttgtgaatggcgttgaaaaagcgattgcttatacgacaggcgcaggacactggggcgtagtattacctgctttgggtaatgacggtaattatgtattaacgtttaaagttgaagatgttgccggcaatatcagagagtttggtccgcagaatgtgatactggatacggtaatttcgccgttaaccgtggtattacgcgaagctgatgacagtggcaaagttggcgactggatcaccaataaatctcatgtcaccatcgatggtactgccgaagccggaagtactttaaccatcaggagtccgcagggggtggttattgctaccctggtggtaggcaatgatggtcgatggagcgcagaattagatctgcgtgaaggtagtaatgcctttgtcgtggtatcggaagataaagcgggcaacagccaacaaaaagatatcctgatagaacatgatacgcagattgaaatcagcgatatttcattaagtcgggatactaatagcggtgataaatatgatctgattaccaataataagtctccggtactggttgccatgaccgatcccggcgcgacggtacaggtttatattaatggtgtgttacaaggcacagtagaggcgagttcgtcaggtaatattagctataccatgccggcaaatagcgccgacggcgagtatcaggtgcaatttgttgctacggatactgctggtaaccgggttgagtctgcgattacaaccgtgacaatcgattctcaaattgctgtctttgacattgatgaagattcattaccggccctctctaataaccgggcgttgtcagtctcaggtgtcggggaggctggttctcaggtcagcatctttgtcgatggtaaattagtcaacgttgttatggttgaggctgatggcacatggcgcgcgccgatactgctgcaagatgatggtacgtttaatattcatttcagcattactgacgttgctggcaacactgaagtgagcaaggattatagcgtggatgtcgattcatcaaccgacttcccaacgctcaaccttgaagatgcaagcaactctggttcacttgacgatctgattactaatcacaacaagcctgtgttagttggcaccgcagaagcgggagccacaatccatatttatgtggatgaaaagatcgtggcaaatgtgcttgtgcttgaagatggaacctggtcctaccagtttgataatgtgttaaaagatggtgaatattctatccgtgtggttgccgaagacccggcaggtaatacggcagaatcgcctcgcttactcgtcacgatagataccagtacgtttatcgataatcctgctatggtggcaggttctgataacggtattttcagtaatgatagtataacgagtcagacccggcctacgtttagtatttctggagaaatgaaccagagtgttcagattttcattgatggggtgttagtcgatacgatcacggtgacggacagaaatcaagtttatcgacctgagtcaccgttgggcgatggttcccatagcatttattatgttatcaccgataaagcaggcaacacggctacctcgaaaacgctaaactttactatcgatacctttaatacgacgcctgtcgccattgattctatcggtggacaaacgttagcagagatgaccggtagtgatggcaaaatatatataacggacacgacgcgtaacttattgtttagtggcagtgccgagcccaatagcaaaatagaaatcatcattaatggcttaaatgtgggggaagtttgggttaatgaaaaaggccactggcagatgccggtgaacccgctttatttcacagaaggccaactggatatcactgttaaatctacggaccgtgctggtaacgtaaatcaggaaaagtattccatttgggtcgatacgcatatccaggtatttaccagcgagcttgatgacaataaatcatcatcgaaaacggactggtggagtaatagctccactattaccatgagaggtatgggggaaattggcgctacggtatcattaatcgtggcaggggtcacgttggcaaccgctgtcgttgcggctaatgggcagtgggaattatcgaccgatcagcttccggaaggtaaatacgatatcacgttgagtattgaggataacgcaggcaaccgtaaggaagaggtacatgaaatatttattgatcgaacgccgccaaacgctccggtcgtaacttattcagatattgtcaacgatctaattattatgcaggggacggcggaagccaaatctcagctaataataaccgatagtaatgggaatacttatacgttaaccgttcctgataatggtaaatggagtatggctatcccgtatccatcggaagggaagtttaccattacgagtgtggatgcgattggtaaccggagtgatgatgtctctctcgatatcatgaaagaggttcccgttatttcattatctccagactcagacagtggtacggtgggcgataatattacgcgagataagcaacctacctttattatcgggaatctggaaagcgatgttgtggtcgttcaggtcgatatcaatgggaccgtatataatgctgaaaaaaatgccgatggcgtttggttctttacgccaggtacaccgttagctgatggttcctatacgatatcggtaatcgcaagcgatgccgcgggtaatcagaaaaactcgttacccattaccgttacgatcgacagtacgctgacggtgccggagattgcgttggcagcaggtgaagacaatggcgtttcagacagcgataacgtgacgaatcacacccagcctaagttcacgctgcagcatattgatgctgatgtgaccggggtgaccgtaaacgtgacgcataacggcgtgacagacacctatcaggcgacgcaaggcgcggatggctggaccttcacgccgccagccgcctggaatgatggtacctacacgctgagcgtgacggtggtggatcgcgcggggaactcacagcaatctgcttcgctagcggtgacggttgactcaacggtgacggtaacagcggatagccagcatgacgatgcgagcgatgacgccacggcaacagcggttactccaccggagtctgaaacagtgaatgccgaaagcgctacgcatcttcgtacagtgccgtctgcggcggaagaaagcgtggtgaaggagacagcctatagtattacattgttaaacgctgactctggggatgaaatagatcgttcaattagtcagacaccttcttttgaaatatcagtacctgagaatattgttaatgtcagtattatgtttgaaggagaagagtttactctgccgataactaaccagaaagcaatattcgaagttccgctatctttggaagatggtgaatatactatggacgtgaaattcattgataaagacaatgatttcctgattaaggagaaaacattctcagtcgatcactcctcggcggatattgtgaacgcaatgaatgcaagaggaaagaccgaggatgatattaatgattccccttccacgagttctgtagggcacaacaataacggcgctattgatgttttcgccgttaatgaagttacgctacctgtagataatcaagaagaacacgcataa

SEQ ID NO: 375912 - DNA, 1104 bp, Salmonella enterica; identical to SEQ ID NO: 372320

SEQ ID NO: 375913 - DNA, 135 bp, Salmonella enterica
atgttcttattacaactcattccttatcatttgtcagtgatgagccaagtaagatcattgagttatataaagatgacgccggtgttacaaaagataaaaagcatgaaaaaagatttaatgcagttgcaagcataa

SEQ ID NO: 375914 - DNA, 312 bp, Salmonella enterica
atggataaaaaaatcgttgatgcgctgagaacgctattagaagcgttacctgaagaggtgataacagaagtcacatcaaaactaaatccttcagcaaaccatattcctgaagaaaacagtaagcaattgatagcaaaagcaagagtactgaatttccggctaaccgaagtctataaagaaatcctggaagccgaagcgagcagaacaagacagagcaaaacaaccatccttaaagcggcgctggccgctttcgatagcctggacgagaaccggaaaaaccattggctgcttgaatctgcaaagttaggttag

SEQ ID NO: 375915 - DNA, 2499 bp, Salmonella enterica
  misc_feature (1443)..(1488): n is a, c, g, or t
atgaagaaaaccacaattactctatttgttttaaccagtgtatttcactctggaaatgttttctccagacaatataatttcgactatggaagtttgagtcttcctcccggtgagaatgcatcttttctaagtgttgaaacgcttcctggtaattatgttgttgatgtatatttgaataatcagttaaaagaaactactgagttgtatttcaaatcaatgactcagactctagaaccatgcttaacaaaagaaaaacttataaagtatgggatcgccatccaggagcttcatgggttgcagtttgataatgaacaatgcgttctcttagagcattctcctcttaaatatacttataacgcggctaaccaaagtttgcttttaaatgcaccatctaaaattctatctccaatagacagtgaaattgctgatgaaaatatctgggatgatggcattaacgcttttcttttaaattacagagctaattatttgcattctaaggttggaggagaagattcatactttggtcaaattcaacctggttttaattttggtccctggcggctaaggaatctatcatcttggcaaaacttgtcaagcgaaaaaaaatttgaatcagcatatatttatgctgagcgaggtttaaaaaaaataaagagcaaactaacagttggggacaaatataccagtgcagatttattcgatagcgtaccatttagaggcttttctttaaataaagatgaaagtatgatacctttctcacagagaacatattatccaacaatacgtggtattgcgaaaaccaatgcgactgtagaagtaagacaaaatggatacttgatatattctacttcagtcccccccgggcaattcgagataggtagagaacaaattgctgatcttggtgttggggttggggttcttgatgttagcatttatgaaaaaaatgggcaggtccaaaactatacagtgccatattcaactcctgtattatctttgcctgatggatattctaaatatagtgtaactattggtagatacagggaggttaacaatgattatatcgatcctgttttttttgaagggacttatatatatggtctgccttatgggtttactttatttggtggagtgcaatgggtaaatatttataattcatatgccataggcgcaagtaaagatattggtgagtatggtgctctgtcttttgactggaaaacatctgtttcgaagactgatacatccaatgaaaatggtcatgcatatgggattagatacaataaaaatatcgctcagacaaacaccgaagtatctttggctagtcattactattattcgaaaaattatagaactttttctgaagcaattcatagtagcgagcatgatgaattttacgataaaaataagaaatcaacaacctctatgttattaagtcaggcattaggnnnnnnnnnnnnnnnnnnnnnnnnnnnnnnnnnnnnnnnnnnnnnngcattaggatctctgggttctgttaacttaagctacaattatgataaatattggaaacatgaaggtaaaaaatcaataattgctagttatgggaagaatttaaatggtgtttcgttatcgctttcatatacgaaaagtacatcaaagattagtgaagaaaatgaagatttattcagttttctactcagtgtacctttgcaaaaacttacaaatcatgaaatgtatgctacatatcaaaactcatcctcttcaaagcatgatatgaatcatgatttaggtattactggtgtggcatttaatagccaattgacatggcaagcaagagggcaaatagaagataaatcgaaaaatcaaaaggctacatttttaaatgcttcttggcgaggtacttatggggagatcggagcaaactatagtcataatgaaataaatcgtgatattgggatgaatgtttctggtggggtgattgctcattcatcaggaattacgtttggtcagagtatatcggatactgctgcactggtagaggctaaaggtgtaagtggggcaaaagttctgggcctaccaggtgttagaaccgattttagaggctatacaatatccagttatcttactccatatatgaataacttcatatctatagatccaacaacgttaccaataaatacggatattaggcaaactgatattcaagtagttcctaccgaaggtgctattgtaaaagctgtatataaaacaagcgtgggtactaatgcattaattagaattacaagaacaaatggaaagccactagctcttggcacagttctttcacttaagaataatgatggagtaatccaatcaacatctattgttggcgaagatggtcaggcatatgtatctggattgtcaggagtgcaaaaattaatcgcttcgtgggggaataagccctccgatacttgtacagttttttactctcttcccgataaaaacaaaggtcagattagctttttaaatggagtgtgcaaatga

SEQ ID NO: 375916 - DNA, 438 bp, Salmonella enterica
  misc_feature (19)..(28): n is a, c, g, or t
atggtcagttcgaggaacnnnnnnnnnngagtacatgataaaaagttagcaattgatacgttatcattaaccataaaaaaaattaaagaggcatcccctgactcaaggattattttcattggaccagtcccggaatggaatgcaaatttagttaaaataatatctaactacctgagtgagtttaaaaaaaccccaccattgtatatgacatatggattaaatagtgaaataagcgagtgggactcttactttagtaacaatgttccaaaaatgggaattgaatatatatcagcatacaaagcattatgtaacgaaagtggatgtcttacaagagttggtaatggtcctgattttatcactgccgttgattggggacatttaacaaagcctggttctgatttcctttttaataaaatcggaaataaaataatcaaatag

SEQ ID NO: 375917 - DNA, 501 bp, Salmonella enterica; identical to SEQ ID NO: 369294

SEQ ID NO: 375918 - DNA, 1080 bp, Salmonella enterica; identical to SEQ ID NO: 370939

SEQ ID NO: 375919 - DNA, 633 bp, Salmonella enterica; identical to SEQ ID NO: 371493

SEQ ID NO: 375920 - DNA, 1005 bp, Salmonella enterica; identical to SEQ ID NO: 372111

SEQ ID NO: 375921 - DNA, 681 bp, Salmonella enterica; identical to SEQ ID NO: 368610

SEQ ID NO: 375922 - DNA, 171 bp, Salmonella enterica
atgcttacactcccgcagcgtcaaacgattctgttgatctgggcctgtatcaaggcacagaccatcagttgtccgaatttgttccgcgtcatttatgtaataaccaccggaattaatctggttttgtgtaatgaccgggaacgacaaattaatactataaggtgtgggtaa

SEQ ID NO: 375923 - DNA, 471 bp, Salmonella enterica
  misc_feature (457)..(466): n is a, c, g, or t
gtgacaacctattacaacatcagtaaatatcgtgaaatgattgatggcgtaaatctggagaaagagttttataaaaagatgctggaaactttttcgttgctggtatcttccggtgtagctatgcaatctgatatgcgtaaagtacaagtatctatcgatgcattaaataccagaagcattatgtatcagtcgatgttggatgatgaaatgtataaaatgcagaatatgactggtctgaatttatcgccagttcagattcaaagcgatgaaaaattcaacctcttcaaaaaatatatctttgtcgaaagccctgaaaaacttatggacatggtgatgaaatacaacgatgactataagatgcttgtcaatacccgaaaagccgcgaccgaagatattaatgccgcaaaatcatcctattttccgactgtagatcttgtttccagctatgtacagaatnnnnnnnnnngatga

SEQ ID NO: 375924 - DNA, 459 bp, Salmonella enterica
gtggtgactttaaataatatccaggctgtgctggataaaaatattactttctataccaaactgcagggagaaaaagtggctaaacttgaatccatcactacgggttctttgttgcgcgttacacctcgcttgttaaatgataatggcacgcaaaaaataatgcttaatcttaatattcaggatggacaacaaagtgatacgcaaagcgaaacagacccgctgcccgaagtgcaaaattctgaaattgcttcgcaggccacattattggccgggcaaagtctattgctgggaggatttaaacaaggtaaacaaatccactcgcaaaataaaattcctttattgggcgatattcctgtcgtaggccatttgtttcgcaatgatacgactcaagtacatagtgtaatcaggctttttttgattaaagcctcagtagtaaataatggcatatctcatggttaa

SEQ ID NO: 375925 - DNA, 129 bp, Salmonella enterica; identical to SEQ ID NO: 372520

SEQ ID NO: 375926 - DNA, 2757 bp, Salmonella enterica
atgaccaactacagcctgcgcgcacgcatgatgattctgatcctggccccgaccgtcctgataggtttgctgctcagtatcttttttgtagtgcaccgctataacgacctgcagcgtcaactggaagatgccggcgccagtattattgaaccgctcgccgtctccagcgaatatggtatgaacttacaaaaccgggagtctatcggccaacttatcagcgtcctgcaccgcagacactctgatattgtgcgggcgatttccgtttatgacgatcataaccgtctgtttgtaacgtctaatttccatctggccccctcacagatgcagcttcccgccggagcgccgtttccacgtcgtctgagcgttgatcgccacggcgatattatgattctgcgcaccccaattatctcggagagctattcgccggacgagtcagcgattgctgacgcgaaaaataccaaaaatatgctggggtatgtggcgcttgaactggatctcaagtcggtcaggctacagcaatacaaagagatttttatctccagcgtgatgatgcttttttgtattggcattgcgctgatctttggctggcggcttatgcgcgatgtcaccgggcctatccgtaatatggtgaataccgttgaccgcattcgccgcggacaactggatagccgggtggaaggatttatgctgggcgaactggatatgctgaaaaacggcattaattccatggcgatgtcgcttgccgcctatcacgaagagatgcagcataatatcgatcaggccacttcggacctgcgtgaaacccttgagcagatggaaatccaaaacgttgagctggatctggcgaaaaagcgtgcccaggaagcggcgcgtattaagtcggagttcctggcgaacatgtcgcacgaactgcgaacgccgctgaacggcgtcattggctttacccgcctgacattaaaaacggagctgaatcccacccagcgcgaccatctgaacaccattgagcgttccgcgaataatctgctggcgatcattaatgacgtgcttgatttctccaagctggaagccggtaagctcattctggaaagtatcccttttccactgcgtaatacgctggatgaagtggttacgctgctggctcactcgtcgcatgataaagggctggagttgacgttaaatattaaaaacgacgtcccggataatgtgattggcgacccgctgcgcctgcaacaggtcattactaatctggtgggtaatgccattaagttcaccgagagtggcaatatcgacattctggtagaaaagcgggcgctcagtaacaccaaagtacagattgaagtgcagatccgcgatacggggatcggcattccggaacgcgaccagtcgcgactgtttcaggcgtttcgccaggccgatgccagtatttctcgccgtcacggcggcaccgggcttgggctggtgattacgcaaaagctggtcaacgaaatgggcggggatatctctttccacagccagcctaatcgcggctcgaccttctggtttcatattaatcttgatcttaacccaaatgtcattattgacgggccgtcgaccgcgtgtctggccgggaaacggctggcttatgtcgaaccgaatgctaccgccgcgcaatgtaccctggatctactgagcgacacgccggtggaggtggtttacagcccgaccttctccgcgctgccgttagcgcactacgatattatgattttgagcgttccggtgaccttccgcgagccgctcaccatgcagcatgaacgtctggcgaaagcagcgtcaatgacggactttctactgctggcgctaccttgccatgcgcaaattaacgccgaaaagctgaaacaaggaggcgcggcggcctgtctgttaaaaccattgacgtcaacgcgcctgttgccagcgctgacggaatattgccagttgaatcaccatcctgaaccgctgctaatggataccagtaaaatcaccatgacggttatggcggttgatgataatcccgctaatctgaagcttatcggcgcgttactggaagataaagtccagcacgtagagctttgtgatagcggacatcaggcggtggatcgggcgaaacaaatgcagtttgatctgattttgatggatattcagatgccggatatggacggcatacgcgcctgcgaattgattcaccagcttcctcatcagcagcaaacaccggttattgccgttacggcacatgcgatggccgggcaaaaagagaagttgctcagcgcgggcatgaacgactatctggctaaaccgatagaagaagagaagttgcataatctgttgctgcgctataaacctggcgccaacgtagcagcgcgcctgatggcgccggaaccagctgaatttatcttcaatccgaatgcaacgctcgactggcagcttgcgctccgccaggctgccggtaagcccgatctggcgcgggatatgctgcaaatgctgattgattttctgccggaagtgcgcaacaaaattgaagaacaactggtgggagaaaatcccaacggcctggtcgatctggtccataagctacacgggagctgcggctatagcggcgtaccgcggatgaagaacctttgccagcttattgagcaacagcttcgcagcggcgtccacgaagaggagctggagcctgagtttctggagctgctggatgagatggataatgtcgcgcgtgaagcgaagaagatattaggctga

SEQ ID NO: 375927 - DNA, 1032 bp, Salmonella enterica
atggaagtaaaaactcaatcctgcgttgttgcgggtaagcgtgctgttgccgttacggaacaaaatattgaatggaataataaaggaactctcgtacaaattacccgtggcggcatttgtgggtctgacttacattattatcaggaaggcaaagtcggcaattttacagtaaaagcgccaatgattttaggtcatgaagtgattggcaaaatcgttcatagcgactcagatttattacgtgaaggacaaccggtagcaattaatccatcggagccttgcggtcattgcaaatactgtctgcagcatgaagaaaaccactgtactgaaatgcgtttctttggcagcgccatgtattttccgcatgtcgatggcggttttacccgatttaaagctgtcgataccgctcagtgcattccctggccggaacaggcggacgaaaaagccatggcctttgccgagccgctggcggttgccattcatgcagctcatgaggcgggcgatctgcagggcaaacgcatctttatctccggcgttggccctatcggctgcctgattgttagcgcggtaaaaacgctgggcgcggcggaagtggtatgtgccgatatcagtacccgttctctctcgctggcccggcagatgggcgcggatacgctggtgaacccacagcatgattctctcgatgactggaaagcagaaaaagggtatttcgatatcagttttgaagtctctgggcatccttcctctatctcaacgtgtctggaagtcacacgggccaaaggcgtgatggtgcaggttggcatgggcggcgcagttcccaacttcccgatgatgatggtaataagcaaagagatctccctgaaaggctctttccgctttactaccgaatttaatactgcggtttcctggcttgccaaccgcgttatcaatccgctgccgttactgagcgcggaatatccatttaccgacctggaagcggcgctgatctttgccggagacaaaacacaggcggcaaaagttcagctcgttttctga

SEQ ID NO: 375928 - DNA, 288 bp, Salmonella enterica
atggcgcttacagatctcgcaatccggcatgccaggctgcctggcaaggcatacaggctctttgactgccacggtttttacattcaggtgaaccccagcggatccaagctgtggtatctgaaatttcgctttggaaacaaaaagaaccgtatggcattaggcccttatccgctcatttctcttgcactggcaagggagaagcaagcggatataagaaggcttattttagaaggtattaatccggcggaaaaacgcagagaggacaagcggggtggcgagcctctttaa

SEQ ID NO: 375929 - DNA, 3516 bp, Salmonella enterica
atggatgacaatgctttagggtttgcctcatactggcgcaattcgctggcagatgctgagtcaggaaagggcagttttgaacgcaaagacgccaaaaatttcacccactggcatgggatagcggcgggacgtcttgacgaaacgatcgttggtaaattttttgagggagaaaaagacgacgtcgaaacagtcgatgtcatcttgcggccaaaggtttatttccggttactgcagcgtggaaaggaccattccgctggtgcgcctgatattgttaccccgatagtgacgccagccctattgagccgtgaaggttttttatatccgacgccagcgacctccattcccagagacctgcttgaacctttgccaaaaggggcattttcaattggtgagattgagcagtacgacaaatacaaaacgacacatacgtcattctctatcaactttgatgaccgcgttgataagaccgccgaaacagatgaagaacgagaagcacgatatgcagcctggcagcaggattggcgtcaatatctggatgattcagaaaggctgctgaagaacgttgtcggcgactggattaaaaatcctgagcaatatgaactcgctgagcacggttatattgttaaaacggcgcaatctggcggcgccagtttccatatcctttcactttatgatcacctgcttgtttgcaaaaaggatgtgccgctcttcaatcgtttcgcctcgcgagaggttcatgctgcagagtcattacttcctccggaagcaaaattcagcgacaggattggacactccggggataagtttccgctggcaaaggctcagcgcgatgccttaagccattttctggatgcgaggcatggcgatatccttgccgttaatggtcccccgggaaccggaaaaaccacgctggtgctttctatcatcgccacgcagtgggcccgagcggctctcgaaaaagcggaacctccggttattatcgcgacttcaacgaataaccaagctgtaacgaacattatcgaggcgttcgggaaagatttttcccaaggcactggtgcaatggccggacgatggttgccggagctgaaaagcttcggcgcttattttccctcaagcactcgtaaagccgaggccgccaaaaaatatcaaactgaagatttcttcaaccaggttgagtcaaaagagtatgtagaggatgcactgctgttttatctggagaaagctaaggcagcctttcctgaaaaagagtgttcatcccctgaaaaggttattgaactcctgcatggtcagttggcagcaaaatccgagcaactggtaagactgaacgcaacatggcaaacgttaagccaggttcgggcaacgcgagagcttattgataacgacattgagcaatatctcgataatttaaataaattactctccgggcaagaacaaaaagttactcaactaaaaagtgctaaagcggaatggaaaaaatatcgggccagtgaatcactgatctatccattattttcatggctaccagtggttcgcagtaagcggcagtaccaaatacaactgtttctcgaagataaattaggtgcgctgattgcgggaaatcaatggtcggatcctgaaaccatcgaacgtaatatcgataggttgcttaattccgccgagcgcgagcaaacaacctaccggcagcagattgactccgcgcatgaaatcgttcttaaagaacagcaggcggctcaggaatggcagaggctggcacttgatttagggcatgagggcgacgaggaactgagcttctcacaggcagatgagctggctgatacgcagattcgcttccctgcattcttactgacgacccactactgggaaggtcgttggttgatggatatggccggcattgatgatctgcagaaagaaaagggcaagaaaggtgctaaaggggtaacagctcgctggcaacgccgaatgaaacttaccccatgcgtggtcatgacctgctatatgctgcccggcaatatgcagataagtgaacataaagggcagcgtaaattcgagaaaagctatttatatgacttcgccgatttactcattgtcgatgaagctgggcaggtgcttcctgaagtggctgctgcctcgtttgccttagctaaaaaggcattagtgattggtgatacggaacagatcccgccaatatggagtattactcctgctattgatataggtaacatgctggcggaaaaaattctgtcaggcagtacgcaagaggagattactgagaaatatacggcaatcgcagagcttggtaaaagcgccgcatctggcagcgtcatgaaaatagcgcagtgtgcctcacgctatcaatatgatcccgaactggctcgtggaatgtacttatatgaacaccgccggtgcttcgataatattattggatactgcaatacgctctgctatcacggtaagttgttgcctaaaagagggtgtgaagagagcaatttaatgccagcaatgggttatctccatattgatggtaaaggagagctggcaagtagcggaagtcgatataatttgctggaggctgaaacgatagcggcctggctgacagataaccagcaaagtattgaagcgcattatggtaaatcgcttcatgaagttgtcggtatcgtgacgccttttagtgcgcaggtaccgaccatcaaacaggcgctggataaacaaggcatcagcgcaggcaccaatgaaacgtcgctcacggtgggcacagtccattctcttcagggcgctgaaagagcgattgttatattctcgccagtctattcaaagcatgaagacggcgcgtttattgatagcgataacagcatgctgaatgttgctgtctcccgagctaaggacagtttcctggtcttcggcgatatggacctgtttgagattcagccagcctcatctccgcggggattactggcaaaatatctctttgagtcagagaagaatgcgctcacttttgattataaagagcgtaaggatttaaaaactgccgagaccaaaatctacacactccatggtgtggagcagcatgataatttcctgaatcagacgtttgaaaataccgataaacacatcacgatagtttctccatggctaacctggcaaaaactggagcaaaccggttttcttgattccatgattacggcgtgttcacgtggtattaacgtcacggtagtcactgacagaagctacaacactgaacataatgattttgagaagcgaaaagagaagcagcagaaccttaaagcggcgctggagaaactgaacgcccttggtattgcgacaaaactggtcaatcgtgttcatagcaaaattgttattggtgatgatggtttgctgtgcgtgggatcgttcaactggtttagcgcgacacgtgaagcgcgatatgaacgatacgatacatcgatggtttattgcggtgataacctgaagggtgagattgaggctatttataatagtcttgataggcgtcaggtttag

SEQ ID NO: 375930 - DNA, 1008 bp, Salmonella enterica
gtggcgactaaaatgtggatgatccgcggtgatggcggaaaattgtacgatgacttcagagacaagcaggttgttgctatcggctggtcgcagctcgctccctatgtgaaaccgggatgctcaagagagcagttgtttacccggtatcaggagcttgagccacagactaagtcaggcacagttcgttccggtgcttcgcaggtctggcgctttgtgaacgagatgcagaaaggtgactgggctatcacttattcaccttctaatcggacttatttgatagggaaaatcgcctcagattttgagtttcatgccgagtggcttgaagatggcatgggcatcgcccgtaaagtgaagtggaacgcggaagagattaagcgtgatagtctgagtgatgcaaccagaaacacccttggctcaacgctgacggtttttcaggtgcctgattttgccgtgaatgaattagtgcagggcaaaaagcctgtctcagatgtcgtgccggaagtacctgtttcaggtgaagaggatgaggttgtttctaatcctctgcgtgacatggaaatgattgcctttgaaggcatcaaagatcgtatcaaccgtctcgactgggatgagatgcaaaatctggtcgcaggcgtgttacgcagcatgggatataaaacccaggtatcgcctgcgggtgctgaccgcgaaaaagacatcattgcttcgcctgacggttttggcttcgaaaatccgcgcatcattgttgaggtgaagcaccgacgggaacagatgagcagccagcaaatccgtagctttatcggtggccgtcataaagacgatcgcgggttgtatgtcagcacaggcggattcagcaaggatgcgcgctatgaggccgatcgctctacaatcccgttgacgctatggacgctggacgatttagtacgtgcgttagtggaaaactatgagcaggtggatattgaaactaagctgttggttccacttaagaaaacgtacttgcctgcatga

SEQ ID NO: 375931 - DNA, 2085 bp, Salmonella enterica
atgcaaacccatcatgacttacccgttccagctgtatccgaaggggaactcgtcgcagaaggttacgatctggacgccttgctgaatcagcattttcgtggtcgggtagtacgtaaggacctgactaaacagctcaaagaaggggcaaatgtcccggtctatgtgctggagtatctgctcggtatgtactgcgcttccgacgatgaccagatcgtcgagcaagggttgcagaacgttaagcgtattctggctgataactacgtccgccctgatgaagcagagaaggtgaaatcgctcattcgtgagcgaggatcctacaagatcattgataaagtatcggtaaagctcaatcagaagaaagacgtttacgaagcccagctctccaacctcggcattaaagatgcactggttccgccgcagatggtcaaggacaacgagaagctgttgaccggcggcatctggtgcatgatcaccgtgaactacttctttgaggaaggacaaaaaacgtcgcccttctctctgatgacgcttaaacctatccagatgcccaatatggacatggaagaggtatttaccgcacgtacgcacttcaaccgcgaccagtggattgatgtcctgctacgttccgtgggtatggaacccgctaacattgagcagcgaaccaagtggcacctgatcacccgcatgatccctttcgtggaaaacaactataacgtctgcgaactgggtccacgcggcaccggtaaaagccacgtctataaagaatgttcgccaaactcactgttagtttccggcgggcaaaccacggtagccaacctgttttacaacatggccagccgccagattggcctggttggcatgtgggatgtcgtcgcgtttgatgaagtggcggggatcactttcaaagacaaagacggcgtgcaaatcatgaaggattacatggcgtctggctcgttttcccgcggaagagattcgattgaaggcaaagcatcgatggtgttcgtcggcaacattaaccaaagcgttgagacgctagtcaaaaccagccatctgttagcccccttccctgccgcgatgatcgatacggcgtttttcgaccgcttccatgcctatatccccggctgggaaattccgaaaatgcgcccggaattctttaccaatcgctacggccttatcacagattatctcgccgaatacatgcgggaaatgcgtaagcgcagcttctccgacgcgattgataagttctataagctgggtaataacctcaaccagcgcgacgttatcgcggtaaggcgcacggtttctggtctactgaaacttcttcaccccaatggttcttacagcaaagaagatgtccgtgtttgcctgacctacgccatggaagctcgccgtcgcgtcaaagaacagcttaaaaagctgggcggtctggagttcttcgatgtaaatttcagctacattgataacgagacgctggaagaattcttcgtcagcgtgccggaacagggtggcagcgaattaattcctgctggcatgcccaaacctggtgtagtgcatttggttacgcaagcggaaagtggcatgacgggtctgtatcgcttcgaaactcagatgaccgcaggcaatggtaagcatagcgtttctggtctgggatcaagcacctcggctaaggaagccatccgggttggatttgactatttcaaaggcaacctcagccgcgttagcgcaacagcgaaattttctgaacatgagtaccacctgcacgtagtcgaattgcacaatactggaccaagtaccgcgaccagtcttgccgcgctgatcgcgctgtgttccgttttactggcgaaacccgttcaggaacaaatggtcgtgttaggtagcatgacgctcggtggtgtgatcaacccggttcaggatctggcggctagcttacaacttgctttcgatagtggcgcgaaaaaggtccttttgccgatgtcttccgcggtagatattccgactgtgccagccgagttgtttaccaaattccaggtcagtttttactctgaacctgtagatgcggtttataaggcgttgggagtaaactaa

SEQ ID NO: 375932 - DNA, 2604 bp, Salmonella enterica
gtgaccttgcaaaatcaggaatttattgccggccttaaagcaaaattcgccgaacatcgcatcgttttctggcacgatcccgataagcgtttcctcgaagagctggataacctcgaactcgaaaacgtcacgctgcttgatatgaccgaccagtcgcagctggcggttaaaaagcgcattgaaatcgacgagccggaacagcagtttttgctgtggttcccccacgatgcccccccaaaagagttcgactggctattggatattcgtctttatagtacggagttccacgccgatttcgccgccattacgctgaatacattaggtattccacagcttggcctacgcgagcacattcaacgccggaaggcatttttcagcactaaacgtctttctgccttgaaaggcctggtcactgagcaagaaaacgaagcttctcttgataagaagatggttgcggtcatcgctggcgtaaaaacagcaaaaacggaagagattctgttcagcctgattacccaatacgttaatcagcagaaagatgacgacagcgacctggaaaacacgctggcgatgctgaaacgccacgacctggaaggcgttctgtgggacattctgaatcaggaaatgggctatcaggccgagcatccgaccctggaaaacctgatcctcaagctgttctgtaccgatctttccgcgcaggctgatccgcagaaacgcgaatggctggaaaaaaacgtgctggccacgccgtcaggcagagcctccgcgctggcctttatggtcacctggcgcgccgaccgtcgctacaaagaagcctatgattattgcgcacagcagatgcaggatgcgctgcgaccagaagaccagtaccgtctcagctcgccgtatgatctgcacgagtgcgaaaccacgctgagcattgaacagaccatcattcatgcgctggtgacgcagcttctggaagagagcaccacgctagaccgtgaagcctttaagaagcttctgtctgaacgtcagagcaaatactggtgccagacgcgtcaggaatactgcgctatttacgatgcactgcgtcaggccgaacggttgctgaatctgcgtaatcgtcatattgatggtttccactatcaggacagcgcaacgttctggaaagcgtactgcgaggagctgttccgctttgaccaggcctaccgcctgtttaacgaatacgcgctgttggttcacagcaaaggcgcaatgagcctgaaaagcctggatgactatatcgaagcgctgtattccaactggtacctggcagaattaagccggagctggaataaggttctggaaaccgaaaaccgtatgcaggagtggcgtattgcgggcgtaccacggcagcagaacttctacaatgaggtggttaagccgcagtttaacaatccacaaatcaagcgcgtattcgtgattatctccgacgcgctgcgttatgaagtggcagaagagctgggcaaccagatcaataccgagaaacgctttactgccgaactgcgttcccagttgggcgtgttacccagctatacccagctgggaatggcggcattgctgccccatgacgagatatgctaccaaccgggtagtggtgacatcgtttatgcggacgggttatccacctcaggtacgcctaaccgcgataccattctgaagaaatataaagggatggcagtaaaatcggacgatctgctgaaatggaaaaatcagcaaggacgagatcttattcgcgattacgaagtcgtttatatctggcataacaccattgatgccatgggtgacagcgcatcgacggaggagaagaccttcgaagcgtgccgtaacgcggtggttgaactgaaggatttagtgactcgtgtaataaaccgtctccacggtacacggattatcgtcacggcggaccacggtttcctgttccagcagcagcccctttccggccaggataaaaccacgctgcagatcaagccagacaatacgattaaaaaccacaaacgctttattatcggtcatcagcttcctgccgatgatttttgctggaaaggaaaagtggcggataccgcaggcgtcagcgataacagcgagttcctgatcccgaaagggatccagcgtttccatttctcgggcggcgcgcggtttgtccatggtggcgccatgctacaggaagtctgcgttcccgtattgcaggtgaaagcactgcagaaaacggctgccgagaagcaacctcagcgtcgtccggtagacatcgtcaagcatcatccgctgatcaaactcgtcaataacattgataaagtcagcctgctgcaaacccatccggtaggtgagttatacgaaccacgtactctgaacatcttcatcgtcgataacgccaataatgtggtatccggtaaagagcgaatctgctttgacagcgataacaacacaatggaaaaacgcgtgcgtgacgtgacgctgaagctgattggcgcgaatttcaatcgccgtaatgaatactggctgatactggaagatgcacaaacggaaacgggttaccagaagtaccctgtgattatcgatctggcatttcaggatgatttcttttaa

SEQ ID NO: 375933 - DNA, 813 bp, Salmonella enterica
atggccagcgttaagcaaattattcgggacattaaagaacaaaaagtggccacaaccggcagacgggtactgctggttgaaggtacagatgatgtcacggctttccagaatttcctcagcagaaaatttccggcatgggaacaagattggatccttgcaccagcaggttctaagaaaaatgtgcttgaggcgttagcccttgaagccaactggctgggcgtggttgatcgtgacgcatggactgacgtgcagatcgctgaaaagcgtcgaaatctagctaatctactggttcttccgcgtttttgtattgaaagttatctgatcgcgccggaagaactttggctgctgtttcagccaaaacatcagcaggcgatcaatggcggcatacaggcatttatccaggccgttcatgatgttttacctcaatggcggaaccatgccgcactttggaatgttatccatcctctttgggaacggctgcgcgctgccggttttaatactgcgtttcatgatcttaatacagcacagaatgatgctgaagttgaacaatgcttacggcagtggagccagcatctggatcccgatgtcttgttagcccagatacaaacgcaaaaaactaacatcgccgcacgctccccaacgacgcaattaacacagtgctttcatggtaaaatgtttttcgaacaggcaattgaccccttgctaacccagcttttgggtcagcgggctcgtgaacaacgtcaaaaagatctgttccgcacgttacccgtacctgacgatttaacttttatctggaatgaaatgggattgtga

SEQ ID NO: 375934 - DNA, 1092 bp, Salmonella enterica
atgaaaatagcggcgatttatacgcaatccgtcggaccgctgcccgacggtgaaattcgttttgaaaacgactggtcaggcgagatagaatccaatgtcctgattaccgggccaaacggctgcggtaaatcgacgctgttacgagccatttccttattatggcgcgcctttgggcattggctgggcacgggtacgcgcctgaatatcaaagatgaatcttatacctggttctatcgctgggatgccagctgcgcgatgattctcgattccttttcgccaaaatcggaggaccaaatagggctatttcttggctcagaggcatttttagtacaactaaaagagaaatacccacaggtctactggctcggggaaacggtaagcagaacaaagggaacaacgccagagacgaccgtttttacgtcatcggaacacttttttcttccctataagaactggtggagtcactggagtagccagtatcaacggcttgtactgaagggaccaagtgttgatatgcctaatctggtttacctggatgccgaagcgcgccgctgggttcgcccgcaaaaagatatcggcagcctgtccccggatgattcaactcaagcctggctggcaacctatgaagtgaacgataactggaaaggtcagcttgaatcgtcgctcttcaatatgaaggcaaccatgcccggtgaatatcctgaaatgatcgccacgctaaaccagttcttcagcggtaaacgtatcgaagctgaaattcatccaggacagcggcaacgtgtcctactggattcagggaatgatcattcgttagatgcgcttagctccggcgaacatcaggtgctgattatgctgtttacggtacaacgctggctacagcccggcggtgttgtactcattgatgagccggatctgcatctgcatccgtccctgatatcgccgttgctggcatccattgagaacatcgttgccaggaaaaatggtcagcttgtgatgacttcacacgcaacggatatctggcaacgttatgacaacatgggattgcggattgatttaaccgatggcaaggatgcggaaaatggccagcgttaa

SEQ ID NO: 375935 - DNA, 3678 bp, Salmonella enterica
atgaataccaataacatcaaaaaatacgctccacaggcccgtaaccagttccgcgatgcggtgatccaaaagctaaccacgctggggatttccgctgataaaaaaggcaatctgcaaattgcggatgccgagctcgtcggcgaaaccatgcgctatggtcagttcgactaccccaaatccaccctcacccgccgcgatcgtctggtaaaacgcgcccgcgagcagggctttgacgtgctggttgagcactgtgcctacacctggttcaaccgcctgtgcgccattcgttatatggaaatccacggttatcttgaccacggcttccacatgctctcgcacccggataacccgacaggctttgaagtgctggaccacgtaccggaagtcgcggaagcattactaccagagaaaaaggcgcagctggtcgagatgaagctttccggcaaccaggacgaagccatctaccgtgaactgctgctggcccagtgccacgccctgcaccgcgcgatgccgttcctgtttgaagctgtggacgatgaagctgaactactgctgccggataacctgacccgcaccgactccattctacgcggtctggtggacggtattccggaagaagactggcaagaagttgaggttatcggctggctgtatcagttctatatctctgagaaaaaagatgcggttatcggtaaggtggtgaagagcgaagatattcctgccgccacccagctgtttaccccaaactggattgtgcagtatctggtacagaactccgtcggccgccagtggttgcagacctacccggattcgccgctgaaaggcaaaatggactactacattgagccagccgaacagacgccagaagtgcaggcgcagctggccgccattacacctgccagtattgaaccggaaagcatcaaagtactcgacccggcctgcggctccgggcatattctgattgaagtctataatgtgctgaaaaatatctatgaagagcgcggctatcgcgcccgcgatattccacagctaattctggaaaataatatttttggtctcgacattgacgaccgtgctgcccagctttccggctttgccttattaatgatggcccgtcaggatgaccgccggatattcacccgcgacgtgcgtctgaatattgtctccctgcaggagagcctgcatctggatattgctaagctgtggcagcagctgaacttccaccagcagaaccagactggtagcatgggggatatgtttgccgaaaatacagcattagcccataccgacagcgcagaatatcagctgctgatgcgcacgctgaagcgctttgtgaacgccaaaacgctgggctcgctgatccaggtgccacaggaagaagaggcggaactgaaggcgtttctcgaagcgctatatcgcatggagcaggaaggcgatttccagcagaaggcagcggcgaaagcgtttattccgtatattcagcaggcgtggatcctggcgcagcggtatgatgcggtagtggcgaatccgccgtatatgggtggcaagggaatgaatagtgagctgaaagagtttgccaaaaataacttcccggatagtaaagctgatttgtttgcaatgtttatgcagaatgcattttctttgcttaaagaaaatgggtttaatgctcaagtcaatatgcaatcatggatgtttttgtcaagttatgaagcactacgtaactggttattggacaataaaacatttattacgatggcacatttgggagctcgggcttttgggcaaatttctggagaggttgtacagacaactgcctgggtgattaaaaaccaacactccgaacgttaccaacctgtattttttagacttatagatggtagggaagaagtaaagaaaagcgatctacttctaaggaaaaatatatttgataaatttacacagcatgattttaaaaacataccaggaatgccaatagcatattggatagacttaccgagtctattatcttttcgccaccataaaaaacttggagaaaaaatagcattaaaagcaggcatgtccaccggtgacaatattaaatttcaaagatattggtacgaggtttcaataaaaaaaacccttatcacaaataaagaatcaaatacaaaaatcgacattcataatatcaaatggtttccttgtagtagtggaggtgaatatcgaaagtggtatggtaataacgaaatagttgtaaattgggaaaataatggttacgaaatacgaaattttaaatttgagaatggcaaaactcgctctgccgtaagaaatgatgagtattactttagagaaggcataacatggtcaaaaataagccaaggtaatttttgcgtgagatatcgtccaaaagggtttgtttttgatgatacaggccgttgcggcttttcaaataacaaaaatgagttgctttacgctgcgggattaatgtgcactccggttgtaaaccattatttatcaatactagcccccacacttagctttactagtggtgaattagcctcagtaccatatccagaaattgaagatgaaattatcgaattagtcaccaatgctattgaaatagctaaaaatgactgggactctcaagagcaatcatgggattatgtttgttcaccattgcttgaacacaattcaactcaattgctacggaatatctacaaacaaaaaatcaatacaaatatcaagttagtcgaaacacttctcctaatagaaaatactataaataatatttttatagataaattacaacttgacaaaactataattaaagctgtattgcaaagtgaaataactctactatgtaatccaaactatcgatataaaaatattcaagatcataccgatctaaccaataagtattacactgatatcactatagatatcttaagctacatcatcggctgcatgatgggccgctactccctcgatcgcgaaggactggtctatgcccatgaaggcaataaaggctttgccgaactggtcgctgaagacgcgtacaaaaccttcccggctgacaatgacggtatcctgccgctgatggatgacgagtggtttgacgatgacgttacctctcgcgtcaaagagtttgttcgcaccgtttggggcgaagaacacttgcaggaaaatctcgaatttatcgccgaaagcctctgtttatacgcgataaaaccaaaaaaaggcgaatctgcgctggataccatccgccgctatctttccactcagttctggaaagatcatatgaagatgtataaaaagcgtccgatatactggctgttcagctccggtaaagagaaagcgtttgagtgcctggtctatctgcatcgctacaacgatgcgacgctggcgagaatgcgtaccgaatatgtagtgccgctgctggcgcgctatcaggccaatatcgatcgcctgaacgaacaggtcgatggagcctcaggcggcgaagccacccgtctgaaacgtgagcgtgatagcctgagcaaaaaattcaacgaactgcgcagcttcgacgatcgcctgcgccactatgctgatatgagaatcagtattgatctcgacgacggcgttaaggttaactacggtaagtttggcgatctgctggcggatgtgaaagccattaccggcaatgcaccggagattatttaa

SEQ ID NO: 375936 - DNA, 3642 bp, Salmonella enterica
atgaatattgaacagatctttgagaaacgtctggaccgaaatattaatggcgttgtgaaagccgaacagacggacgatgccagtgcctggattgagcttgatgaatacgtcatcacccgggaactggaagggcatcttcgccacttctttgaatcttatgttccggcaaccggtccggatcgcatacgcatggaaaacaaaattggcgtatgggtgtcagggttctttggctcaggtaaatcacactttatcaagattctgtcgtatctgttgtctaaccgcaaagtcagccataacggtacagaacgtcatgcttactccttctttgaagacaaaatcaaagatgctctgttcctcgctgatatcaacaaagcggtccatcatccgacggaagtgattctgttcaatattgattctcgtgctaacgtcgatgacaaagaagacgccatccttaaagtcttcctgaaggtatttaacgaacgggttggctactgtgctgattttccgcacatcgcccatctggagcgtgagctggctaaacgcggccaatacgacgcgtttaagaccgcattcgccactatcactgactcaagctgggaaaaagagcgcgattcctactatttcatcagcgatgaaatggcagaagccctaagccaggccaccggtcaaagcgttgacgcttcgcgtcaatgggtggaacagctggataagaatttcccattagatatcaataatttttgccagtgggtcaaagagtggctggatgaaaacggcaaaaatatcctcttcatggtggatgaagtcggccagttcatcggtaaaaatacgcagatgatgttgaagctgcagactatcactgaaaatctgggtgttatctgtggtggacgcgcatgggttattgttacttcccaggcggatattaatgcggccattggtgggatgagcagccgtgacggacaagatttctctaaaattcaaggccgtttctctacccgtttgcagctttcaagctccaacacctccgaagttatccaaaaacgtttgctggtgaaaaccgatgccgcaaaacccgcgctggcgaaagtctggcaggaaaaaggcgacattctacgtaaccagcttgcttttgatcccacaaccaccgcttctttgcgcccctacaccagcgaagaagaatttattgataactacccgtttgtcccgtggcactaccagattctgcagaaggtttttgagtctatccggaccaaaggtgccgccggtaaacagttagccatgggtgaacgctcacagttagaagccttccagactgcggcacagcagatctccccgcagggtctggattctctggttcccttctggcgtttttatgccgcgattgaaagcttcctggagccggccgtcagccgcaccatcactcaggcctgccagaatggcattcttgatgagttcgatggcaacttactgaaaacactgttcctgatccgctacgtcgatgtgctgaaaagtacattagataacctggttaccctttcgatagacaaaatcgataccgataaagtcgaactacgccgtcgcgttgaaaaaagcctgaataagctggaacgagaaatgttgattgcacgtgttgaagacaaatacgtgtttctgaccaacgaagaaaaagagatcgagaacgagatccgtaacgtcgaagtcgacttctccgcgatcaacaagaaactggcctcgatcatctttgatgacattctgaaaaaccggaagtatcgctatccggcaaataagcaggactttgatatcagccgcttcctgaacgggcacccgttagacggcgcaatgcttaacgatctggtggtaaagatcctcacgccaaaagatccgacctatgatttctatgacaacgacgcggcatgccgcccatacacctctgagggagacggctgcattttaattcgtttacctgccgatgcccggacctggaccgatattgatttggtcgtccaaacggaaaaattcctcagggacaacgcaggtcagcgaccggaacaagccagtctgctttcagaaaaagcccgtgagaacagcgttcgcgagaaaatgctccgcgttcagctggagtcgcttattgccgaagctgacgtctgggcgattggcgagcgcttaccgaagaaatcttcgacgccatccagcatcgtggatgaagcttgccgctatgtgattgaaaacacgtttgccaagctgaaaatgctgcgcccgttcaacggtgatatcgcacgtgaaatccatgcactactcacggtggagaatgatgcggagctggatctgggcgaactggaggaatccaaccccgacgcgatgcgcgaagtagaaacctgggtcagcatgaatatcgagttcaataagccggtttatttacgcgatattctgaaccactttgcccgccgtccttatggatggccggaagaagaagtgaagctgctggttgcccgtctggcgcgcaaaggcaaattcagcttcagccagcagaataacaatatcgagcgtaagcaggtgtgggagctgtttaataacagccgtcgccacagcgagctgcgtctgcacaaaattcgccgtcacgacgaatcgcaaattcgtaaggccgcacaaactatggcggaaattgcccaacagccgtttagcgaacgtgaagaaccggccctggttgaacatatccgccaggtcttcaatgactggaagcaagagctgaatgtcttcaaagcgaaagcggaaggtggaaacaatccaggtaaagatgagattgagtcaggcctgcgcctgctgaattccattctgagtgaaaaagaagattttgccctgattgagaaggtcaccagccaggtcaatgagcttctggatttcagtgaagatcgtgaaaatttggtcgatttctaccgcaagcagtttgctacctggcaaaaactaggcgcggcgctgaacggcagctttaaatccaaccgcagcgcgctggaaaaagacgccgtggcggtaaaagcactgggcgagctggaaaacatctggcagatgccggaaccttataagcatctcaatcgcatcacaccactgattgaacaggtccagaacgtcaatcatcagttagtggaacagcaccgccagcacgcccttgaacgcattgacgcccgcattgaggaaagccgtcaacgcttgcaggaagcgcatgccacgtcagagctgcaaaacagcgttctgctgccgatgcaaaaagccagaaaacgtgccgaggtcagccagtcaattccggaaattctggcggaacagcaagaaacaatggcactgcaaacggatgccgagaagaagattaaccagtggatcgacgagctgcgtaaaaagcaggaagcccagttacgagcagcgaatgaagctaaacgcgcggccgagtcacaacagacttatgttgtggtagagaaacccgttatccaaccggtaccgaaaaaaacgcatctggtgaatgtcgccagcgagatgcgcaaagccaccggtggcgaagtgctggaaaccgccgaacaggtggaaaaagcgctggatacgcttcgtacttcgctgctggcagctattgaggcaggtgaccggattcgtcttcagtaa

SEQ ID NO: 375937 - DNA, 603 bp, Salmonella enterica
gtgatcgatcccgtgcttgaataccgcctgtcacaggttcagagccgcattagcgaagagcgctttctcaaaaacaacggctccggtaatgagattgggttctggatttttgattatcctgctcagaatgagctgcaggtgcgtgaacacctgaagtatctgttgcgtaatctggaaaaggaccacaagttcgcgcacctcaacatctttcagatcatcgtcgacatgctcactgaacgtgggttatttgaccgcgtctgtcagcaggaagtgaaagtcggtaccgaagcgctgaaaaaacaactcgttggcttattgaatcagaaaaagatcgcggattacatagcaaaaaaagtcgatcttcagaatcaagagtttgtcattctgacaggaatgggtaacgcctggccgctggttcgtggccatgagctgatgagcgccttgcaggacgtgatgggttttacccccctgctgatgttttatccgggaacctatagcggacacgatctctccccattggcgggcattgattcccgaaattattatcgcgccttcaggctggtacccgaaagcgggcctgcggcgacattgaatcctcgttaa

SEQ ID NO: 375938 - DNA, 609 bp, Salmonella enterica
atgacgatgaaaaacgacaaggcatggattggagacctgctaggcgggccgctgatgagcagggaaagtcgaatcatcgctgagctcatgcttaccgctcccaatgaacaaacctggcaagagcagatcgtgggtcataacattctccaggcttcctctgccaatacggcgaagcgctatgctacaacgataaaactacgcctgaatacgcttgataaagtggcgtggtcgcttattgctgaagggagcgagcgcgagcgtcagcaattgctgttcgtcgctctgatcctccattcaccggttgttaaagacttcctggctgaagtggtgaacgacctgtgcagacaatttaaagaaaagctccctatggatagctgggatgagtttgtggctaaccatcttcgtcagcagcccgtactcaccagttactcagattcatccatcaaaaaaatgggtaacaacttgatcaaagcactggctgaagctggttatctggatacacctcgtcggcgtaatctccagtcggtctttcttttaccagaaactcaggcgaccttgcagcgccttggacaacaagaattagtttctattctggagggacaacggtga

SEQ ID NO: 375939 - DNA, 315 bp, Salmonella enterica
atggttcatctggcgctctacgcgtcacttgactacaggtgtgactccaccagcgcgctacagaccatagtgcgagaaccgtggccgattacctactatttgaaggcactcagcgacgaaatcggagaaccatccaaaaagcaccttgatcgttacctggaaccattcgttgtgagcatcacagaccggagtgcctggctggctattattggcgggatcaaggggctggatggtttagataaaaagaacatctcttatgaaagcctggatgaccccgaagtacaaaagatttatatgacttaccgttccgaataa

SEQ ID NO: 375940 - DNA, 297 bp, Salmonella enterica
atgtttatgtatgaaaaatatttaagtgatatttttcagttggttaaaaaaagatttccaacgcaacaaccctgtcaatggctaaaaagatacgccgagactatcaaagcggtcattatcgggtatatgagtttaatcaatattcattatggtaattgcgggagctattcatctgatacgctaaacgtcatgagcctccctttgagatcacacttttcactcccggttattcacttacagaaatcaggtgttatcattcacgacgtaaatacctttcaactcaacccgaggctttga

SEQ ID NO: 375941 - DNA, 1410 bp, Salmonella enterica
atgagtggggggaaattgccggaggggtgggctacaagcacaatcaatgaaatgtgcaacctcaatcccaaacttaaacttgatgatgatttagatgttggatttatgccgatggccggtgttccaacaacctatttaggtaaatgtaactttgaaaccaaaaagtggagtgaagtaaaaaaaggatttactcaatttcagaacgatgatgttatttttgccaaaatcacgccatgcttcgaaaatggaaaagctgttgtaatcaaagaattccctaacggctatggtgccggtagcactgaatattatgttcttcggtctattaatgggttaattaatccccattggttgtttgctttagttaaaactaaagattttttaactaatggagcacttaatatgtccggttcagtcggacataaacgtgttactaaagaatttcttgagaactatggtgttcctgtcccacctcttgccgaacaaaaagtcatcgccgaaaaactcgatacgctgctggcgcaggtagacagcaccaaagcacgtcttgagcaaatcccacaaatcctgaaacgttttcgccaatcagtgatagttgcagcagtaaacgggcaactgacaaaagaacttcataaaaaaaataaattcaagttaacagaattgaatatttctattccatctttatggaaaatcagtgagattggtcaatttgctgatgtcaaaggtggcaagagattacctaaaggtgaatcattaatagctgagaatacagggtttccatatattagagcagggcagctaaaaaatggaactgttcttcctgaaggacaactatacttagaagaatatatacaaaaaagtatttctagatatacagtctcatctggagatctttatataactattgttggtgcatgtattggtgatgctggtataattccagatgtttataataatgcaaatttaactgaaaatgctgccaagatatgtaatttaaacgaaaatattttcaatagatttctttctttatggctgagaagtagttatcttcaggatattatcaattcagaaataaaatcaggagctcaagggaagttggctttggcaaggataaaatcactcccattgatactaccaccactccaagaacaacacgaaatcgtccgccgcgtcgaacaactcttcgcctacgccgacaccattgaaaagcaggtcaacaacgccctgacccgcgtcaacagcctcacccagtcgatcctggcgaaggccttccgcggcgagctgaccgcccagtggcgtgcggaaaaccctgaacttatcagcggtgaaaacagcgccgccgccctgctggaaaaaattaaggccgaacgcgccgccagcggcggtaaaaaaacctcgcgtaaaaaagcctga

SEQ ID NO: 375942 - DNA, 1590 bp, Salmonella enterica
atgaacaataacgatctggtcgccaagctgtggaaactgtgcgacaacctgcgtgacggcggcgtctcctatcaaaactacgtcaatgaactcgcctcgctgctgtttttgaaaatgtgcaaagagaccggccaggaagcggactacctgccggaaggctaccgctgggatgacctgaaatcgcgtattggccaggatcagatgcagttctaccgcaacctgctggttcagttaggctcagatgagaaaaagctggtgcaggcggtattccataatgtcagcaccaccattgagcaacccaaacagctgactgagctggtcagctatatggatgcgctggactggtacaatggcaaccacgggaaatcccgcgacgacttcggcgatatgtacgaagggctgctgcagaagaacgccaacgaaaccaaatctggcgcgggccagtacttcaccccacgcccgctgatcaaaaccattatccatctgctgaaaccgcagccgcgtgaagtggtgcaggacccggcggcgggtacggcgggctttttgattgaagctgaccgttacgtgaaatcacagactaacgatctggatgaccttgatggcgacactcaggatttccagatccaccgcgcgtttatcggcctcgaactggtgcccggcacccgccgtctggcgctgatgaactgtctgctgcacgatattgaaggcaacctcgaccacggcggcgctatccgtctgggcaacacgctgggcagcgacggtgaaaacctgccgaaggcacatatcgtcgccaccaacccgccgtttggcagcgccgcgggcaccaacattacccgtaccttcgtgcacccgaccagcaacaaacagctgtgctttatgcagcatattattgaaaccctgcaccccggcggccgcgcggcggtggtggtgccggataacgtgctgtttgaaggcggtaagggcaccgatattcgtcgcgacctgatggacaaatgccatctgcacaccatcctgcgtctgccgaccggtatcttttacgcccagggcgtcaaaaccaacgtgctgttctttaccaaaggcacggtcaccaatccgcatcaggataaaaactgcaccgatgacgtgtgggtgtatgacctgcggaccaatatgccgagcttcggcaagcgcacgccgtttaccgagcagcatctgcagccgtttgaaactgtctacggcgaagatccacacggcttaagtccgcgtgaagaaggggagtggagctttaacgccgaagagagcgaagtcgccgacagcgaagagaacaagaacactgaccagcaccaggccaccagccgctggcgcaagttcagccgcgagtggatccgcagcgcaaaatccgattcgctggatatctcctggctgaaggataaagacagcatcgacgccgacagtctgccggagccggacgtgctggcggcagaagcgatgggcgagctggtacaggcgctgggcgaactggatgcgctgatgcgcgagctgggcgcgggcgatgaagcggatgctcagcgtcagttgctgaatgaagcgtttggcgaggtgaaggcatga

SEQ ID NO: 375943 - DNA, 3510 bp, Salmonella enterica
atgaacaaatctaacttcgactttctcaaaggcgtcaacgacttcatttacgccatcgcctgcgcggcggaaaacaactatccggacgatcctaataccactctgataaaaatgcgcatgtttggcgaagccaccgcgaaacatctcggccagttgctggatataccggcctgcgaaaaccagcatgacctgctgcgcgaactgggcaagattgcgtttattgatgacagcatcctttctgttttccataagctgcgccgtatcggtaacctggccgtccacgaatttcataacgatctggacgatgcccagatgtgcctgcggctcgggttccgcctcagcgtctggtactaccggctggtgaccaaagattacgatttcccggtgccgatgtttgttctgccagaacacggcgagaatctttatcaccaggaagtgctgacgctgaaacaacagctggaacgtcaggcgcaagagaaagtacaaagccaggccgaactggaagctcagcagcaaagactggttgcgctcaacggctacattgccatccttgagggcaaacagcaggaaaccgaagcccagaccaaagcgcgtctggccgcgctggaggcacagcttgcagcaaaagatgccgaactggcgaagcaaaccgaacaggaacgtaaggcctatcataaagaaatcaccgaccaggctgtcaaacgcacgttggaactcaatgaagaagagagtcgcttcctgatcgacgcccagttgcgtaaagcgggctggcaggcagatagcaaaacgttacgctttgccaaaggcgctcgcccggaacccggcgtcaataaagcgattgccgaatggccaacaggtacagatgaaacgggaaaaacaggctttgccgattacgtattgttcattggcctgaagcccatcgccgtcgttgaagcgaaacgcaaaaataccgatgtctccagcaagctcaacgagtcttaccgctacagtaaatacttcgataacggatttttacgcgacacgctgctggagcactacgctcccgacgaagtgcatgacgccgtgccggagtatgaaatcagctggcaggacaccagcggtaaacagcgctttaaaatccccttctgctactccaccaacgggcgcgaataccgcgcggcgatgaagaccaagagcggtatctggtatcgcgacgtccgccacaccaccaacatgtcgaaagcgctgccggaatggcatcgcccggaagagctgctggatatgctgggcagcgatccgcagaaacaaaatcagtggtttgccgaaaatcccggaatgagcgaactcggcctgcgctattaccaggaagatgccgtccgcgcggtggaacaggctatcgtaaacggtcagcaacacatcctgctggcaatggcgaccggtaccggtaaaacccgtaccgccattgctttaatgttccgcctgatccagtcgcagcgtttcaaacgcgtgctgttcctggttgaccgtcgctcgctcggcgaacaggcgctgggggcgtttgaagacacgcgcattaacggcgacacctttaacagcatttttgatatcaaagggttaaccgacaaattcccggaagacagcaccaaaattcacgtcgccacggtgcagtcactggtcaagcgcacgctgcaatccgatgaaccgatgccggttggccgctacgactgtatcgtggtcgatgaagcgcaccgtggctacattctcgataaagagcagaccgaaggcgagctgcagttccgtagccagctggattacgtttccgcctaccgtcgcattctcgatcatttcgacgcggtaaaaatcgccctgaccgccacgccagcgctgcacacggtggatattttcggcgagccggtttaccgctacacctaccgtacggcggtaatcgacggttacctgatcgatcaggatccccctattcagatcgtcacccgcaacgcacaggacggggtctatctttccgagggtgaacaggtggaacgcctgaacccacagggcgagctgatcaacgacacgctggccgacgatcaggattttgaggtcgccgattttaaccgtggcctggtgatcccggcgtttaaccgcgcggtatgcggcgagctcaccaaatacctggatcccaccgggcagcaaaaaacgctggtgttctgcgtcaccaacgcccatgccgatatggtggttgacgagctgcgtagcgcgtttaagaaaaagtatccgcagcttgagcacgacgcgatcatcaagatcaccggtgatgccgataaagacgcgaagaaagtgcaaagcatgatcgtccgctttaacaaagagcggctgcccaatatcgtagtcaccgtcgacctgctgaccaccggcgtggatatcccgtctatctgtaatattgtgttcctgcgcaaagtcaaaagccgcattctctacgagcagatgaagggccgcgccacgcgtctgtgtccgtcagtagggaaaaccagctttaagattttcgactgcgtggatatctacagctcgctggaaagcgtcgataccatgcgcccggtggttgtgcgtccgcaggtggagctgcaaacgctggtcaacgaaattaccgactcagaaacctacaaaaccatcgaagcggatggccgcagttttgccgaacacagccatgaacagctggtcgctaagctgcagcggattatcggtcttgccatctataaccgcgatcgcagcgaagcggtagataagcaggtccgccgtctggacgaactgtgcctggatgccgcgggcgttaactttggtggtctggcttcgcgcctgcgggaaaaagggccgcactggagcgccgagattttcaataagcttcccggctttatcgcccgtctcgaaaggctgacaaccgatatcaacgccctgcgtgaggcccccattttcctcgatattgacgatgaggtggtaagcgtcaaatcgctgtacggcgactacgacacaccgcaggatttcctcgaagcgttcgatgcgctggtgcagcacgccccgaacgcccagcccgcgttgcaggcggtgatcaatcgcccgcgtgacctcacccgtaaagggctggtggaattgcaggagtggtttgaccgccagcattttgaagagtcgtccctgcgcagcgcgtggaaagcgacgcgcaacgaagatattgccgcccgcctgatcggccatatccgccgcgcggcggtgggcgatgcgctcaaaccgtttgacgagcgtgtcgatcacgcgctggcgcgtatcaaggccgagaacgactggagcgacgagcagataaactggctcgaccgtttagcgcaggcgctgaaagagaaagtggtgctcgacgacgacgtcttcaaaaccggcaatttccaccgtcgaggcggtaagccaatgttacagcgcacctttgatgacaacctcgacagcgtgctggataagttcagcgattacatctgggacgaactggcttaa

SEQ ID NO: 375944 - DNA, 915 bp, Salmonella enterica
atggctgttccaacatatgacaaatttattgaaccagtgttgcgttttctggccactcgacccgagggcgctttggtcagagaagtgcgtgaagctgcagccgaaatgcttgggttagatgagcagcagcgtgcagaggtgattaccagtggacaactgacgtaccagaaccgcaccggttgggcgcacgatcgtctcaaacgcgccgggttatcgcagagcctatcccggggaaaatggtgtttaacaccagcgggaatgagctgggttgcctcgcatccgcagccgatgaccgagctggaagtgagtcattttgcttgtgattttaacggcgtaaagctcagtaagctggcagatgcggtggcgttagatccacagccagaatcgattgaggatgatgagcttgccagaagcagcccggacgatcgcctggagcaagcgctcaatgagattcgtgaatctgttgccgaagaattgctggagaacctgcttcaggtttcgccggcgcgttttgaagtgattgtgttagatgtgttgcaccgcctgggatatggcggccatcgcggtgatttgcagcgcgtagggggaaccggcgatggcggcattgacggtattatctctctcgataagctcgggctggaaaaagtctacgttcaggccaaacgctggaaaggcaccgtcgggagcgctgaagtcaggggcttttatggcgcattgcctgagcaaaaagtgaaacgtggcgtctttattaccacctcaggttttacggcgcatgccagagactatgctaacaaagttgaaggtctggtgctggtggatggcgacaggctggtgcatctgatgattgataatgatattggcgtatcctcacgtttactcaagttgccaaagctcgatatggattactttgagtag

SEQ ID NO: 375945 - DNA, 1983 bp, Salmonella enterica
gtggttttttctaaaaaacccattactaaatatataacctgggccattgttaccagtcagattccactgccggtcattgctgatagcgataatgaaattcagtcgtggattgcggggacggcatcgtctatttctccgcatctgcaggaggggacgctggaggattatgccaaaggaaaaataaaggcgttaccagggcaggccgctaatcatctggtgaacgaggggataaagagcgcttttccggagattattttccgtggtggcgtcaatcttgaagatggcgcgaaatatcgctcatcagagttcgatatgtttattcccgtccaggaaacaacatcgtctttactctttggtcagcttggctttcgcgaccacgacaacagcagtttcgatggccgcacctatgttaacgttggtatgggttaccgccaggaggtcaatggatggctgctcggcgtcaatacgtttctggatgccgacatccgttattcccacttgcgtggcggcattggcggggaagtctataaagacagtctggccttttccggcaactattatttccctctcaccggctggaaaatgtcagcagcgcatgaattacatgatgagcgtccggcatatggctttgatctgcgaacaaaaggcacgctccccgattttccctggttcagtggagagctgacatatgaacagtattacggggataaagttgatctattgggtaacggtacattaagccggaatccccgcgccgcaggtgcggctctggtctggaatcctgtccccttgcttgaggtcagagcaggatatcgggacgccggtaacggcggctcgcaggcagagggcggtctgagagtcaattattccttcggtacgccgttacatgaacagcttgattaccgcaacgttggggcgccgtcgaatacgactaaccggcgtgcctttgttgatcgtaattacgatatcgtcatggcgtatcgggagcaggccagcaaaatccgcattacggcaatgccggtgtcaggcctgtccgggacgctggtgacattaatggcgacggtagatagccgttacccggttgagaaggttgagtggtcgggtgatgcggagcttctcgccggactccagcttcaggggagtctgggcagcggccttatccttccacaacttccgctgacggcgaccgacggtcaggagtatagcctttatttaacggtgactgacagccggggtactcgcgtgacctccgagcgtatcccggtaagggtgacacaggatgagaccagtttccgttcctggataaatgttatcaatgacgatgttcaggttgaggacggcaactttgtcatcaatacgccgcttcctgccggagaagaggggaaggttattgagtggcactacgtgcgcgagcgttctgaagaggagtgggcgtcgctcaaaccacgtcatattaagtatcaatcagatacgccgggtctggcatttaaagcgctcggtggtacagagcgtgacggccattgggttgaacgggttctggtgacccatatcggcgatgatgcccgctcgctcaaattacatattgaagcaagcggaccagacgataaacatccggtgaagggtaccgtactactacaagcgcagtcagacagtattgcgcagaaggtcacttctgtggaggtgctttttacgccgggtactgaagaggccaacggaagcgttactgcgccagtcgtcggaacagaaatgcgagccagaacgctttgtgtaaataacacggactgtactgatgcgtttaattatcagtgggaaatctcggatgaaatgaaatcctggcaatccgtaccgggtgcgacaaaggccacctggcttcttccttatagtcttaatggggaatcgcttcagaataaatatatccgcgtcagaattatttctgataagggaaatgctaagggtaataccgcaacctctgatgcgaattaa

SEQ ID NO: 375946 - DNA, 519 bp, Salmonella enterica
atgacgccaacaacaacacaggattatatctcattgggtcaggaacacgctgtcacctttggcaaaacgcaactgaccctcaaacccggtatactggctgaaggcgaaccattaccctgcacaaaggggctggtgagccataatttattaccgggttactgtatcccggggataaaaaagcagattattgtcgttccgtcactggatacgccagtttgtgaatggcaggtaaaagactatagtgaccgccttaaatcagcgggtagccactcaacccgggcggtatatgtgctgagtatggatacgccatttgctcaggcccgttttattcgggaacatgatattcatcccggcataatttttgtttctgactacgcttgccgccagtttttggataattccgggctgaaaattaatgagctcagtatttttgccagagcgttgatagagtgcgatgaaaacaatgtggttacgcgtgttagtgtaccacgagatatcactcatcttcctgtttactaa

SEQ ID NO: 375947 - DNA, 126 bp, Salmonella enterica
atgttggattctttgccggatgcggcgttgcctttttgggcctacaaaagcagatgcctcaagatcggccgtcggcgtcgcggtcagtttgttcacggcaagcgcgcagggcccggagcgtactaa

SEQ ID NO: 375948 - DNA, 1020 bp, Salmonella enterica
atggcaaggatcatcgcgctggatggcgcacagggagagggcggcgggcagattttgcgctcggcgctgagtttatcaatgataaccggccagccgtttgaaatgagcggcatccgcgccgggcgcgctaaaccggggctgctacgccagcatttaacggcggtgcgagcggcaacggaaatctgcggcgcgcaggtgaacggcgacgagctgggctcgcaacagttgcgttttacgccggggccgattcgcggcggcgagtaccgttttgcgattggcagcgcgggcagttgtatgctggtgctgcaaaccgtcctgcccgcgctgtggtttgctgacggttcatcccgcgtggaggttcacggcgggacgcataatcaggccgcgcccagcgctgattttatctgccgcgtctgggaaccgctgttggcgaggatgggcatcagccagcgcaccacgctgataaaacacggcttttatccggcaggcggcggcgcggcggcaacggtcgtcgaaccggcagcgtctttacgcggtctgacgctgatatcgcgcggcgagacgctgcgcaccaccgctgaagctttgctggcggcggttccttaccacgttggcgaacgtgaagtcgcaacgctggaagcccacttcccgcaggcggagaaaaacgtcgttgcgctggaaggcggctgcgggccgggcaacgcgctgtcgctgatgattcaaagcgaacaactgaccgaactgttcgccgcgttcggcgtaaaaggcaccagcgcggaagcggtagctaaccaggttgcgcatgaagcgcggcgctatctcgcaagcccggcggcggtgggagagcatctggccgaccagctgattttaccgctggcgctggcgggcgagggcgcgtttaccgtggcacgggcctccgctcacttgcttaccaatattgcggtggtggaacggtttttgccggtcagattttcctgtgaagcaaccgaaagtggctatcttgtccgggtaagcgactaa

SEQ ID NO: 375949 - DNA, 399 bp, Salmonella enterica
atgctgtctattgtggtagataaaacgtatagccctggcgtaattatggcggcgctcattgttattcataactttgccgtgctgggattatttgcgctggaaaacatcaccatggcggaaattttcggatcgcgtaatcgcttcacccggatggcgatttcaaaagaggcaggggggctggtggcggtcggttttggccccgtcctcgcagggatcttttgtaacatgaccgattcctggctgcccatcttaattatgctggtgctctactcgtgtattggtctgatttctgcgctgttgatgccggaggtcagagatcgcgacctgagtctgcctgaggatgcggcggaagcgacagcggcagagaagttacgccactccgcaacccagacgagttaa

SEQ ID NO: 375950 - DNA, 1089 bp, Salmonella enterica
atgaaaaaaagtaaagcaatgttatttatcgctccggcgctgttttcatacgccctggcggcacaggcctgcacgacccttgctattcaggataaacaaggcgatatttttcatgggcgtacgctggaatatatgcaggatttaccctcatggttaacgtattacccggcgggaacacagtttgataaaaaaacgccggatggcagccaggggataagctatcaggcgaagtatccgatactggccattacttccaccattactgatggcgatagcagagacatacttgaaggcatgaatagcgcgggattgtcatttagtgaaaacatgatcatgaatgcgcagttgccgccattgcccgcgagtgaatataaacaggcaattcctgtcacctcgttgggagaatgggcgctggcccgttttgctactgtcggcgaggtaaaacaggcaataaaagagggcaaattctggtcaccagaactgcatcggtttggcgatctgaaatcgccatttcattacgcgttttacgacaagaaaggaggaagcattgtcgttgaagtggaaaatggtaaattccatgtctatgacaatcccactcgcgtgatgacaaatggtcccgcattcccctggcatctgacaaatctgaataattatacgcaattaaccaatgtggaccgctcttcaggcacactgggcgggataaaagtgatgcagcctgatagcgggattgctattgcagacttgccatcgtccgatacgtcggtttcccgttttatacgcggcgtttattacaccacatatgcgccgcaagcgacatccgcccacgatgcaatgaatacgcttgcgcatattatgagccgtttcgatcgtccgaaaaatattacggttgattatatggggagtgaaggggaaggcaacgccacccgcaaaccggtctcagaatatacggtctggacaacgctgtctgacttaatgcacggtgagatgatggtgcgcggctacaatgatatcaactataaaacctggtctctttctcagtttaagaacgcgacagcgcccgtgttcgagaaaatcaacgtcaaaggataa

SEQ ID NO: 375951 - DNA, 930 bp, Salmonella enterica
atgcccacttataaacaagttgtgaaccatgttaagaaacatgtattgtggaaagatgagtattttgaacgctattatcggctcaatcctgaactggttcagaagcgtttggataaaatttatcaagctgaagatgatctaatggtgcttatcagtactcaattattttgtttcttgcaggctaatggcacgctctattttgatggttgctataaaacagggaaagcagataactcattgctttgtactaatcttgctctatggagtatcgagctagcttgtgatcattttgatattcgggaagagcggggacataccacgaagtttagcgagcagggagagagttggttaacactattcgcctgcaatcaattctctttagttccttattgctatccggccattcagcgcgggtttcaaagcggcgtattgaaagaaattgttccgttttatcgtgaacagaaattgggtatcctggcgatggagataatggcgcgtgaacggggggatacaatcaactgggaagcaatgcaagtgcgtgttgatcctgtctatctggacttttgccaaaacattttattgtcatcagatgatgaactagtccgcaccggattaattacgctatgtgataagcatcttgagtggaccgattttcataatagcgataagcattgttgcttgactggctatgaaattcagcgtcaggatctattactctggccatttgaatatcaggcggtaaaaaactggcgagcacgtcaagggttaagtacaccaatgattgaacatccattgatgaatagcccgatgacgacagcgaattgtcctgacttttcgcagtggcagcgtccagagtggttcaatccgttagttgattttttggcgcagcgcaggcctgagctggcatttttacgacatctctttatttaa

SEQ ID NO: 375952 - DNA, 1710 bp, Salmonella enterica
atgaaattgattgggaggttgcttctctacgtgctgatcgcctgtttagtggtgattttcggcttttattttctgctgcaaacgcgctggggcgcagatcatgtcagcaactgggtatcagagaacagcggttatcacctcacattcgacgtgatggatcatcgtttttccgccccatcccatcttttactggagaatgtgacctttggtcgtgatggtcagcctgctaccctggtcgcgaaaaccgtagatatcggtctgagcattcgccagttaaccgcgccgctgcatgtcgacacgattctgttacaggacggcacgctgaatatttcagtgcaaaccgcccctttcccgtttgaggccgaccgcctgcaacttcgcaatatggcgctcaatagccccggtagcgaatggcgattgagcgcccagcgcgttaacggcggcgttatgccctggcgccccgaggccggtcgggtattgggcaataaagcccagatccaactgagcgctggttcgctgacgttaaacgacgttcccgccacgaatgtgcttattgaaggcagtatcgaccataatcaggtgatgttaaacaccgtcggcgccgatatggcgcgcggagcgttaaccggcgtcgcccggcgtaacgctgatggtagttgggtcgttgaaaatctgcggctgaatgatattcggttacaaagcgataaatccctgagcgagtttttcgcgccgcttactacggttccatctttgcagattagtcgtcttgaagtgacggactccagcctgcaaggaccagactgggcagtcaccgatcttgacctgagtttgcgcaatctgactctgcgcaaagaagactggcaaagccaggaaggtaaattatcgatgaatgccagcgagtttatttacggctcactgcacttgctcgatccaatcctgaacgccgaattttcaccacagggcgttgcgctacgccagttcactacccgctgggaaggcggtatggtcagaacttccggcgcctggttacgcgaaggcaaagcgcttattctggacgataccgctatcgccgggctggagtatacgctgccggaaaactggaagcagttatggatgaagccgctgcccgactggttgaacagcctgacgctgaaaaaattcagcgccagccgcaatctggtgattgatatcgacccggccttcccgtggcaaatcaccgctctggacggctacggcgcaaacctggagctggtacaacatcatcaatggggcgtctggagcggcaatgcgaccctcaacgccgcagcggcaacctttaaccgtgtggacgtgcgccgcccgtcgctgtcgttgacggctaatgccagcacggtcaacatcagcgatctgagcgcgtttactggaaaagggatactggaagccactgccagcgtatcgcaactgccgcagcgtcagacgcaaatcagcctgaacggacgcggcgtaccaatggatgtgctacagcagtggggctggccggcattaccgattgctggcgatggcaatattcagctcacggccagcggcaatattcaggccgatgcgccgttgaaaccgacggtaaacgggcaattacacgcggtcaacgcacaaaagcagcagataacacagacgatgcaagcgggcgtggtgtccggcggggaagttacgtcaacggagccaacgctgtaa

SEQ ID NO: 375953 - DNA, 567 bp, Salmonella enterica
gtgaaaagaaaatatcttacgcaagaagagattgaaaaactgctgtcagcgaccgacagaatgcccttcccggaaagaaaccgctgcttaatcctgatggcgtttattcacggcttccgggccagtgagctgctggggctgcgcttgtcggatattgatcttgcaggaagacagctttatatccggcgcctcaaaaatggcttttcaacgtgtcaccccctccttcccgatgagtataacgtactgaaaagctggctcagggccaggaagtatcttgagaaaggggctgacggagactggctgttcctgtcgctacgacggcatccgctcagcaggcaacaatttttttacatacttcgtgaggcagggcggttggccgaattaacgatagcgccacatcctcatatgctgcgacatgcctgcggctacgcccttgctgataaagggattgatacacgactcatacaggactatctggggcacaggaatatccagcacaccgtaagatacaccgcaagtaacgccgggcgttttcatggaatatggcgaaaaaaacgtcgagtataa

SEQ ID NO: 375954 - DNA, 222 bp, Salmonella enterica
atgttgtttccacaacacgaagctgccgttgctggcgcagtgccgggtcggcaatggccagaggagaacaatctgatgacgcaagaatatgcggaaatgtccaccggaaggggggggaccagtaagtgccggtacagtatgggggcgaaaatatttttgctcctgctggcggtctccaccgtcgcagcgttgttcagcctgtaccaggttctgacgtactga

SEQ ID NO: 375955 - DNA, 741 bp, Salmonella enterica
atgcagacgttaaccagagtactgccgcctctccggctgattatgttttgtcagtcaggcgaaaatcctacgcagtttccggataccggcggcctttgcgtggaggactgcgttcgtctcaggacaccagaagggctgctggatcggttgcgtcggtggcccggcgcgatggtgatatccgccggacggccatcaacccagcttctgctgtggcaacaggtttttctgcgttatccgcggacagtggttttttgcagcagtaacgcgtttttaccggttgacgtcagcgtggaaggttacttccgccatctgaggctgattaaacgcgccatgtcggtaagggttctggccagaatggctgagcttgccatatggtcatcactacagacatcgccttacgaggaggagatgaaaagcgcgttgagcgtgccggagctggtgatggagataaacagccgcacgctggtcaggttactgtcagagcgtctgccaaaacagggacggcgggtgctgggattactgttgtcaggctgtagcccggaaatgacggcccgtatgctgggaaccggcgtgaggcaggtctggctcgcggagcagacgctgaaacaacgctgggatatcccgacaggagtaccgctatctgatgcggtaagaataaggataccggacgtcggtccggacattagccaacagagtgggttggtaaaaactggggccggtaacgcaccggatttatgctga

SEQ ID NO: 375956 - DNA, 1152 bp, Salmonella enterica
atgcaacgtaaaaagatactaattgtaggtgcgggcctttcaggcgcagtaatagcacgccagttagccgagcagggacatgtagtcaatattattgatcaacgttcacatatcggtggtaacgcttatgatgcccgagatgagcacacgggtattatggtgcacgtttatggtcctcatatttttcatactgataatgaaactgtatggaattatgtaaataaatacgctgagatgatgccttatatcaataaggttaaggccacagtaaatggtcaggtattttctctacctatcaatcttcataccatcaatcaattttttggtgtcgcctgctcacctgatgacgccaggaaattactgcttcaaaaatgtgatagcaccattctggaaccacaaaattttgagcaacaggccttgcgtttcattggtaaagagttatatgaagccttttttaaaggttataccattaaacaatgggggcttcatccttccgcgttacccgcttctgtattgaaacgtatccctgttcgttttaattatgatgataactatttcaatcataagtttcagggaataccaaaatttggttatacacaaatggtcaagtccattgtcgaacacgaaaatatcgctgttgaactatgtcgctccttcactcaggaaatgcggacaaattatgatcatgtttttttcagtggcgcgctggatgccttttactcctgtcaatatggccgactggaatatcgtacattagactttaaaaaaataatttgccagagtgattatcaaggatgcgcagtaatgaattattgttcaatagatactccttatactcggattactgagcacaaatatttttctccgtgggagagacatgaagcttcaatatgttatcaagaatatagtcgggaatgtgaagctggtgatataccctactatcctgttcgcagggcagataaaatggatttactgaataaatatctgtcgcgggctaaaaaagaaaaaaatattactttcattggtcgtcttggcacttatcgttatctcgatatggacatcacgatagctgaagcattacagacggcggacgtatacttaacgtcgctatatgaacaaaaagaaatgccagcttttacagttaccgtttga

SEQ ID NO: 375957 - DNA, 894 bp, Salmonella enterica
atgaagtgtacagcgctaatcgtaacttttaaccgtcttgaaaaattaaaaaaaagtgtgcgagagactgttaaggcgggtttttcctctattgttatcgttaataatggctcaagcgacggtaccagggaatggctttcttcattaagtgaacctggcatcacgatacttaatcttaaagataatcttggtggtgctggcggatttaaagtaggtagtcaatatatatgctcatatagtaatgccgattgggtatttttctatgatgatgatgcttacccggaaattaatattttaaagcatttctcgttattagatacctcaagataccgtatatttgcgtcgcgagttcaggacacctatgggcggtcttgtcggatgaatttgcctttcattagggtcccatctacggtgtttgagactatttattatgcgatgcgcccagagaggttttctccagtaagaactcaggttactgatgttcaaactgtgtcattcgttggtatgattattgatcgaaaggtattgaataaccatcttaacgatatccatgatgaacttttcctttattatgatgattttttctttggttataagctagtattgtccgggcagaaaattcgttactccccagaaattaaatttattcatgatatctctattcatggaaagtgtatctgccccgaatggaaagtatattatctttgtagaaatttgttgctgctgagaaaacttttacccgttcccaggatattcagtgttctttctatagtgttacgcctctctaaatatctcgccatattaccatggcagcgtaagaaatttcgttatctatattttatctggcagggaatacttcatggacttaaaggtattagtgggaaatatcattag

SEQ ID NO: 375958 - DNA, 1134 bp, Salmonella enterica
atgaaaaggttatgttattttgtaaattcagactggtactttgatttacattggacagaacgtgcgatagcggcaagggatgcgggttatgaaattcatatcataagtcattttattggtgaagagattataaaaaaattcaaaacgcttggttttatttgtcacaatgtgtctcttgttgctcagtcatttaatatgtttgttttttttagagcattccttaacgctcggaaaattattaaagagattaatcctgacttattgcattgtattacgctcaaaccttgcctgattggtggggttagcgccaggagaagtaatagtccagttgttatcagctttgtcggacttggtcgaatctttttatataataccgtgccaatgagaatattgcgtgcgttaaccgttttggtttacaaatatattgccggtaataagcgtggtgtttttatttttgaacatgataaagatcgacgaaaaatatcgcgtttagtaggtattgattatcataaaactatcgttatcgaaggtgctggaattaacccggatatttataaattctctatagagaaaaaacatgagataccgatagtcctttttgcaagccgaatgttatggagtaaaggtcttggcgatctcattgaagcaaaaaagatcctcagacaaaaaaatattcattttgttttaaatgttgcaggtatattggccgaggacgataaagatgctatccctttggagctcattcatcactggcataatgaaggactaattaactggctgggacgctcttcgaatgtatatgagcttattcagaaatcgaatatcgttgcattaccatctatttatccggaaggagtaccacggcttttattagaggcatcatctgtaggacgtgcatgtattgcttatgataccggcggatgtgatagcttaattattcataactataatgggttgatcgtgaaaagtaattcagctcaggagttagcggtagaattagagtatttgttaaaaaatccacagattcgcttagagatgggggcgaatggaagaaaacgtgtaaaggaattgttttccagcatattagtcattaataagacattgcaaatttataaagacactattggttgctaa

SEQ ID NO: 375959 - DNA, 771 bp, Salmonella enterica
atgaatgatttgaaagaagctctggccaggcaccaactttggatttcgctaggttggaatgatgtcctgggacgataccggcgatcggtgttagggcctttttggataacgatttcgatgggggtcaccatatcagcgatgggacctctttacggttcgctgttcagttctggttccgaaaattttatcatgcatcttactttaggtatgatcttttgggcctttctatcagcaactattaatgagtcatgcggaatatttaatgagtccgcatcaattattaaacaatctgaccttccgctatatttatatatattacgtgttttctatcggcagtttatgattatgttgcataattttatcattatacctttcgtgattttttttaccaatacatcggtaaatcttgatattctcctttttatacctgcaattgtaataacatccatctcattaatttctacaggtatgattctcgccattttttgcacaagatatcgtgatatgggaccggttgttcaaagtgtggtaacgttgtgtttttttataactcccatcatttggacatcggaacaattaccaaagggaagaaaggagtttgttgattataatattttttattactttatggagatgctcaggaaaccattaatgggaactgtaccagatgtaactatatggttttacacaataataacctctattattatgttgatggtctcaaccttagtgttgactaaatatcgctcaagaatcgtatactggttataa

SEQ ID NO: 375960 - DNA, 711 bp, Salmonella enterica
atgaaaatctcttgcaaaaacgttggcgtaatactccctatatttaactccagccaccgttcatttaaaaaaacttttctacaggctgcttcaggtggacgaattggctcatcgaataccgggattattgaagtagaggcattaaaaaaaattgattttacgcttaccgaaggtaaccgtcttgcgcttatcggacacaatggttcgggcaaaacaactcttctgagagtacttgcaggggcctataaaccaacttcagggaagtatgaatgtattggtcgagtcaccagcctcattgatcccatgatgggaatggatggtgagcttaccggcctggaaaatataaaactgaggggactatttctcggtctgtcaaaaaatgaaataaaaaatattacagaagatgtcatcgagttcagcgagttaggtgattttattaaaatccccgttagaacgtattctagtggtatggttctgaggcttggtttttctatttctactgcaattaatcctgaaattttactgatggatgaatggatgagcgtgggtgatagtgattttaaaagaaaagcagagatgagattaaatagctttatctctaaagcgggcattatggtaatggccactcacgatgatgaactggctaaatctgtatgtaataagttcatcaggcttgagcacggtgagatagttagcaaaggcggattttaa

SEQ ID NO: 375961 - DNA, 753 bp, Salmonella enterica
  misc_feature (717)..(726): n is a, c, g, or t
gtggagtggcaatcagacgaagactctgttttaaatggatttgaattgctgactaaagatcatgttagtaaatcatctatggctttagttataacaacttataatagaaaagaagctgttactaaaacaatcaatagaattaataaaacactcttaacccagagcgaatttaaagatcgttttaaattgattgtcgttaataatggcgaggcgattaatcacccgtcaggaaacggcattatagttatcaataatgaaaacctcggtgggtcaggcgggtttatgagaggtttgatagaggcagggaaaatcaacgatgtcaaacatgtcatatttatggatgacgacggctcatgtgaaattgaatcgatttgtcgaactcatgcttttttactgatggctaaagacaaaaatacagttgttactggctgtatgctttttgaagataacccggcaatcatacatgaatctggtgccatatggcatagagattttttacattacccggataaacattatctggatgctcgggaaatagattctttagatacttttgataatgaaagaaaaataggctacggtggatggtggttttttgcctttaatattaacgctattgaatattactcatttcctttctttgttcgtggtgatgacctgctatttggatatatgcataaaaaacataatattgtcacacttaatggtgtggcttcnnnnnnnnnntgtggcttcgtggcaaatggattttga

SEQ ID NO: 375962 - DNA, 672 bp, Salmonella enterica
gtgaaccctcttagtcaattctcccagaatgatatcttttgctccgggcaaaccatcaatattgaaatagcctggtatgcttcgatacagcaggaacctaatggccggaagaccgtcaccacacagcggtttgtccagcaactgagcaaggttaactggaactggacgatgaagcaggctaacgaatggatcgagtggtatgtgacaacattccgcgatgtatcaacgcaggaaggggagacgtacctttcagctgttcaatccaaacggaggactatagccatgggcttcccttcacctgccagtgattacgttgaaacaaggatctccctcgatcagcagctaatcagccagcccgcagcgacttatttcatgcgggcatcgcgttcacatttcagggaagggataatccagggggcgctacttgttgtggacgcgtcgctttcagcctgtgatggctcgctgctgatatgcgcgatagatggggaattcaggatcaagcgataccgaactcaccctcagccccacctgataaatctggagaacgggagaaaggaagcgctgccagaagatggtgatggctacaattcttcacacgcaatatttggagttatcacgtacatcattaatgatgccaggaacgcggagtttgatgactgcccggtgatgtga

SEQ ID NO: 375963 - DNA, 1830 bp, Salmonella enterica
atgatctacaagaaattcagactcgatataaatgggctaagagcttttgcattgataagtgttgtgctgtatcacttcggtgtaccttatgtgtcaggtggctttataggtgtagatgttttctttgtaatttctggttttcttatgactggaattgtccttgaacgcgtagaccacaaaggagtacttgatttttatattgcaagattcctaagaattgtaccagctctggtatttgcaattctcttgttgatgattttcggtttatttacactaagtacaaatgaatacgaagcacttagcaagaacgcaatatcgtctttacttttttattcaaataattattacgcaattcactctagttatttcgactcatcatcagagttcaactttttgcttcacacctggtcactatcagttgagtggcaattttatattttatatcctttattagtcattatagttaaaaaattacggtttcctgttggactctcattatctgtaattttagccatgtcacttgcaattacacttatgcgagtgactggaaccaaagaagatattttctatcttatccctaccagggcatgggaaatgctggctggcggccttgtatacatagcatctgtacgttacaaaatgccagaatggataaagcattgtgaggtttatgggatagtcctcattgttgttgctgttgttatactgcacagtaatggttactggccaagctattcagcactcgctcccgtgctgggtgcttcgatggttattctggctaacaaacagaactctttattcacatcaaacagaattgcacagtgggtgggtaagatttcttactcagtttatttatggcactggcctgtaattgtagcgatgaaacattatgatattgagttcagcgctataaatattttctttggtgtaattgtgtcttttgcgcttggggatatttcatacagaacaattgaaaacacgctcaggaaacgagttaagctacaatttaatattgtattattttcctctactctggctctatgcttgtttgtcatgttcacaaaaggtgttagttttagattttcagacaccctaaagcaagtcgttgagtatcgtatggacaactctccctggaggcctgatatttgcttcctcaatccagatcaagattattcagcattctcaaaatgtcaggataaaatgactgaaaagtcttttgttgtatggggtgactcgcatgccgcacatcttatgccagggctgaaatcggtatttggaaattcacttaacattacgcagagaactgcaagcttgtgcccaccaatcattgggcttcaaaaagatgacaggccgtattgcaaagacatcaatgatatggtagccaaggaaatttcagacaacaagcctactacggtattaatgtccgcgttgtggcctgtctatcctatgcgtgattatctgcctgagactattaaattcctgaaggataacaaagtaaaaaacatcatcattgttggcccgttcccggtttggaagaaaacgatgattgatactattgaggatatggggattaattccggaaggaccgttccatggagcatgacggatgaaacccgtaatctgagagataatgacaaatatcttagagagctggcgaaagagcattcccttacttatatttcaccacttgagactatgtgtacagaaagttattgcaaagcaataatagggaatagaattgcttaccctatacaatatgacaatgcgcacctaacaccagaaggctcagggtggtttattgaggaagtgaaaaagcagatttcaaaataa

SEQ ID NO: 375964 - DNA, 444 bp, Salmonella enterica
atgagcataatatgtttttcctcgacatcaaacacatatttttcagaggagaacattccagcttataaggccagtgggttgtggtcgaatgatttttatgctctgaccgatgaagaagttgataagtattatatgaaaactccaccaaagggaatgtatctcggttcatcaaatggacgtattgcctgggtttgtattccacctccaacgcaagatgatttaatttctgccgcaaatcaggaaaagaagaagagaatcgatcaggccaacgagcacatgaacagcaggcggtggccgggcaaagcggcgctcgggcgcctgacgggcgacgaactggcgcagtacaatctgtggctggattatctcgatgcgctgaaagcggttgatacatcggttgcacaaaatatagcatgccccatcagaaaagctatacacataaaataa

SEQ ID NO: 375965 - DNA, 528 bp, Salmonella enterica
atgaggcattttaaaaatttcactaaaacaacggaattaacccttgttcagcagaaattatcagagaattgcagtattcagtttatccaggatgaatcaggtgttgactggtatgtgttacagaagttattccagcccgatacgctgaaaatccagtatgacaaaacagggctgattattgctgcggataaagatgcgactaagctatttccgctgaattgctctgttgtggaattcgctgatactgatattcccgatggttttcagcctgggaattttacctacagcaacggcgttattgcccctgttcagattgattatgttgctttagctacggcagagcgcgacaggcgtatgacgtcggtcacagcaaaaatcaatcagcttgtagaagctcaggacgatggcgatataacggctgctgaattgtccgaactcactgcgctacgtgaataccgaacaaagctgcgccgactggcgctagatgttgcacctgatattaactggccggaatatctgaataaatag

SEQ ID NO: 375966 - DNA, 825 bp, Salmonella enterica
atgcgtgcgcatcaggcccccgacgcgccagaccaggtaagtttctggcaaattattacccttagcgaggtggtaagtccgaccactgttgtggatgttcttgcagtcagtggcaataacgtattgtttggtcacggaacaggaacgggtattacctcatggcgtcaagtggcgatgctggaggggggcgcctttacggggggtatttctgcaccaaatatgcgtggcgataccctggttacggttggggatggcactggtgggatggctaaaggtgacgttgatggtgcaggttttaatggtaacaatctgaacattaagtcatggaatggtatcggatttcagaactcagaagacctggctatccgggcatatatcagcacccgactcggtgttatcgcagctgctgaaaacttgcaggctggaagtgcgatattcaacaaaaatggcgatgtatacggtgatatatggggcggtggtagcggaccgggctggctgagcgcgtttgtggcttctaagccagcgcgtcagtacatcaccatggttggtgtgtaccagaacgacaaaacaaagccatttatgcttcatgatgatgggtctggtgtattccttgctacaactgacatgctgagtgggtatgttcagtcaattcgattcggtgccgttgagcatggaaacttatatcgttcgcccggatttgcagaccagttaggttacgtcattacaggtgttgagaatggagactcgaacgatacaccagacaggatccaacgacgcctgttacagcttaaagtgaatggccagtggtatacggtgggagcataa

SEQ ID NO: 375967 - DNA, 843 bp, Salmonella enterica
atgggaaccttaaagcttattcaatatccatctcaacttctttcattaactatctcagatataattaacaaacaaaatttatcccagctcatccaaaaatctaaaaaagatgacagtgaaaattgggaaggcaaggattggataattaaaaacacacctcaacaaggaataaattggataggagaacatcccaatatcaaagcagtaataataaaaacaaaggatggttcttacgctgatgatggctggaaaaataatgaaaaaaccatatactcttactcatttaaagcagcaaaaggcatcattaactttaatgattctgcgaaccgggttctaattaaccaaccgataagcaactatccaattttgttatttactgattcatctaacaaatgggaatttcagggatgctttaaaatcatagacatactagaaaaagcagtcatcttagaaaaaatgataagtttcccaagtctaaatgataagaatagtgacaatgatgacgtcattttgtataaaaacgagcacactgaaggaaaaattaaatacataactcatatgttatctgagcggaatagaaaaataatagatgaaataaaagataactcgcaatgggtttgtgatatttgtgagattaaattcttagataaatatggtaaaaactatattgaggcccaccacaaaataccaatacatacttttaccggtgagcacagaatattgaaaactgactttgcattactttgcccaaattgtcacaaagctgttcatatatacttaagagaggaaaacctacaatatgaagaagctaaaataaaaatacgcaacatcttaaaaagatag

SEQ ID NO: 375968 - DNA, 855 bp, Salmonella enterica
gtgaacaagaccattaatttgctaaaattactgcccgtagtattattaagcgcatgtactacatcgtatcctccccaggatacaacatcggcacccgagttaccccatcgtaacgtactcgttcagcaacctgataactgtagcgttggctgtcctcaaggaggaagccaacaaacaatctatcgccatgtctatacgctcaataataatagcgtcacgaaatttgccaactgggttgcctatagcgtgacaaaaaccagccaggcaagcggtcgcccgcggaactgggcgcaggaccccgatttaccgccctcggatacgttggccccttccgcctataaaaatgcccatacgctattaaaagtcgacagggggcaccaggcgccgttggcaggattgggcggcgtatcggactggccgtcgttaaattatttatcgaatattacgccgcagaaatccgccctgaatcagggagcatgggctgcactggaaaaccgggtgcgcgaacttgccaaacaggctgatgtatctgtagtgcacgtagtgaccggccccctttttgagcggcatatcgccacattgccagaagatgcgacggtagaaattcccagcgggtactggaaggttttattcaccggaatggcgccgtcaaaaagtgaaggaaattacgctgcatttattatggatcagaatacgccccgttcggcgaatttttgcgactatcaggttaccgtggaggctatcgaacataaagcgaagccagtgctgacgctgtggtctgctttgcctgaagcggtagccagcgaggtgaaaacgacaaaggggagtctggcgcagaagttaggttgtcgatga

SEQ ID NO: 375969 - DNA, 129 bp, Salmonella enterica
atgatgaatcttcgaatgccactgtatataaacacagtaacaatcatgtgtaattatcaaaagcatttacattgtttgatgtttgtgctgcaaatgcttgatagcttcatgctatcggaggcgcagtag

SEQ ID NO: 375970 - DNA, 303 bp, Salmonella enterica
atggcgcacatcgtgcgccattttttttacccacataaccatacaaagtataatgttattgttatgaaccgtactaaccagctgatcttaggtgcagtagttctgggttccacgttactggcaggttgttcaagcaacgctaaaatcgatcagttgtcttccgatgtacagacgctgagcgctaaagttgagcaactgagtaatgacgtaaatgcaatgcgttccgacgttcaggctgctaaagacgatgctgctcgcgcgaaccaacgtctggacaacaaagtattccgcatctgtaaataa

SEQ ID NO: 375971 - DNA, 1983 bp, Salmonella enterica
atgtccaactactgcttttactctcaggatgcattagctctggctcaaagtgctggtgttgatgtaataataaacagctatgctgagcagcataaaaaacaaacatatattctttgcagacctctatctaatgaggatgtaaagtatgattatgaccgagcgattgcagtattttcttctggtataaaacctttttttatagattttggggatgacgatgatctttttgaggagtatcaggaagattttctcgaagatgtttcttatttagcggagaaattcaagtatcgagataagatcggcaggaaaaaatcgtggcaaattttatttgaatcgctttctcgtaatgatatcgatttcaaaaaactggaagtcgaaactaaagaaagtagggtgattgatttaattatctcacttattgttggtagtattaacgacacatcaagaattaaccttgaagcaaataatttattagatacaataaaatccaaaattattttatttgatacggatcaaacaaagtttgtcttccagagtggctttggaaaaaagagtgtaatacaaggattagctggttcaggtaaaactgaattacttttacacaaattaaaagagatttattcaaaaaaccctgattctagaattgcatttacttgctttaataaaattctcgcttccacaatgagaaccagaatccctgagtttttcgattttatgcgagtcgaaaaacagatagaatggggtacaaaacttttttgcttcaactcttggggtttgactaaagaacctttttctggaatgtacagatatatatgccattattacgaaattccatttgggggatttggtaatggcgattttgatgccctatgtaagaaagccattgcagatataaataatagtgggagagctgataaaaaggcacttgattacgtatttatcgacgaaagtcaagacttcccacaaagcttcattgatctctgtgaaatggttacttctaaaaaattatatgtagcaggtgacgttttccaaaatattttcatgccgattagcgataacgtgaatcgagcagatatcgttcttaaaaaatgctaccgcacagatcctaagaatttgatgttttctcatgccttaggaatgggactctacgaggaacctgttctgcgttggttaaaagagcctgaatgggattcttgtgggtataaatataaaaaagtaggagatagagtccatttatcaagagaccctttgaggcgttttgaagatattcccaaaaatcataaaagtactgctgttcatttgttagaaggaacagataatgggccagataaaatagttgatattataatcgatattaaggaacgcaatccatctttagagcaaggagatattgctgttatttttcttgacgccggtggttatatttatgagtacattcattcgctaaaatcaaaagtaaaacaacagcttgggtgggattcaaatatctcacatgaaacaaaatcaaagcaagatggtaaactttttatttctaatataaataatgcaaaaggtcttgaatttccatttgttatttgttttgccatgaaactggtgaagagagctaattttcgaaatgcactctacactatgatggcgaggtcatttttagaaagtcacttagttttaaataatgataatgaaaatccggcaatccctacaattctcgaaggtctgaactttctcaatgaaaacaactacatggatgtaaggcttccttcagatgaagaaatacaaagtcaaaaagattttattgttctagatgagtcggtttcaatttctcagatggttaaaagttattgcgcagacaagaagtctacacctcgactaatagcaaaaataactgatcgagtcgaaaggataattgcggaagatgatgatgctgacggggaatacattaaaggcttgattgaaatagaatatgaaaggaacaaaaaactatga

SEQ ID NO: 375972 - DNA, 639 bp, Salmonella enterica
atgagcctttactttttcaataacgtgccagcagaatatcttgacaagttttgtgctgtaagggatgcattttctaacctagaaaatctgcttgttaccgcagagatattaaacacatgtcatgagtcctggaataaagaaacaaaggatttcgatttattaataagcacaggtacacataagcgtatattggtaaaaaaaacagatggtttttttactatgaacttaccttttcaggtaatcgagtatgaaagcaatatctgctttaattatgatgcttatgctcttcctgttaatgctgaatttatttcccgatgcagaaatgtaattgctacttgcggtaatggctccttttcttacgaggccattgctgtagaattatgtgataactttgatagagatattcagcaggcaataaattattgtgatgcaatttcttcattgcttttagttgatcacggatacttcagatttgacgatgatcttaaaaatgctaggggtaaagtgcatccaagatatcactttgatttcttctgcaacaactctactaatgtaaagattggttctaatattcggataggcgatacatttttcttggacttgtttgatgtcagtaaagatcggccatatctgacctga

SEQ ID NO: 375973 - DNA, 438 bp, Salmonella enterica
gtgaccaaaaagcgaactaaggtgagcttaggaacctatcctcatcttacacttgccaaggcacgagctttacgtgatgaatacttgtcgttgcttgcaaatggtatagacccactagttcataacacccagaaagccaatgccctaaaagatgcaacggaacatacatttcaagcagtagccaagaagtggcttgatgagaaagtcaaaacgtcaggcatctcccgggaccatgctaacgacatctggcgaagtcttgaacgaaatattttccccggtctgggtaatgtgccaatcaatgagatccgtcccaagctcttaaaacagcatcttgatccaattgaacaacgaggagtactggaaactttgcgacggctcatttccaggttgaatgaaatcttccgttgggcggctacagaagagctgacccgcagataa

SEQ ID NO: 375974 - DNA, 162 bp, Salmonella enterica
atggcaaaaatcgctaagaagctcactgacactgaaatcaaaagcactaagccagccgataaagaaatcaacttgtttgacggtgatggtctgattctacgaatcgctcctttggcgaagggagggaagaaaattggtatttcagatatgcagtgcctgtga

SEQ ID NO: 375975 - DNA, 1323 bp, Salmonella enterica
atggacattaatagtagagagtatgcttttgttatatggatgttaataatcattgctctgctttggtgtaaaaaggatattagagattctttttatcaacttatcaaaacatttttccataaacaaattttgacagtattaggatttgcggttgtttggacgtctatttgtattgtgcttttttatgaaattggtgtttggagtacagataatcttaagaccactttggtatgggtaattacatatgctttcgtaacaatctttgaaacacataaaataaagagcagtaagtattattttaaatcacaaatcaaagaaacgattggattaagtgctctacttacatttattcttgaactacaaagtttttcctttgctatagagtttataatataccctattatgctttttttagggttgctggctgtcgtagctaatacgaaaaaagaaacagaaaaaatcggagcgacgataaaggtagtgctaggcgttttcgttatattttattttgcccattcattttttgtttcaattatgtcgccttcggtaacgttttcttgggctaatcttactgaacttctgacgccagttttattatcattttcgtttatgccatttatttatatgctttacctttatcaagcttatgaaactaagttattaggattaaaaatatattttgacgatgaggctctgtttaattatgcaaaaaaattagcgatttgcttctttagaacagatcttgatgctcttaatcgctgggtaagaaacatacatattaatgaaattaagacgaaagaaggaattaaggcaagtttaaaagacgtaaaattacggaaaaaaatcgaatctaatccacccgaagtagataataaatatgggtggtcaccattcttagccaaagattttcttgttggaaaaggagttgacaccaatgattatcatttcagttttgatacttggatatcatgtagtcatatgattgagattggtaatgatggtttatttcgtgatagtgttgcatattatttatatggagatgaatatgctgctaagaaactcaagttaagagctaatataaataattcacccatatcaaattgttcaaaaaataccatttcattgcttgcggaagaattaatatcaaaagcattaggggatgatgactttaatattaatgagctatttagtaagatcccagttatgataaagaaagataatcgctatgtgtctattaccaaagaggattttgcaagccagaatggtgggtatactttagaagttgttatagagatcgagggttattcttcaaaagatcactaa

SEQ ID NO: 375976 - DNA, 1842 bp, Salmonella enterica
atgattgaagttttaaaaaataactatgaagcatttataattcaaaactataaattcaatcacttaggtttatttcatgacgaagacagtatttatgctgtaatacagaattacaaagaatctaatactacgttagatgaaatacaagaactttacaactacagatttaaaaccgcaggtgttccgggaccaacgtttacagaagaagtaaaagacaactatataaaaatagatcttagaaatacatatgaaaaagtaagtttatttggccaaccatttaacgcattcgaatttaataataacatacgcatagccataccatctaaatttcatccttttcatgttgacatgaagtggtccgacaacagttttacatttaccttcaataaagaacttactcctaatgatattgatgaaatcattttaatatgtgaaagcttaggtttttatggttataaatacaatattaaaacagaccatgaactacctgattataatcatcaaataaagaaaagtaatacacaaggaaatcttacattagttgcgagtcaataccttaggaataatcaacctaaagaaatcttggagaaatatgaagaggatcaagacttttggacagaaaaaagagccaatattttttcagatgtcaatctaaccaaggatgaatgtcttattgattcattcagaaagagtcaaaacagatgctttgtcgatgccagtgtatttccacgaaataacataagagaatatatatcactgtatgacactgtaatcattgcaattccattagcagattcacccaatagtcagagtttttatgacatttttaaaataagcaagattgagctgttagagttagttcgacgtggacgtataaaattcgtcgcattccaaaatctccagcggtatgattcaaattttttggcggatgttctgtctgttgatccagaatgtgtattattttcaagaagattagccaccgcgacattattagcaattagagaaaaaacaggattatttggattcgcatttgatagcagcactcaatataacttattgaaagaatgctacaattcaaaagtcgatgcacttaaaatattagcagagtcgttatcggaaaatatagcattttttgagtatggcataaatcaaagaggtgcattgggtattagtcaattttgtggggcaagctttgcagcccaaatatataaatcacgcggtcgcgattatggtattgagctaatgacaagcgcaatgtcacttgagttctcactagggctaggggcacatcactttccctttgagcacacaggttattctgaggtaaatgcctgtaaaatccttaatggcatatataatggagttcagcaatcacaaaatgaacttcgagaaatggagatacagactttactatcaaatattttcactattaataacgacatgaatgttctcgagttagatgacatcttaagcaaatacagtcgacgtatgatcccacaaatattacaagagtatgcccatctgacacctgaagaattaagctttaagatatactctctaaataaagatattaaagcaattgaaaagaggaagcaaaacttgtctattttagacttgtcaggttttgccccagtagttgcaggggcagtaatggagtataagggactatcgggagcgggttatattgcgttgctaccatggattttcaaattattaaaagtcaccaccaataattcaaagatattcagcaatgaaatatttagtaatttagaagctttaactttaaatactccaagaaacacaatgttggtacataaaataagacaagacatgcctaaatag

SEQ ID NO: 375977 - DNA, 876 bp, Salmonella enterica
atgtcgcgactggcgcaggatatgaaaaaactggcgcaccgcgcaggtggcagccacaaaaccgtccacgaccgcgaacagatggcgcagcgttttgcccgtcatttgctggcgcagaatattcaggtcaccagcacctgccagctcaaagccagacacatcgcgggatatattcatgaatggctggcgcagggtatttctctgcgaacgctacagaatgagatggcaatggtgcgctctattctggctgaagccggacgcacacaactcagccagtcagaattaatcagcaaccagtcgctcggtatcagtggtgccagctgtgacgggacgcaccgggccattccggatgcactttaccatcaggtactggaccgggttcatcatatcgacgcaggcctcgcagccagcctgcaactggcgcgggtgatggggctgcgcggtcaggaagcagtacagtgctgccagtcgctgaaaacctgggataaacagctggaaaaaggggctgaacgtctgccggtgatcttcggcaccaaaggcgggcgaccacgcatgacacaggtgacggaccgggaagcggttcgtcaggcagtgaaagaggcgcttgggattgccggggagcgtaacgggcatctcattgacaagccggatctgaaatctgcaatggactactggcacaaccatctccgcgataccgggctgacgggggaatactctccccactccctgcgctatgcctgggcgcaggatgcgatccgctattacgaagagcagggtctgagccataaagaggcgctggcggtaacttcaacggatctgggccatggtgatgggcggggaatatatattgagcaggtatacgggtatactgattga

SEQ ID NO: 375978 - DNA, 183 bp, Salmonella enterica
atgctacgcccgcaaaagctcgctaaagggcctttaaaggcctttaagggtaagggagataagtgcgccattgtggctgtcaattcgttttgtttagctcttcctgattttcttcttgcctgggagaactggcatattttttcgtttctggatccagaggagctgcgtccggcatcagagtaa

SEQ ID NO: 375979 - DNA, 1680 bp, Salmonella enterica
atgagtatcttcgaggcgcattttcgcaggctgcacgcccgctacggcgcaggtcagacgcacgaattacagatgcaggagatcgccgccatcttcggctgttcggtgcgtaattgtcgtattgcgctaaaaaagatgcatcaggaaaaatggctcgactggcagccccagcgcgggcgcggcaagcgctcacggctccatctgttaacctcgccggaaaagctgttcagccagaacgtcaataagctgctggagaagcaggattacggcaacgtgctgcggtttatcggcaacgacaagtatctgctggatcgcctgagcctgtggcgctttggggtacaggataaaagcagcgaaacgcgggtacgcatcccctactatcgcaatctggatccgcttaacccactcgtccccctgcggcggaccgaacgccaccttctgcgccagtgcctgagcggactgacgcgctatgacgccgttcagggcaggatcgtccccgatatcgcccactactggacccataacgaggactttacccgctgggagttctggctaaaatccaccgcccgctttgccgatggctgtgagctggatgccagcgccgttcagcgctgcctgctcgccgccagccagagcccgcagttcgcgccgattttcagcccaatcaaaaccattaccgctgacgccccctggcatctggtaattgaaacgcatcatccggtcagacggctcgactgcctgctcgccacccagccgacgatgctgtttgattaccagcacggacacatccgctgtaccggcgctttccacctgcaggagcacagcgacaattttatggttttgcggcgcaatcaacactggcatcaggcgcgccccggactggatgagatcaccattttcacctgggctccggagcatatcagcatgagctttattcccctgctgcggggcgaagaggtgcaggatgaccgcccgctcaacgagcgtagtctggagcagagctgctgctttgtgctgctcgacggtgacggtgcctttgcagatgaggccggaagacggtttatcaattacctgctgcaacctgtcgaactcctcagccagacgcagcttcccgacgaatacgcacgcatcctctctgtggctcagggtatgctgccgcagtggaatcaccgcccggtagattttggcgggatcacagcgccgtttaacctgcgtcagccggttattatcagcacctttcagcaaccggaactggtggagcttgccggagcaattcgccgcctgcttgaacgctggcatattcgcgccgaaatacggatcgacgcatttgaccactttaacaaccagctgcgccctcccgcggatatctggctcagcaactttatgctcgataccctttcggttccggcatttctggaatggctagcttccaccgcgctgtttacacgactgcctgaatcccagcgacaaaacctgaacgcgctgttaccgacgattctaaacagcgacgatgaacaggcgttcgctaccattgccgcctttttccatgagatgacccaccagcgatatgtcattcctttgctgcatcactggatggaatttgcgactgagaagtcatttacctggcgggatttaaatacgctgggatggccggatttcagccaactttggctcgaataa

SEQ ID NO: 375980 - DNA, 1542 bp, Salmonella enterica
atgaaaagattcaaccttctgcaaatgttacaaagcatcgggcgatcgttaatgatccccattgccatgctgcctgccgccggtattttgctggcttttggtgttagctttcaggatcccaatattgtcgccagcctgccgtttctcggcactgacgggctggttcacgtgctgaagctgatggcggaagcgggcagtgcgattttcgccaacctgccgctgctgtttgcggtcggcgtggcggtgggacttagtgacgatcagggcattgccgggctgtcggcgatcgccgggtttttgattatgaacgtcaccatcggccagtttctggggatcacgcccgaatcggtggcgcaggtgcgtgactacacgatggtgctgggcatcccttcgctgcagaccggcgtgtttggcggcatcattatcgggattatcgccgcctggctgtataaacgctattaccgcatccagcttccttcatggctggagttcttctccggcaagcgatttgtgccgatagtgacctccttcgccgcgctgtttgtcgggctggtgatggcggtggtctggccgccggttcagcatctgattaatggcctgtcgaataccatgacggtgcaggggccgggcgtgtccgccttcctgttcggttttgtcgagcggctgctgatcccgtttggtcttaaccatgtctggtggccgacgttctggctgcagtttggcgagtacgtgaacaaagccgggcaggtggtgcatggcgaccagcttatcttctttgcccagttgaaagatcaggtgccgattaccgccggaacctttatggccgggctgacgccgatcaagatgttctgtattccggcgattgcgctggcgatctaccgctgcgccagcccggaaaacatagcgcgtgtgaagggcattatgctctctggcgcgatcacttccatcgtctgcggtatcaccgagccgattgagttctccttcctgtttgttgcacccgtgctgtatggcattcacgccgtcctggcggggctggtgttcctgctgatggagtggttcagcgtgcacatcgggctctctttctccggcgggcttatcgactatctcttctttggcgttctgccgcgagcgcctcactggtacatggtattcccggtcgggctggtgatgggcgcggtgtactacgtcctgtttacctttgccatccgtcgctggaatttgctgacgccgggccgtgaagtcgaagaaaccgctgtggcgcaggaaagcgaacagaacgacctggtgagcggcatcattctggcctatggcggattggggaatatgaccagcatcgaagcctgcatgtcacgtctgcgcattgacgtgacggataagacgctggtggacaaagcgctgctgaaacagcttggcgcggcgggcgtcgttgaggtcgggaacaacattcagagcgtctttggcatgaaatccgaccggctgaaagaggcgatccgcgcgattaaagcgcatccggtttccggacattgtgaacccatacactaa

SEQ ID NO: 375981 - DNA, 843 bp, Salmonella enterica
atgaaacagctacaccacagcggcctgccgctgtatctcgatgatgatggcgtaatggcgctgaaaccgccgctaaactatctcggctttggccgcaaaagcgccgggcagatggcggtggttttaccggagttcaccgaagggctgcgtaatgaaccggcttacgatgtttatcgcggtctcagctttgcggaggatcaggaacggcttgctgctgaccagtatcagtacgacatcaccatcatcatgccggggacgattggcaaggagcgtaagaaaaccagtggccattatcacggctataacgacacgcggcgcaacacccatccggaggtgtatgaagtaattaagggtgcggcggcgtatatcctgcaaaagtcgccggattttgccgccgcgccgcaggagctggtggtagacgatcttatcgtggccgtcgtgaaggaggggcagagcattatcgtgccgccgaattatggccactgctccatcaatatcggcgacgggccgctggtgttcagcaatctggcgtataaaccctgtacggttcactacgacacggtgcagttttaccacggtatggcctgctacatcgtggaggagaacgggcagctctgcgtgcgcaagaatcactactacccgcgtgttccgcgcatcaaattcgccaccgtcaaagagaacccgcatcttggcatcaccttcgatatgccgctttaccagcgctaccgcgccgcaccggaacgttttcattttctggggcatgtcgataactatgtccgggaaatcatggggatgctccagtatgaggatgatttattcccgctctgtcaggaggacgcatga

SEQ ID NO: 375982 - DNA, 567 bp, Salmonella enterica
atgatggaaacgcaatctgttgcaggcgttgcctgtagcgacctgaatcaggcgatgtcgcggattgatggcgctgcgctggcgcgtctggagcaggccattgctgacgcgaaagcggtatttgtttttggcgcagggcgttcgctgttgatgctgaaagcttttgcgatgcgcctgatgcatatcggcctgaaggtgcatgttgtcggcgatgtggtcacgcctgcgctgcaaaaaggcgacctgctgttactggcgagtgcatcgggtgaaacggcttcgctggtgaatgtggcaacgaaagcgaagcaactgggtggcactgtggccttgctgaccattttccccgagtccacgctggggaaactggcgggggtggcggtcaggatcccggcttattccgacaaactgccggatggacccgagaatgtgaaaggtattctgcccggcggcagcttgtttgaagaggcggtcatggtgctgggtgacgccatgattgtgaatctggcgcagtcgacgggatatcgcttaaccaaaggctttgcgctgcacgccaacctcgaatag

SEQ ID NO: 375983 - DNA, 636 bp, Salmonella enterica
atgaaattacagcttgccctggacgagttaaccctgcctgaagcgatggtatttatggataaggtggttgatgacgttgatattattgaagtgggaacaccctttcttattcgggaaggcgtgaacgcgattaaagccattaaagaaaaatacccgcataaggaagtactggcggatgcgaaaattatggatggcggccattttgaatcgcagctgcttttcgacgccggggcagactatgtcacggtgttaggtgtgaccgacgtgctgacgatccagtcgtgcatccgcgcggcaaaagaggccggaaagcaggtggtggtggatatgatctgcgtcgacgatctccccgcacgagtccgcctgctggaggaggcgggggcagatatgctggcggtacacacaggcaccgaccagcaggcagcagggcgcaaaccgattgatgatttgataacgatgttgaaggtgcgccggaaagcccggattgccgtggcaggcggtatcagtagccagactgtgaaggactacgcactgttaggcccggatgtagtgattgtgggatcagcgatcacgcatgcggcggatccggcaggtgaagcgaggaagatttcacaggtgttgttacagcatcactga

SEQ ID NO: 375984 - DNA, 1152 bp, Salmonella enterica
atgtccctccctacaaattttaatgatattcttcgtttttttgaaaaagattacgatacagccaaagaagataatgctttaagtgcacgcggccaatttctgcaactttacccccttaatcacctaaaaaaaatgacgcttgatgactatgtcatcggcaaaggtacagcttcattttgtgcttgtgttgaagtaaaaaccagaacatgggcaaatatgcaaggtgcgacggcgctcaaatttggtatttattatggaaaatcaaaatcagatccaaccgtccgctatcgttttactcagaaatttggcgatgatgatagtactaataaagaagttttcgctaatgttaaagacgctttactagacctaatacagtcagggaaagaattagattttagagcgattgacgagaaccccctatcccaaatgtttaaggctaaaatattgagcctttactttccagaacactttataaacatttgcagcaaagatcatcttaaagaaattgctatggaaatgggtataaaagagcaacagtttattagtaaatatcaacatttgttattcaagaaaaaactagagcataaaatcacccgaaactggagcaatccaaaatatatgtccttcctttatgcccagttcatacgtaaggatcttagcagcgctcctgctgtgatagttaaaaaaccacaaaaaagaaaccatcccgaagtcaatttcgaagaaataacggacaatcgtgatttaataggcaaaaaaagcgaagaatatgcattaaactgggaaaaaaaccgcctaatcggtctcggctattcaaaactagctgaggaaatagatgatcgccgtaatcgtccaacttatggttacgactttctttcttttaatgccccaggtgatgagcgatacatcgaagttaaatcaattggccgggatggaaaagagggagcattccgttttttcctctcaggaaatgaactcaccgtttctaatttaagtaaccacagtaaaaactattatttttatcttgtacagtatgggaaagatggagagccatgcaatctatatgtaaaacatgctcaagatctttacactaatagtgaaatgtccccttgtgcttacgttgttaggttcgatctggaagaacctgcttaa

SEQ ID NO: 375985 - DNA, 1014 bp, Salmonella enterica
atgaacaaaatcagagccgccgtggtgggtgcaggtatctacggcaaacaccatatgaacgcgtaccgccataacccggacaccgtgctggttgccatctgcgacaccgatacagaacgttgtgacgaccttgccatggcgtacgggatccagggctacacacgactggatcggttactacagcaggaggctattgatatcgtctcggtggcgacaccggatccgtaccataccgaatccatcctcaccgccctgcgccacggtcagcatgtactggcggaaaaaccgctcgccacctcagtacgcgagtgtgagcttatcgtggagatggcgcagcagcgggacctgctggtcggcgtcgatttccacaaacgctgggacccggcagtaatgcgcattaaagccgaactggaaaatccggagaccggatgcatcctgcgcggccatatcagcatggacgacgtgataacggtcccgacgcagtggctgaactgggcgggcgcaagctccccggtgtggtttctcggttcccactgctttgacctggtgcgccacctctccgggcaggaggtggtatcggtgtacgccgtcggacagaagcggctgatggtcgaatgcggcctcgacaccttcgacagcgtgcagagcctgctgacaatggccgacggcagttcgtggggggtggaaaactcatgggtgctgccggagggctttccgaaggacaacgacgggcgcatcgacattctctgcgaggcaacctatatccgcagtacttcccaacatcgcgggctggaaatcaccacgccggccttgacgctcacgcccaacagctatttcatcaactaccgcaacggcgttgccagcggctttggtatcgacccgatcaatgattttgtgcgggcggtcagacataaagccccctacccggtcaccgccgaagacgggctggcggtgagcaggatctgcgaggcggtacaccgcagccttgagagcgggaaacctgaagatgtttaa

SEQ ID NO: 375986 - DNA, 981 bp, Salmonella enterica
atgaacacggtacttattcctcccggtcccggcggctacggtaaagggctttggctgcccgttgccagcggcaaaaaggtgctgtcactgaccgggcgcgagattcatccggtggcgatagaaatcggtgcgctcactgaatcggaagtggtgaacggcttctccgatatcccgcctgataacgacatcctgtgcgtggtgattaactgcgccgggtccctgcgctgcggcctgtatccgcagaagggcatcccgaccatcaatgtgctgcccacctggcgcgcggggccgctggcgcagtttattagcgaggataactacgtctccggcgtgacgatagagcaactggttctggtggatacggccgaagcgccggacggtgaaccggagccagtgtctgtcacggcaccacggattatcaccactccgccgcctgcacgtggcgcggaaaaactggttcgcatggtcgagcgtaccggcaccgccgtcggacacgttatcgccctgctgtttgccgccagccgtgaggcggtggacgtgtcgctgcgcaacgttatcccgtttatggcctttgtctcactgctgattgccctggtgcaggaaaccgcactcggcagcctgattgcccacgccctgacgccgctggcgaactcgctgtggggactggtgctgctgtcgctcatctgcggcattccgtttctctccccggtgctcgggccgggggcagccatctcgcaggtcatcggcgtgatgattggcacccagattggcgcgggcgcgatatccccggccttcgccctgcccgcgctgttcgccatcaacgtgcaggtcggctgcgacttcgtgccggtaggtctttcgatgcaggaggcgaagccggagaccatcgcgaagggcgtccctgcctttctgctctcacgtcagttaacggggccgctggcggtcatcatcggctggctgttttccctgggcttattctga

SEQ ID NO: 375987 - DNA, 375 bp, Salmonella enterica
atgatgatttactgcgcacgtattactgccatcgggctgtttgtcgccgacggcctcaccgacaagatgctcatcaccttcgacagcaacgggccgaaggactgtctcgattactcgctgtcgctggagccgtcgttccgggaagagagcctgatgatactccccggcgaccgcctgctgctggcagggcatgattatctggtgactgccgtcggcaagggggtacagcaggcgctgtttgaactcggtcatctgacgctggtgtttgacggtgacctgaagccctgccacaccggggcgattcatctctccggcccggtgccgaaactccatgacctgcacggcaatctggtgattgaggagggacggccatga

SEQ ID NO: 375988 - DNA, 522 bp, Salmonella enterica
atgtttctggtctccctggctgaaggctttatccacctgttccaggccgcaggcaaaatctttctcgacatgatgaccgggcttatcccgatgctcatctgcctgctgctggccatcaatttcctgatgaagctggtcggtaccgtcagaatggagaaggtcgctgccctgctcggccgctcgcgcattctcacctacggcgtgttgccggtgctcggctggttctttatgagcagccccggcgcgctgacgctcggtaagctcttacctgagaagagtaaacccggctatgaagatgcgctcggcaccaccgcccatcccctcaccagcctgtttccccacgtagtgccatcagagctgtttgtctggctcggcgtggctgcgggggttaaggcactcggtctgcccgttacttcactggcgctgcgctatatcgccgccgccatgctaattggcctgatacgcgggattatcaccgagtacctgttcctgcggctcagcaggcgggggaatgcgccatga

SEQ ID NO: 375989 - DNA, 285 bp, Salmonella enterica
atgaaaaagtcaacaaccaaagactggcaccccgccgacatcgttgccgccttacacaagcgcggtaccagtctggcgaagctgtcgcgggaagcgggactggcctcgtcaacattgtcgaataccctgacgcgcccgtggccgaaaggcgagtggctgattgccatcgcgctcgacatgcatccatcagaaatctggcccggccgttacctcaattccagtaacaaacgtgaaccccgaaaaccgcttcacccgatgacaacaaccgacaactccgggacataa

SEQ ID NO: 375990 - DNA, 291 bp, Salmonella enterica
gtgattggtaaaagattaaagatttcaagagtcagggctgatctgacgcaagcggaactgggtgcactcgctgggctggatgaagaatccgcaagcgcgcgtatcagttcgtatgaaaaggaagtccatgcacccgatttcaaactcgtctgtaagctggcagcagcgcttgatgtaccggaagcgtatttttatgctgttgacgatgagcttgcagaattgatcctccagtatcaccgttttaagaaaaataaccccggaagtacattgatattgtctggtaatatatga

SEQ ID NO: 375991 - DNA, 867 bp, Salmonella enterica
atgaacagcctccgtgatatcaccggtgtttcagactggatatctggaatgcttttgctttttagatcaccaaaatatagcaggaagatttttttcactctagaaggagaaagtgatattagatttcttaatactcattttgcagatgagagaatccattatgattcgccgtgtagtggtaaaccagaagtaataaatgctgtgcaattattgcgctctcatggaaaacaaaacgtatatggtttatgcgatgctgactttgatattttagaaggtaacagctacgaaaacattcattttacggactgtcacgatctcgaaatgatgttaatagaaggtggttcatttgacaaatttatttctgagttcttaaagacaagtatacttagaatacatactcttgaagatatacgaaataatcttaaagaatctataattgacgtgacttacaaaataggaatactaaaatggcttaatttcaaaaataatttattgttaatgtttaaaggaatgaaatacgataacttcataacctttgtggactttagtgcgaatatagacatagataattacattcagcacatcctcgacagaagtcctcgaaaacctccacactgtgatttcaattttttgaaaaaagagtaccaattactttataacaaacaagcagattataaatatgtttgcaatggacatgactttacgtatatcaccatgatggcctttcactcagaattttcccgtgataagaatataactcaagaaaaagttgaatcacatttaagaatagcatactcagcaactgcatttcaaagaacaaatatttataacgaactttcgggcttaatagatagccataatatttaa

SEQ ID NO: 375992 - DNA, 1170 bp, Salmonella enterica
atgcttttaaagataattgacaacattttaaataaaaatatagattttttctttgatttgcgatttgaagaaataaaatttgaacttgacaccatattactatgtatagagaaacaaaaaaataagaatgttgcagttacggtagtcgattatgtaaacgataaaaaacgacaggaagtattcactctaaataaaaacaaagaacttgacgtcgattattttgatgaaatatataataaactattaatctgtgacaacatagattctgatcctatactaaaatcttacaatcatgaggaaatattaaattactataaaattaaaaaaataaaacttcataaagaaaagcctcataaaagtgatttcttggataaatccattcctaatgcagagttaacttttatcaaagcgcaaaggatagagaatataaaaaatgaaaaatcagcaatcgagtcacaagcaaatttccttcttgagttgataaaaagagctgctgaggaatcagcacaaataagccaaagacttgactccacatttccagcaagattatttgatagcattaacgaaaatatatcttcaacttctatcaatgacagattgataggcattcagagaaaaagagaactttttatgaagttcgggataataaagtctgaagatacttttatccctagaaaattcagcaatgcaacattaggaaaagagtactcaaccgttttaaatctgtatatttcagatgctttagaaaaactatcaccttatgaagaattatttgaaaaaataaatttatttgttaatttattgaacgaaaaaatgcttgcatttaaagaaatcaagatcagtaacgagcatggattttattttcaaagtgataatggagaaagaatatcattaagtaacttatcttcaggtgagcaaaaccaaatagtcatctattttgatcttatattcaaagctaaacaaaattcagtaattcttattgatgaaccagaaatctctttacatgttgcttggcaaaaagaatttcttgattcaatagcaagaatacaaaaacttaatgagttctctaaaataattattgctacacactcgcctcaaatagttaataataattgggatataacttacgatttattcgagaataacaataaaaacatggagggacaatga

SEQ ID NO: 375993 - DNA, 2070 bp, Salmonella enterica
atgaaacgcgcgccctttctctgtaagcagtctccggaccgcacgctcgaagtggtgatccttgccggaagcctggcatgggaaacctcacgcgtgtggcgaaaagatcccgaccgggaagatgatgttcctccgatggtactcggcccgaatgaactggccgatctgagcaatctgaccattatcaggcccgacacgctctacgtccgggtacttcgcaccggcgatatcagtgaagaagatctgctgaaaattgccgtaaaactggcgcacgcgggtgtgcagatggcccggctgatgagccctgacggtgagttactggagaactggaccgggcagcttgaacgcctgcgacaggaaaggccttccgatatcctgccggatcacttccgcctcgatgaagaggcgctgtggtttgacaagctcaccgaacggcgcgacggcgaaagcgacgtccagccccagcgcatctgttcccctctgcgcgtcaccgccatcacctgcgacagccatgacggcagctatggccgactgctggaatggcacaccaccaccgggcagttgcggcgctgggccatgccgatggcgatgctcagcggcaacggcgaggagctgcggcgcatcctgctggagaacggtctgaccaatatctccacccgccccgccctgcgcagcctgctgtgcgaatacatctcacggtcactccccggacgccgggtcacctgcgtggagaaaaccggctggcacaacggggtatacgtgctcccggatgaagttatcggtcccgatggcgacaatgtcatccttcagggcagccactacctgactggtggctttgcgcaggcagggacgctggcagagtggcaggagcaggtcgccgcactctgtgcaggcaactcgcgtctggtctttgccgtctgctgtgcgctggccgccccgctgttgcgcctgaccggaacgggtggcgggggtttccacctgcgcggtgagtccaccgatggcaagaccacggtgatgaaagtggccgcttccgtctgcggtggcacggattactggcactcctggcgggccaccgggaatgcgctggagggaattgccagtcgccacaatgatgccctgctgccgctcgatgaactgcgcgaagtggatccgcgtgaagccgggatgattgcctatatgctggcaaacggccagggcaaggggcgcgcccgcaccgacggcgaggtacgcaaccgcaggcactggacgctgctgctgttctccaccggggagctgtcgctggcggaacacaccgaacgcgccggggagcgtatctacgccgggatggacgtgcgcatggtacaaatccccagcgacaccgggcagcatggcgcgtttgagcaactacacggctttgccagcggccagcagttcgccgataccctctgcgacagggtggcccgctttcacggcaccgcctttcgtgcctggctggccttcctcacccacgaccaagacgccagcaccacgctagcgagagagttacttcgccgctaccagaacgccctgatgccggacaacgctggaaaccaggtgcagcgcatcgtggcccgttttgccctgctggcggcggccggagagatagcgacgctgcacggcatcacgggctggcagaaaggcacggcgtatgaggcggtgcagatctgcctgcacgcctggctgaacgagcgcggccatattgccaaccaggaagatgaaggcgtgctggcgcagatcaaacggtttatcaccgcgcaccagtacagccgctttgcctcgtgggatggcccggaccgcccgctgaatatggcaggctttcgccgggtggaaaaagatccgctgacgggcgaggaacacacactgttcttcatcctgccggagggctggcgggaaatatgccggggattcagtcccgccagggcggccagattatgccaggaagcagaatgcctgcagcccggcagcgacgggaaataccagtcgcaggttcgcctgccggagatcggcaaaaccagggtttaccggcttacctcccgcatcctcagtatctga

SEQ ID NO: 375994 - DNA, 216 bp, Salmonella enterica
atgaaaatccgtgctgacagtaacgatgcttttcccgaaagcggcaacgtgcgtatgcggcaggtggtccagtttctggcgatgagtgaatcatcggtttaccgcctgattaaagacaccgactttccccgccccgtccacctctcttcccgactggtggtcttcgatgctgcggaaatccgtcagtggcaacagcgccgcaccgtcatccgttaa

SEQ ID NO: 375995 - DNA, 813 bp, Salmonella enterica
atggatgatatctcattatctattgctagaaacatgtttcatctccaagtctatgagtctgacggagttcgctttgaggacttgttttcaaaaataatgtactataagtcgccagattttcagcaggtgaagccttatggaaatattggagacagaaagaatgatggttttattaaggggcagggggtatattatcaggtgtatgcaccagaagatgcatctaataatgtactagctgctgttaataaaataaaagatgattttgaagggttaagggattactggcatgatatatgtcctattaaaaaatattactttgtcttaaatgataaatataagggttccttaccgcagttgcacaaggaattaattgttttgcaaagtgattttaacttaattgatactggagttattgtagcgaaagatcttgaacgtgaacttttcaacttaccagatgacatgattcgttcagttgttgggcacctgccagacattgatcatgaagaatatatgtttgtatctggctttacttgtttcatctctgcttggattaattttgaaaaaattgcaaggcataaggttttttcggctaaacaacctaatcgccctctttttatagggaaagtagtcaatgctttagtaaaaaacaaaataatttctaggcaagatgcaacttttattaaaaaaattactgaggttagaaatagtcttgtacatggggtttcgatgttagtccctaagaagaatgaaatcgatatgttaattttcattactgaaaaaataaaaccagctggtgtatgtaggctagattaa

SEQ ID NO: 375996 - DNA, 1140 bp, Salmonella enterica
gtggaaaacgataaggtgaagttaggaagaaatgataaatgctggtgcaaatcaggacttaagtataaaaaatgccatctcgatcgagaccgtgaaatgccggtatctaaagccgaagccctgaaattttcaaagtctaattcgcagagaaaggcgtgttatgcaccagcatccatgcacgaagattgtgacaaacgtatcgttcaggcgcacacgctttctaagagcagtagccttaaggcaatcgccgactctagtaatcatgttatgggagtggtaatgaacctgccgagcctgataaaaaacaacggaagatgggttccagagaagattggtatcaatcaggcatccacttttaccggattttgtgcagttcatgacagaatattattttcatgtctagagaacgaaaaatttacaggcacggatgagcagtgttttgccctaatgtttcgttcgttatctaaagaaatttacgccaaggaggggggaagacggtcttccgattttgctaaaaatgccgataaaggaaagttacaggccgaacaagtctatattcaggaatttgtcagcctgcatcaaagcggtttgaatgcagcaataactgaactaaataatcttaaaactagcctcgaccgcattctgcttaacagacagttttcagaaattgaaagtgttgtcttcacgttttcagaaccattacccattgcggtttcgtcaattctttcaccggagagggattttgatgggaccaaaattcaggatttgaacgatcttaccgtgtcggcggaacaggtctgcttcaatgctttttccagcgaaggtaagggatatgtagtgttcagttggctgggaacttcagcaattatcagacgttttgtgcgatcactaattaaggttcaaactgacaggattttcaacaccctcctgtattttttcttcacaaaagctgaaaatacatactcatctcctgagtggtgggacagcctcagtgacaaacagcgagagaatatcggcaatatgattatgtcgggtgttgacttttttgataattctacattacgcgtcgatcattcagttgattataactctgctgcgcttgcagagataagatacagcaacagcgagatttccagttga

SEQ ID NO: 375997 - DNA, 639 bp, Salmonella enterica
gtgaccagtcccattcgtcagaatctgtttgaacgggaatgtgatatgccgcttctggaagcgcggcatctcgcccttctgcttctaggcctcgatgcttcccaacctgcaaacgccctgccggaagaacatcaggaaaactaccgtatcctgcacgacgccatcagccggaccattaaggcaacaggcatggtcagtgccccggcgaacaagcgcatgttctatgccgatgagatgtttgccctggcctggcggcttattgatgacgaactgacgccgtcagaagtaaaagaccgtagcctgaaggcggtgatgaaactgtcgcgtaatagccgtggccgcaagtggctgaagacgctcggcgacgacgcactaccggatctcacggcttcaacacaaccttccctgcgtggaatgcataagcgcgacaaagcacgggagaatactgcccgactctgctggctgctggttcagcttctggttgaggagactgatgggcgttatgggacgtcggataaaccggcttctgaccagatacttcgaaagctgaagacgctggctaaggaacaggaattgccgtcggatgggcttggacgggggacattttatgaggtgttgaagatggaaagagaaaagtga

SEQ ID NO: 375998 - DNA, 1065 bp, Salmonella enterica
atgcctaaccaactgaaacccttaacaaatgtggagatcgctggcgcgaagccccgtagcacagactatgagctacgggacggtgaaggcctgtacttgctggttaagacttcagggaggaaggcctggcatttcgagtattatcatcccgtcaccaaaaagcgcaccaaaaccagccttggcccttacccggtcgttacactggccatggctcgcgaaactcgcacgaaatacagacgactgctctatcagggcatcgatccccgtcaacacttagcaggaatagctgaagaaaaacgcatccagaatgaatgcacgctggaaaaagttgcggaacagtggctcaaagagaagaaacggaccagcgatcttagcgaagatcacgccaaagatgtctggcgctcgctggagatgcacgtcttcccctctctgggtaacacacccgttaccgagatccgcccgaagatgctcaaggaacacctcaccccgctggaagaacagggcatcctcgaaacgctgcggcgagtcatctcacggcttaatgaaatcttccgttttgccatctccgaagagctcatcgaattcaatccggctgacaacctggtcgcccgcttcaagaaaccaaaaaagcagaacatgcccgcccttcaccccagtgaactgggcaggctaatgctggcgctacagaacgcttctatccgcaaggaaacccgctgccttatcgaatgggagctactgacctgggttcgccccggcgaggccgtcagcgcccgctggtgcgacatcgacatgaaaaaagcagaatggcgcatccccgatacctttatgaagatgaaccgttcgcacacggtgccgcttagcaaacaggcgctgcgcgttcttcagatcatggagcccgtcagccgccatcgtccgtgggtcttccccagcatccgcaaaccactggagcatatgcaccagcagaccgcgaacgccgcgcttatccgcatggggttcggcggcgaactggtcgcccacggcatgcgcagccgccaggaccgcaggcgcaggtcattttccccgtga

SEQ ID NO: 375999 - DNA, 993 bp, Salmonella enterica
atgtcgattaagaagctcgatgatggtcgttatgaagtggacgtaagaccgcgcggaacttcaggaaagaggattcgccgaaaattcaacaggaagtcagaagctcagacatatgaaaaatatgttttgacaaacttccacgataaagagtggcaggataaaccagcagacagaagacttttgtctgatttgatcgcgctatggtggagttaccacggtaaaaaccataattacggtgactcatacaaaaaacggctagaaaagattaaccgtgaaatgggcgaacccagagtttacgaactgacccgtaattttttaatgaagtatcgcgcaagcaggctacatgatggtgtgtctgccggaacggtaaacagggacttttgcactatgtccagcatgtttaggctgctgattgatatggaggagtttcatcatgaaaacccatttcacaaggtgcgtaaactacgcctagaaaacacagaaatgtccttcctgtcagaagaggagatccgggacttgttaatggcactcactggtgatgatcgtagggttgtcgtgttatgcctaaatacaggggcgcgatggggcgaagccagtaatctgaaagcagaacacgttatcagtaatcgtgtaactttcgtcaagactaaaactggccccgcccggacagttccaatttcacaagagatagctgactacatccttacgcgcaaatcaggaaagttgtttgacactaactatgaacgagttcgcgatgtactccgtaaggtaaaacccgacctgccaagaggacaagcgcttcatgtgttacgacatacttttgctactcatttcatgattaacggtggaaacattatcacgctacagcgaatcctggggcatacaactattgagcaaacaatgacatatgctcacttcgctccggactatttatccgatgctatacggtttaaccctatgcgcgggagtgtccagataatgtccaccaactaa

SEQ ID NO: 376000 - DNA, 306 bp, Salmonella enterica
atgaccaattcgtcaagtgcaggaaagaaaatccaattaattaggaaggcggagggattaagtagaagtcaactatctgaaattataggaatttcctacaacactttaactaattacgaagtgaaaggcatacagatgactgaaggcaacctcatgttgttcactcagcatccaagatttgaaaaatatacgctttggttaatgacaggcaaaacagcaccggcagcgggacaggtcgcgccgtctctctcccctgatgggcaagacgacaaaaaatcatcccactccacccagaaggctggctaa

SEQ ID NO: 376001 - DNA, 339 bp, Salmonella enterica
atgaaagagctatccgaaaatgagatttcattactggtgacaccagaactttttgctacctacataggtaaaacaccgtctgcgatccgaaaaatggcttctgctaataagttgccagttgtacgcatgaaagatcctgataacccctcgaaaaaagggggagaaatttatattcatcgtggcgaatgggatgattacgcagcttaccttgcgcaggctgcaccgcctgagtggcataactggaaaaaccgcttatttacatctgaaccaggaatctttaaggagtgggctaagcgagtttttacgacgagtaaaacaacaagccataataaaaaataa

SEQ ID NO: 376002 - DNA, 333 bp, Salmonella enterica
atgaaagcgaaatacgccacgcttattcgtagcctgttacgtacctatcgcgaacaggcaagtgctattgagaaggagtcattctctgttcatagcgatggtatccagttaatggagctaaatttaaaactggcgaagtgtctcgaaggtatgtctttaatggccaggtttaataatgaatttgaggattattgtgaacttcacgaaattactatgatggcttttaatgggagtattccggttgatgataatattccaggcctcatttcactcgcttcatgcactgtaaaaaataataaatctgctgtacaacttaccgccgttcaacgttaa

SEQ ID NO: 376003 - DNA, 570 bp, Salmonella enterica
atgaaacatttaatgattgaccttgagacaatggataataaaccaaccgctgcaattactgctatcggtgctgttctgtttaatccggaaacgggtgaaatgggggaaacattctatcgtcgtatcagtcttacaagtagcgttgattacgactgcacgatgggcgcagatacagtgttgtggtggctgcgtcagtccatcgaagcaaagagcgagattattaatgatgcgaattgtccgctggataccgcaatatctgaccttttccattttatctgtgaactcactgatgcacatcatttacaggtctggggtaatggagcgtcattcgacaacgttattcttcgtcatgctgcaaataaggtcggcttgttaagcccaatgtggaattactggaatgatcgtgatgtaagaacagtaagtgcactggctaaagctctgggactgaacattaataatattattaagtttgaaggcgtcaaacatcacgctttatatgatgctatccatcaggcaaaaattgtttcttatgtctggacgtacctcatgaaaatagccagtgtgaaataa

SEQ ID NO: 376004 - DNA, 219 bp, Salmonella enterica
atgctgaaagtgacctctcatgcaagtgaaagtgtcataaataaggcattttcagcgctgacggaatattacaacggaaaaaaggtttatcaggttattaagccgaatcattatttttctgttcatgtctcctatcgctggcgtctgcttagtaagaataagggcagggactgggaattaatgacgcatgagcgatataacaaacagtataaaatataa

SEQ ID NO: 376005 - DNA, 2658 bp, Salmonella enterica
atgaacgctacgatacaacgggacgttgtgcgccgccttgtccgtgactttgaatttaaagaaaaagataaatatttgcagcagggcatatgccctgcctgtcataaacgtgaattatttaccagtattgagaaaccctggattctgaaatgtggccgtgaaaataactgcggtcatcaggtcgttgttaaagagctgtattcggatatttttgaagactggtctaagcgttatcaggacacgcccgaaaccccacatgcggcggcagaagcctatctgcgtgaggccagaggactgaatacggaaccactgaaaggcagttttacccagggtgcatttgtgaaggatggtatgggctctgccactgtccggtttaagttgtcatgtggtgccatgtgggagcgtatcattgaccagccgcagcgcttcggaaaacaaaaagcgaatatcaaaggaagctatgttggtcactggtgggtaccgccttttattaacctgctggaagtgaacgaaatctggatcaccgagggcattttcaatgcactgagtctttgtcaggctggcttacctgcggtggcaacactgagcagcaataattatccgctggccgcgctggatacactggccaaagaattgggtgaaaaaccacgcccgcgccttgtatgggcgtttgatggtgataaggccggtacaaaacacacactggcttttgctgcgcgcagtgatgcagccggctggaaaacgcgcgccgcgcagccggtgaaatcatcgtcttgcctggactggaatgatttgttgctacgtgaccgtttcagtaaatcagacataaaaaattaccgttattatggcgatctcctgctggcgaaaagcccgactgaaaaagcccttcttatgcatcaacataatgaatggcattcgttttattttgagtatggctcacgtatgtactggtttgagctggatcttgaccggtacacacgcgcactggatcgtattaccaataccggaaccgaagtcatacaggaatgggaggccagagaaaaagctgttaaagagtccggatgtgtcacggaaattgccaactgctggctgactcccctgtatttccagcgttctgaacccacggacgagtcctggtattacgtgaaggtgaatatgccaaacagaccggctgtgaaagacaccttcacagcaaatcagcttaccagctccgccgagttcaaaaagcgcttgttgcatattgccaaaggggctgtgtataccgggagtaccaaacagctggataagtttattcagatgcgtcttcccgaaatcaaagaggtcaaaacgcagaattttattggttacaacaaggattattcagcgtggttgtttaatcgtgtggccgtttgcgatggtcggctgtatgaaatgaatgacgaggattatttcgaaattaaccatgcaagcgtaaaaagcctgagtcttacgcctgtgctggatctgaatccaaagctgaatgaatttaccacaggctggattgacgatatctggacggcgttcggtgaaaaaggatatgtggcgctggcgttctggctggggtcactctttgctgaacaaatccgcgaacgtgacaagtcatttccgtttctggagattgtcggcgaacccggaacgggtaaatcaacgcttattgagttcctttggaaactcgctggccgtgaagaatatgaaggttttgatccatctaaatcgacggccgcagcgcgcgggcgtaactttgctcaggtaagtaacctgccggtggtgctaattgaaggtgatcgcaccacggacaacgcgaaacagcgtgcttttgactgggatgaactgaaatcactgtataatggtcgggcatcccgcgcagtaggcatcaaatccaacaataacgagacatatgaaccgccattcaggggaagtattgttatcgcacagaacgcagatacagacggcagtaaggcgtttctggagcgtattatccatatctacactgacaaacgtggccagtctattcagacgcgacatgccgcagagcggcttgaacaaatccctgtcagtcgggtgtccggattcacgttactggcggccatgcgtgaaaaagaaattatggatacgttcagcaggagttacgaacgcgcccgtaatgaactggagtcagatgcggatattcgccatattcgtattgcaaaaaatcacgcgcagctggctggtctgctggatgcgctcgcgattgttgtaccgttgccggttgagcgcatagaaaaaacccgtgcagctatcactgcactggccgtggaacgctgccaggcacttaaaaaggatcatcctatggttcaggagttctgggagttgtttgattacctggatgaactggcaccttatggcatcaatcattcgtctgatgagaatgaaatagcggttaattttaaccacatggaggaagtcgccgctgcacaccggcagcgcataccttttaccttaacggaaatcaaaaagctgcttaaaaacggtaatgaacgccgtttcatcaggcagggaaccacacgcagcgcagtaagtgagcgtcataatcgcggtaaaggggatatgtccagaatgcctgagaccttccggtgctggatatttggtcgggggaaataa

SEQ ID NO: 376006 - DNA, 270 bp, Salmonella enterica
atgcgggtactgaaagtaaaatgtccggagtgcggggcaaaagcggttatcagaaaaaccaatcccaaacacccccatatttcagatatttactgcgcctgtacggatgtggagtgcggacatacatttgtactcaatctgacattctcccacacactcagccccagtgcgaagacaggcgatatgatgttacagaccatcattaattcattctcacctgaacagaagcaaatgacgctggatttattaaaagccagtctggccgcataa

SEQ ID NO: 376007 - DNA, 1020 bp, Salmonella enterica
atgaaaaaacggaaatacagggaacgccgcaccgttaccagacagcgccatatgagccttatcacgctgggtaagccagaacccattctgacaaccggcacgaactatacagacgtctggtatgacaatgaggcggaacactggacgctcccgattgaccggctggcgctggcgcaactggtaaacctgaacgcgcagcacggtggcgtgctgtatgcccgccgcaatatggtgacagcaaattatgatggcggtggcctgacgcatgagcaactgggcgcggccgtgtttgactggctgacgttcggtgatgtggccattctcaaggtacgtaacggctggggggatgtaatcgcactttacccgctgccggcactctatacccgccagcgtaagaccggggaatttgttgtactacagcagggtgaaccggtaatttatccgcctgaagatattatttttctcaggcagtacgacccgcaacaggccatttatggtcttccggattacatcagcggcatccactccgccatgctcaacggtgaagccacgatttttcgccggcgttactaccacaacggtggtcatacgggcggcatgatttattgcaacgacccgaatatgaccgacgaagtggaagaagaaatcattcagaagctggagcagtcgaaggggatcgggaacttcagcaccatgtttgtgaacatccccaaaggcgatccggatggcattaaatttatcccgattggcgatatcagcgccaaagatgagtttcagaacatcaaaagcatcagcgcccaggacgtgctgaccgcgcatcgttttccggcaggtctggcagggattatccccaccaacggagctataatgggcgatattgagaaagcggctaaaacataccgtaaagcggagattttacccattcagcgtatgttcagcgccgcagtggcgcaggaaagtgatgtaccgccccacctgtatcttaatttcctgaaagacagtgagctggaaggtgattaa

SEQ ID NO: 376008 - DNA, 1785 bp, Salmonella enterica
atggcgaaatacagtgaagaacttaaaggcgttgcgcgggcgctttatttaaaacgttataccccgcaggaaattgccaatgaacttaatctgcctaacagacgcattgtctattactgggcggagaaatattgctgggcggaattactcagtcatgaatcaacagaagacgcattaaaccgccgtattcagtcgctaacattgcgtgaaggaaaatcggaactggagctgcgggagctggacagcctcgtttctcacctggtgaaactgcgtgcacagcataataagcatcaggaaaagctggcagaaattaaacacactgaaagtgatgcgccggcgtcccgccagtcctgtggtgacgaaaagccccggaaacgcggcaaatacaaaaagaacgatatcagccatctaacccaggaggattttgaccgtttcgcgctggagcaccttttcggctaccagaaacaccttcgcgacaatcttcatcagcaaatcaggaacatcctgaaaagccgccagattggcgcaacctggtatttctcaatagaagcgtttgagaatgcggttatgacaggtgatccacaaatcttcctgtccgcctcaaaagcccaggctgaagtattccgcagctatatcgtcaacattgcggagcagtatttcggcgtggagctgaccggcaacaccatccgtttgtccaacggcgcggagctgcgcttcctgtcaaccaacaagaacaccgcccagtcatacagtggccatctgtactgtgatgaatatttctgggtacccaactttgcaaaattaaacgaagtggccagcgcaatggccacacacgacaaatggcgcaccacttacttttccacacccagcagcaaaacacaccaggcgtacccgttctggacaggcgaagagtggaagcgcggcgacaaaaaacgcgcacgcgtggcgttcccaacagagaaggagctgcgtgacggcggacggttatgtcctgatggccagtggcgctacatcatcacgctggaagacgcgatcgcaggcgggtttaacctggccagcatcgataagctgcgcaaccgctacaaccgcgacaccttcaacatgctgtacatgtgcgtgttcgtggacagcaaggacagcgtattttcgttctcccacgtcgaacgttgctgtgttgatccggatatctgggaggatcatgacgaaaacctgccacgaccattcggcaatcgtgaagtgtgggcaggctatgaccctgcacgcagcggggacacatccaccttcgtgattatcgcgccgccgatcgtggctggcgaaaaatttcgcgtgctacgcgtattccactggcagggaatgaactggaaatggcaggcggcgcaaattaagaagctgtttggtcagtacaacatgacctacatcggcattgatattaccggtctggggagtggtgtctttgaggatgtgcagcattttgccatgcgtcaggcggtggctatccgctacggcgtggaaacgaaaaaccgcctggtgatgaagatgattgacgttatcgaagacaaccgcgtggaatgggataaggagaagacggaaatcgccgccagctttatgaccatccgcagaacatccacggccagcggtaacgccatgacgtttgttgccgaccgtacagctgaaaccggccacgctgacagcttctgggctatcgcccatgccattgacaacgaaccattaaactttgaaaaccagcgaaaatcacgctggggcaacttagggaaagcagcatga

SEQ ID NO: 376009 - DNA, 993 bp, Salmonella enterica
atgtctgaattattcagcaatttggttttcttttttgaaaataatttcgtggatatacggataagcgacataaccgaattattccggaatgaagtgaatgcggaggctaattttattggcgatactgaaaaccgcagcaggaagggaggcaatatgtcaggttcacagctggcaacaaactggatttgtatcgctactgcgggtgaaacggttgataagcgggctattgaagagcaatggctactggatgccgctgaattatacgacccctctttgtatacggcgctgttatggccggagcattcccgtaattttgggaatatgggggaggtgctggaattaaaagctgaacgtgatgatgaaggtattttgcgtttatatgctcgtttatgtcctggtatttcgttacttcaggcgaacgccaacgggcaacttttatttttgtcgccggaattcacaccggacggtaatttccggaacaccggtaaaacctatctggaagggctggcagtcactgacagcccggcaggagtgagcaccacacggctacgtttcagccgcaccaaaggaaaacgcatcggcccgtataagccgctggcgtttgatgaagtcagggaatttaaaaaggaaaagggaatgtcaaagaccgcgaaaaagggctggcgccattttttcagtattgaagaaccagaagcgaccgcggagcaggaaacatcacagcctgatgctttacaggcgctcgctgaagcgctggatgcgattgataagcgtgtatctgccattgaaacccgtttgggtgaggcggaagaagctgtatctgatgtgcaggaagacgtggacactgttaaggaagtggtggacaccgaagactttgcgcgtctggtgggtaatctgccggagctggtgaagaacttcaccaagctgaataacaaagttacccagttgccggacaagaaattcagcaagggcaagaaaggcttcaatttcctgtaa

SEQ ID NO: 376010 - DNA, 1029 bp, Salmonella enterica
atgcaattaaatgcgaaagcccgtgagtttctgcgtcagtaccacaacgggctgcgtgaatcctacggtgcgaccgatggcgaccactggtttgcgctgtccgatccgaaagaaaccaggatgcgcaatgcgctgctggaagaatcatctttcctgaatctgttgacggttgctgatgttgaccagttacaggggcaggtggtaccggtcggcagttctggcctgtataccgggcgtgtgctggatggtcgtttccgtaaaaaggtgggcgtcagcggtaatgattacaagctggtcgaaacggattcgtgtgcagcactgacctggcagttgctttctgtctgggcaaacgccggcgatgaaaacgagtttttccagcgcgtccaggagttcaccaatcaggcgtttgctctggatatgctgcgtatcggcttcaacggtaaatctgttgcagacaccacggatgccgaaaagaacccgaacggcgaagatgtgaacaaaggctggcaccagatcgttaaagaatgggatggcggtaagcagattgtcactgatgcggttgtgctcgatggtgacggtaaaggcgattatgtgtcacttgatgcaatggcatccgaccttatcaacgccaaaatcccggcacagttccgtaatgacccgcgtctggtggttctggtgggggctgacctggtggctgctgaatctttccgtctgtaccagaaagccgataaacccactgaaaagattgccgcacagctgctgtctgacagtatcgccggccgtacggcttatgttccgccgtttatgcctggcaagcgcatgattgttaccacactgcctaacctgcacatctacacccagcgcggcacgcgtcagcgtaaagcggagtttgtggaagatcgcaagcagtatgaaaacaaatacctgcgtaatgaaggctatgccgtggaatatccggaactgtatgccgcatttgacgaaagcgcggtaacgattggggcaacggctgcaccgtcagcaggcgcataa

SEQ ID NO: 376011 - DNA, 699 bp, Salmonella enterica
atgcagttgtcaccggcacagcgacacagcgcgcgtattgcagcagaacggctgctgcgtcagcaacaatctctcgacagtgaaaccagtctgcacgtccagattgcggcactggaaaaggatgtggcagcggccgcagcgattagcaaccgtgcggagcgcatggagttcaagcgtgatgtgctgttgccccgctggatgccgaccgcacaaacctggctggaaagtgacagcatgcatcagaatctcgtttttgcctggtgtgtcatctggctgtttgataccggccagttcgatcaggcgctggactgggcggatgtggccatcgaacgggggcaggaaaccccggccgcgttcggcagtgcgttcccggtgtttgtggccgatacggtactggcctgggcggagacggaagccgcacaggggcaggatgtggagccgtatttcagccgcacgctgggaaacgttatgcagcactggaatgtgtatgagttcatcaaggccaaatatgtgaaatttgccggtctgcacctgctacgcgatgagaacggagagccacgcgcagcggcaacggaagacagggatgtattgctccgggcgaaggatttgctggagcaggcgaagggattcgaccctaaatgtggcgttggcacgatgttgcagcgtattgctgcccgtctgcgggcgcttgaaaaatag

SEQ ID NO: 376012 - DNA, 192 bp, Salmonella enterica
atggggtttaaacattcacttgggcaagcagtgaagatttctgtcagcggtgagaaagggcatgtgaaagcccgtgcagaatacacccactgctgcaatcagtatctgatccactatcaggctgctgatggccgtgcggttgattcgtggtttgaagaaggcgagattcaggccgcagtaagcggcgaataa

SEQ ID NO: 376013 - DNA, 453 bp, Salmonella enterica
atgttcagcggaactgcaattgattttgatgatgccattctgacgaatgatggcttctggccagacctgagcgtgaaggattttcagtcgcagcgtgctattcctgccgatatcgacgcagccaccatccgtcaggcgctgctgaccgcagccggtgaaatcaatgatgatctggtcagggtagtggcagattgtcgtctcagtggccatgcaagcgcggcggacgttccgggcgttgagattgacggtgaaaatctgttgtgcgcccgttaccgcaaggctgtttttgcccgcgccaaagctgacctgatgggcgaatttgcgtctgttggtcgccgtgaaagccatccggggcaggaaagcgatgaaacccgctccagtctgatagcggaatccacgctggcggtacggcgtatcaaagggctgaaacgcatcacggtggccatgatatga

SEQ ID NO: 376014 - DNA, 483 bp, Salmonella enterica
atgagccagcttaccgaattaacggattttctcattgcgaatatgcccagacgggcaatgcagggatttgacagccagatggatgaaatcgcattcatcccggcacagcgtgacaccgggctggggcagtatcgcattgccatcattcgttataacgccgtgctgacgtgggagcgttatccctaccgtgagtacgatcccaaaattctgatggcgttatttatgtcgtggctttgtcaggatgagcgggcgctctttgaggaaaccggcattgatgccgaactaccggaatttgatatagaaaccatcgaccaggaaaccgccattatggtggtgacgttgccaatggtggaggaactgaatctgatccccgatcccaaaggtcagatcccgtttgatggccagcgctggaggctggcaaaccccgaagtctggacggcggatgaggtgacggtgatccccgtcaatgagggggagggatga

SEQ ID NO: 376015 - DNA, 705 bp, Salmonella enterica
atgataaatggcgaactgaaccaggaacagttccgccagctacaggaggcgctgaaaaagctggatttgcctcctgccagacgtcgccggctgttgtggcgtatggcgaaatacggcgtggaagccgcagcaaagcgcaatgtgcgcaaccagcagtcaccggagggggataagtggcaggggagacagacccggcgtaaaggcaaaatgttgcgcaatatgccgaaacttatccgcatccgtgaaatgccggaaacggattccgtcaggttgtatctggccggtggccattaccggaatgcgaagggaaatctgcctgccggcgtggtgggttatgtccagcagaatggcatgagcgtaaccgtcaaccgcaggcaggtggaaggccgtgagcagggggataaacctgcatcactgcgacaggcgaaacgtctgcgtaaggccgggtataaagtcaggcgcggcaagcgctggcgtaagcccggttataaggaaatacaggaaaaaatgaccgccagacaggcaggtttgcttatccggatactggaggacaaaccggtcaaaacatcctggcagattgatttacctgccagggcgtttctggggataggtcaggatgattttaacagagcgctggcacgacagcttcaggctatcgggttcggctgggatgttaacgcgcaggatatcagggggagagcatga

SEQ ID NO: 376016 - DNA, 1128 bp, Salmonella enterica
atgacctggccaatcgtaaccgttaaccaggtaaaccagttactgggtgaaaccaaagaggtggaacgcacgttgctgtttatcggtacgggtaccaaaaatgtgggaaaaactctggctgttaatgcacagagtgactttaacgcgctactgggtgagggaaacagtccgttaaaaagtgatgtactggctgcactggcgaacgccggccagaactggtggggatttgttcatgtactggccgcagacagtgagccgggcgcgtgggtggatgccgtgaaagctgcacaggtttcctgttcggtggaaggtgtggtgctgtcggatgatgtggctgcaaaagagcagattaaccaggcggcaacgttgcgatccgaactgattgcaaaatacggtcgctgggtgtggttcattctggccgtacagggtatgcaggaggatgaatcacaggcggattatctgaaacgtctgtccacccttcagcagggtattgctgaaaaagcggtgcagctggttccgcgtctctgggggaatgaaccgggtgttctggccggtcgcctctgtaatcgcgctgttaccatcgctgacagtccggcgcgggtaaaaaccgggccgttactgaatctgggcagcgatgaactgccggaagatggcaccgggaaaacactggagctggccacccttaaagcgctggaagcgcagcgctacagcgtgccgatgtggtatccggattatgacggcttttactgggctgacggacgtacgctggatgtggaagggggtgattatcagtccattgagacgctacgtattgtggacaaggccgcccgtcgtgtccgtctgctggctatcggtaagattgccgatcgctccctgaacagtacaccgggaagcattgccgcacaccagacgctgtttgcccgtccgctgcgtgaaatgtccacggcggccagcattaacggtgtgtcatttccgggcgaagtgaagccaccgcaggacggtgacgtgaccattgtctggaagaacaaaaaggcggtggatatctacattgtggtgcgtacgtatgaagtaccactgcaaatcaccatcagtctgttactggatgcgagtctggaggccagcgcatga

SEQ ID NO: 376017 - DNA, 456 bp, Salmonella enterica
atgaccaaacgtatttcagggatgtcctttgacgtctacgtggacggcgacctgatccatattgaaaagatttcgctggatatcaccgacaacagcgccgcagctcagacacgcggtgtacctgacggctatgtcgacggcgatgtggccgcagagggtgaaattgaagtcagttcaaaagtgcttcaggtactgacggccaaagcccgttcagccggttcatggcggggcattccccctgtggacttccttttttacgccaaagccggcagcgaagaaatgaaggtggaaaccttcggtaataagctccagctcaatagtgtactggatgttgatccgaagggcagcagcgtgtccacgcataaaattaaatacttcgtgaccagtccgaagttcgtcaacatcaacggcgttccgtatctggaagcggaggccacggaaaacctgattggataa

SEQ ID NO: 376018 - DNA, 297 bp, Salmonella enterica
atgcaggactatgaaaagggatttattgcccttgtggttatgggggggctgattgcactggggaaactacttaacagtgacgagccgattacccttcgtctggtggccggccgtgtcattgtcggggccgggttatctgttattgccggcgttgctctttactttgtaccaaatattcatccgctggcattgctgggatttggttctggtctggggattctgggacaaaacgtggtggaagcatggttacgtaaacgtggatttgccggaattttgggcaagggggtgacaaagtga

SEQ ID NO: 376019 - DNA, 342 bp, Salmonella enterica
gtgacactgagcgaaaaacagcagttgtttaccattatggtggcaaatctgatccactgggcagaagaacacggctaccggctgacgttcggggaggcttaccgcacgccggaacaggcggcgctgaacgctaaaaagggtagcggtattaccaacagtctgcatacccggcgtctggcggtggattttaacctgtttgttaacggccagtaccagacccgcacagaggattacctgccgctgggcgaatactgggagtcactgggcggcagctggggcgggcgcttcaaatccaggccggacggcaatcatttcagtctggaacatgacggggttcgctga

SEQ ID NO: 376020 - DNA, 333 bp, Salmonella enterica
atggatcgtgtggtggcgggctggcttgtgacggttgttctggccttttgggcaggctggaaggcggctaactggcagcgtgacagtatcgatctggccatcagccggtcagccagcactaccggggaaacgctggcgagcgtggccagtgaatccgggcgaaaactggaagaacaactggaggctttgaaaaatgcgccgccgcgtgaaattcgtacggaggtggttaaaccggtgtttactaacgtgtgcctgtctgatgactttgtccgcatgtacaacgacgccgtcaccagtaccgaacgtacgttatcaggaaaacctgaaaactaa

SEQ ID NO: 376021 - DNA, 258 bp, Salmonella enterica
atggaaaaaattaatctggttgtatgtaagaaagaaattacgtttgaaccaaatcagacggcttataataaattcatcaatgaaatggcgatggataataaagtggctccagcccatagttatcttatgcgtattgttgtaccagagtgtaaagaagcgctggaagatattctgaagcgtccgggggcagcgcttcaacttgcagggaaaatcaatgagctttatgcgccagaactggaaattgaagtaaaaaactga

SEQ ID NO: 376022 - DNA, 726 bp, Salmonella enterica
atgtggcgtgaagcgcgtctggcttttacggattctctggctgcgctggattgttccgtcgttccggcgcatccgtggattcacggtctggggcagcagaccgataacggggcatacctgagtccggtcaatgcaatccattatctggcggaaaggctggccggaacgggaggcaataccgatgtggtgatcatgatggtaacgggacagacccatgaaaacttcatgaaagggcttaacagcctggtggatgttttccccgcgcccgcattcacccaggtcagacgtctggctgagtctgcggcgacactggctactgagaaaatgcagatccccgcgaaagccggggcaggactgccggttgccattccgctgtccgttccgaccagcagggcagcgttatccgctgccgctgtcagtgaggcgcagaaagcggctggcgccggattcagcctggacgggctgaaacaacaactgggggaatttacgcaactgcgtgacagcctgattaacgatgtggccagtggccttgctgatttgcaggggaaaagcgccagggcatgggtatttacggccagtggcgacaccgccgccacactgctggcgctggtacaggacattccgcagccttcagccgtttatactgcggcaatcatgctggccgggaaaaatcttgatggaataaggggcatgattcatgacgtcgatcccgacactggcgcttaa

SEQ ID NO: 376023 - DNA, 1473 bp, Salmonella enterica
atgaaattatctccagcagaattaaagttagaaaaggataaggtgcaggataataaattcaatcaatatgttaaacgtataacactaaaaaatgtcagaggatttgatgaggaaattgtagagtttaaaacccccgtaactgcgcttattggtaccaatggcggcgggaagtcgacgatattaggtgctgtagccctcgcttataaaaatgttaagccaagtaaatttttccctaaatcattttatggcgacgattcaatgagtgattgggagattggttttgaattgattgataagcctatttcaaaagataaaaacattaacagaactgcaaagttcaaacagatgaaatggcgtagagatagttttccggagcgaaatgttgtatatgtagaaatacaacgaacagtccctgctggtgagctaacaaaatttaataagtttttatctggtgattcaattcaatttgaagtgaaaaaccttaatcctgatacaataaaatattgcactgcagttttggataaaaaaatagaagattataaatgtgtaataaataagaatgatccaacttctagaatgtttgtaggcaaggcgttgaatggttctggttattctcagttccattttggtgcaggtgaagcctcaataatagatactattgatagaattgaaaatgccaccgataattctcttatcttggttgaagaaattgagaatgggttgcatcctgtcgcggtaagattgtttgttaattatttgacaaatgtcgcgaagcgaaaaaaactgcagataatatttacaacacattcacaggatgcagtgaatgagcttgagccagaagccgtttgggcctccattaataaaaaagtttggaatggtaaactaagcattgaaagtttacgtgctattacggggcagaaggtaaattcgaaggttatatatgttgaagattcttttgcaaaagagtgggttgagaatgcgatagatagatatcttccaaaattagcttcaacaataaaagtttatacggctggcggatatcctagtgttgttaaggttagtcaatatcataatgagaaccctaccattaattatccttctattgccttagttgatggcgatattaaaggacggcagggaactaaggaattgcctgaaaatgcaatgtttatcggggacgactatcctgatgctatagtctatcattatattgctaaaaacatagaagaacatgcttcagttctaaggcaaagatgtttgttaacaagatttgatgctgaaaaaatcaaggcggctgttgaaagtgtaatgaattcggcatgtgatcatcatgtttattttactagattaagtgataaattggattttacatctgagttgtttattagggcgggtatgatagatttattcaacgagcacaactctgagttttggtcgccaatcatggacttcattaaaaaaggattggattaa

SEQ ID NO: 376024 - DNA, 387 bp, Salmonella enterica
atgcaagagttagaaggagcaccactacatcattcaaaactggccggcgttcggcttgcctgccctcctgaactttcagcttcaatacaagattacttcaaaagtaacgggtttgacgttagtaaaactatttgcttttccaacaatgcaccggatagacttaatctcatctttgaagtggccactcaggcaaggaagttagcaggggttattatgggattgctaaacaggaacgatgttgaaatcgaattgaatctttgtaccggggactatgaacctaaaatagcaaaggttaaattgcgcagtctgaaggatgttgaagcgtgcgaacgtctgatcgataaactggcatcagtggttgttgcaccaaagcaagacaataaataa

SEQ ID NO: 376025 - DNA, 789 bp, Salmonella enterica
atgaataaaatacatgttacatataaaaatctcttacttccgattaccttcatcgcggcaactctaattagcgcctgtgataacgataaagatgccatggcggaagctgaaaaaaatcaagagaaatacatgcaaaaaatccagcaaaaagagcaccagcaatcaatgttcttttacgacaaagccgaaatgcaaaaagctattgccaatatcaacgcaaaaggtggagccaatcttgcgattattgaagtccgtttcttcaagggcgggtattcattcattcgacaaagcgttaacacccctgctaaagtagaggtgtttaaatttaacaacggctactgggggggaccttcgcctgtcaatttaaccatctttggcactataacagaggagcaaaaacaagaagcactaaaagaggctttattcaaattcgactcgatcaatttcagcattataccagagcgtattcaggaaacaattaaacgcgctaacgccagtggcatcatttccgttacggaagatagcgatatcgttgtacgagcagagatagctcataatggcgaattcgtctatgacattaccatcactgctaaaaatacagcacgtgcggtaatgaccttaaataaggatggttctattgccggatatgagatcaaagaacctttcgacccaaaaaaagaagccgaaaaagcacagcaacttgttgaacaatcgagaaaagacattgaaagtcagcgtaaaaaagcagctggaaagatgaacgaaatacagcagacatttaaaaaatag

SEQ ID NO: 376026 - DNA, 420 bp, Salmonella enterica
atggcgctgaccagaaaacagcgggaaagactgcgtatgaaattcggcggccgctgtgcttactgcggctgtgaactgccggagaaaggatggcatgccgaccacgttcaggcagtgctccgcaaatcagagcggtgcatgaaggcggcagagaaaggcattttcagactgaaatccaccggtgacgttttcaggccggaggccgactgtccggaaaacatcttcccgtcctgtgcgccgtgcaatttgctgaaaacgacatattcgctggagatgttcagaaaacaggtctccctgcaggttgagcgggggcgccggagcagcgttaacttccggacagcagagcgttttgggctgattagtgtggtgaataaaccggttgttttctggtttgagcaatacgagggggagaataaatga

SEQ ID NO: 376027 - DNA, 639 bp, Salmonella enterica
atgcacaggaaaataaaatacctggccggactgattatggtcataagcgggacggtatcagccggcggagtcgctaatacccctgaaaaccgccagttcctgaagcagcaggaggaactgagccggcagttgcgcgaccggcctgatgctgaactgaaagcgtgggcagaccggcagattcaagcgaatcccctggtgcagtcagaccggcatttcctggatgaccttgcccgaaagcagcagacttctcaggcggataaaccggagcagggcgcggtgtactttatctcgttttccattccggaagaggggctgaagcgcatgctgggcgaaacccgtcgctacggtattccggccacgctgcggggaatgcgggataacgacctgaaagccacggcagatgccgttctgtccctggtaaaggatggggcaacagatggtgtgcagattgacccgacgctgttcacgaaatatgacatccgcagcgtaccgactctggtggtgtactgccgacagggatatgacgttatccggggcaatctgcgggtgaagcaggcgctggagaaagtggtcaccgccggggactgcaggcaggtggctgccggattacttgatggtgccggagataaaccgcaatga

SEQ ID NO: 376028 - DNA, 303 bp, Salmonella enterica
atgcgaattatttataagagacagcattatctgtccgttatcaggtggggggcggttgctgtcgtgcaggtcctgaatgagagtgtaaaactgtttccgtttgcgctggtgatgtttgcgctgatggctttttattttcttccggaacgcatcatctctgatgttgttaattcgtggatggaaacagacacgaccggaaaaatatcgctcatcagactttacctggaagtgacatttatgctgtccctcgagtcttcttctcttttatttatgtaccggggaaagcgatgcacaggaaaataa

SEQ ID NO: 376029 - DNA, 993 bp, Salmonella enterica
atgaaacggtatctgtggctgtgtgtactgattctgctggccggtcatgtccccacggtatcggctgatgcggcctgtgaaagtcgttttgtaaacccgatcacggatatctgctggagctgcatctttccgctgtcgctgggcagtacaaaagtgagtcagggaaagctgccggatacggccaatccctcaatgccgctccagttctgtccggcgccgccgcccatttttaagcgtcccggactggcgattggctactgggagccaatggcgctgacggacgtcacccgctctccgggctgcatggtgaatctggggttcagcctgccggccttcgggaaaacggcacagggtacggcgaagaaggaggataaacaggtgaacggggcgttctaccacgttcactggtacaaatacccgctcacgtactggctgaatatcatcacgtcgatggggtgtctggagggcggtgacctggacattgcgtacctctccgaaatcgaccccacgtggacggacagcagcctgaccagcattctcaatccggaagcggtaatttttgccaatcccatagcccagggggcctgcgcggcagatgccattgccagcaccttcaataaaccgctggatgtcctgttctggtgtgcaggctctcagggctccatgtatccgtttaacggctgggtgagtaacgaatccagtccgctgcagtcctccctgctggtcagtgagcggatggccttcaaactgcaccggcaggggcaaattatggagaccatcgggcagaataccgccgtctgctttgaatatccgtcgcccattctccctaaagagcgctggcgttatcagatggtgaacatgtatccggacagcgggcagtgccacccgttcgggcgcagtgtgatgcgctgggaaaccgggaaaaatccacccaacacgaagaagaactttggctatctgatgtggcgtaagcgcaactgtgtatttctgtaa

SEQ ID NO: 376030 - DNA, 633 bp, Salmonella enterica
gtgaaatggcgggggctgacagccctgctgatatgggggcagagcgtggcggccgcagacctgggcacctggggcgatctgtggccggtgcaggagccggacatgctggcggtgattatgcaccggctggaagccctgcagcagtccggtgagatgggccgccggatggaggcctttaaggagcgggtgatccacaacagcctgcgaccgcctgcggtgccgggtatcgggcgcgcggagaaataccgcagccggctgtttgatccgtcggtcagactggcggccgatatccgggataacgaaggacgggtgtttgcccgtcagggggaggtgatgaatccgctgcagtatgtgccctttaaccagacgctgtatttcattaacggcgatgatccggaacaggtgtcgtggatgaaacgccagacgccgccgacgctggagagcaaaattattctggtgcagggcagtatccctgagatggagaaggcgctggacagccggatttactttgaccagaacggggtgctgtgtcagcgcctcgggatcgaccaggtgccggccagggtgacggccgcaaaagacgggcgtttcctgaaagtggaatttattccggcggaggacggcagaaaatga

SEQ ID NO: 376031 - DNA, 387 bp, Salmonella enterica
atgagtacaaagcagaaacagactgacggcacgggagcgcgtaagcgtgacgggctgtggatgataccgggatgcctggggatggtggtacttaacgccgccatcagttacgggatagtccggctgaacacgccggtgacggtggcattcaacatgaaacagaccgtggatgcgttttttgacagcgccggccagaaaaaactgacggaagcgcagtcgaaagcgttgtccgggcgctttaatgcggccctggaggccagcctgcaggcgtggcagcgggagcaccatgccgtcattctggtttcaccggcggtggtacagggcgcgccggatatcacccgggagatccagcaggatattgcccggcgtatgagggcagagccgtga

SEQ ID NO: 376032 - DNA, 2649 bp, Salmonella enterica
gtgaagaacctgcttgatactgtcactcaggcggccaactcgctgctgaccgcgctgaagctgccggatgaatcggcacaggccaatcagatcctcggcgagatgagcttcccgcagttcagccgtctgctgccgtaccgggactataaccaggagtccggcctgttcatgaatgacgccacgatgggctttatgctggaagccacgcctgtcaacggcgctaacgagaccattgcgctctcccttgaccatctgctgcgtaccaaactgccgcgcgggatacccctgtgtgtccacctgatgtccagccagctggtcggggagcgtattgagtacgggctgcggaagttctcctggtccggtgagcaggcggagcggttcaacgccatcacccgcgcctactacatgaaagccgcagagactcactttccgttaccggaaggaatgaacctgcccctgaccctgcgccattaccgggtgttcatctcatactgcgcgccctccagaaaaaaaagccgggccgatatcctggagatggaaaacctggtgaagattatccgggcttccctgcagggggcatacatcagcacacagaccgttgatgcgaaggcatttattaatattgtcggggagatgattaatcacaatccggaatccatccatccgacccggcgccggctggacccgtattccgacctgaattaccagtgcgtggacgactcctttgacctgaaggtcaggcaggattacctgacgctgggactgcgcgataacgggaaaaacagcaccgcgcgcatcatgagttttcatctggcccgtaacccggaaatcgccttcctgtggaactcggcggataattacagcaatctgctgaacccggagctgcccatctcctgtccgttcattctgacgctgaccctggtggtggaagaccaggtgaagacccacagcgaagcgaacctgaagtacatggatctggagaagaagtcgaagacctcctacgccaaatggttcccgtccgtggagaaggaagcgaaggagtggggagacctgcgccagcgcctggcgtcgaaccagtcctcggtggtgtcctactttttcaatatcacggcgttctgccgcgacaacaaggaaacggcgctggaaacggagcaggatatcctgaacagtttccgtaaaaacggttttgagctgatttcgccgcgctttaaccacatgcgtaatttcctggcctgcctgccctttatggccgggaagggactgtttaagcagctgaaggaagccggtgtggtgcagcgggcggagagcttcaatgtgaccaacctgatgcccctggtggcggataacccgctgacgcccgccgggctgctggctccgacctaccgtaaccagctggcctttattgatattttcttccggggaatgaacaacaccaactacaacatggcggtctgcggaacttccggggcgggcaagaccgggctgatacagccgcttatccgcagcgtgctggattccggcggctttgcagtggtgtttgacatgggggacgggtacaagtccctgtgcgaaaatatgggcggggtgtacctggacggggagaccctgcgttttaaccccttcgccaatatcaccaatattgaccagtcggccgaacgtatccgcgaccagttgtcggtgatggccagccccaacggcaaccttgacgaagtccatgagggcctgttgctgcaggcggtcagggcagcctggctgacaaaaaagaaccgggcgcgtattgatgacgtggtggattttctggaaaacgcccgcacgagcgaacagtatgcggagtcacccggtatccgcagccgcctggatgaaatgattgtcctgctgaaccagtacacggcagcaggcacttacggcagatacttcaactccgatgaaccctccctgcgcgatgatgccaggatggtggtgctggagctgggtggcctggaagaccgcccgtccctgctggttgcggtgatgttttccctgattatctacatcgaaaaccggatgtaccgcacgccgcgtaacctcaaaaagctgaacgtgatcgacgaaggctggcgtctgctggacttcaaaaaccgcaaggtcggggacttcatcgaaaaaggctaccgtactgcccgccgtcacaccggcgcgtatatcaccatcacgcagaatatcgtcgactttgactccgacaaggcgtccagcgccgcccgcgcggcatggggtaactcttcctacaaaattatcctcaaacagagcgccaaagaattcgcgaaatacaaccagctgtatccggatcagttcccgcagctacaccgggagatgattgagaaatttggcgccgcgaaagaccagtggttcagctcgttcctgctgcaggtggaaaaccattcctcctggcaccgtctgtttgtcgacccgctcagccgcgccatgtacagctcggacggtcctgattttgagtttgtacagcagaagcggaaagaggggctgagtattcacgaggcggtctggcagctggcgtggaaaaagtcaggaccggagatggcctcgctggaggcctggctgcaggagcatgagacattcaggggaacttatgagtacaaagcagaaacagactga

SEQ ID NO: 376033 - DNA, 264 bp, Salmonella enterica
atgagattacaggcgctgctggtaacaggctctgttgtggtgaccgtgctgcggctttttctcctgaactccgtggtgcgccgggaggcaacggccatcatgaccggggtcgctgcaggtcttcatgtttttgctctgctggctccttccgtctggttgttttatcagtggcagtggaatggactgtttcttctgcagtggcagggagcagtcttcctgttctgtctgttcgcgcttcccgtttcaacattctgtttttcttaa

SEQ ID NO: 376034 - DNA, 468 bp, Salmonella enterica
atgcataaatcagacgctgaaaaaatggaatccattattgataaacatgaccggatataccgacgacaggtgcgggtatttaaaaacctgggcttcctctcaataattaccgccgtactgagtgtgattactgcgttattcagtacctccctgctcctgaaatacacgctgtgtgtcgtgatatgcgtttgtctgatttatctggtttttatgttcttctgcctggacaggtatatcgcgctcagtcgtcagacactgctgtggctgttgcgccgggtggaagataccgcagacgttcgccgggagctgctccgccgcctgctgtccgggaaaacgctgaccggacgggatgaagacgacatcctgcgtctctggtgggagagcagtaatgaagtggaggagcttgcaacccgtcagcgtgaacaggatgccatccggaagtttgtcggcggggataaatcagaatga

SEQ ID NO: 376035 - DNA, 222 bp, Salmonella enterica
atgagcgatgaagccgatgaggcatattcagtgacagaacaactgaccgtgacgggaataaaccggatacggcagaaagtaaaccgtaaaggtattccggtttaccggtgtgaagcatgcggtaatcccattccggaggcgcggcgaaaaatatttcctggcgtgacgttgtgtgtcgaatgccagtcttttctggaaaaacagggcaggcattatgcataa

SEQ ID NO: 376036 - DNA, 237 bp, Salmonella enterica
atgaacatacgtaatgttatttcagttcctgatgaatccgtgcaggatgattttgtgaaatatgttatcagtaactgcactacaaaaataatactctccggtcgccgggaatataatttctcacgacaggaatataatttttcagttaccggaatgcctggcgcagggaaaacatgtgttctgtctgaattaatcaaaaagctgctgcgtgagaataagaaaggggcgaaatcatga

SEQ ID NO: 376037 - DNA, 687 bp, Salmonella enterica
atgtgtccgacggatcgtagagaaagaacactcgccagtcaatctgtaaataaatacattctgagtattcaggatatctataaaaactcaccagtccctgtttgcgtccgtaatcaaagtcggaaaatcatttacgcaaatggagcctttattgaactcttctctaaagaggatcagcctctttcgggagatagttataatcgttatggggttgaagtttttctgtcatccctggaacttgaatgtcagtcgcttggacatggagctgctttttgccggcgttttaattttcatggggaaatttatcagataagaatggagaatatttcattcgataataatgagataattgtgttgtggcagataaatttatttccagatcatccatttttttctcctgacacaaaaactaaaaatttgtctctctcaggaactgaatcattctggaacgaactgtcccccggaactttgcttgttttttctttttatacattaggagttagtcacgcaaatatagctaaagaattaggtattactatcagagcatcagaagacagaatcaaacctgttaagcgtaaaattaaaaggaattatgaatctttcgattcattcagaatatcatgtatttctaaaggtaaaataatatcattgatagacattattcgtgaattttattgtgttaagtga

SEQ ID NO: 376038 - DNA, 432 bp, Salmonella enterica
atgcgtaacattattacccccgctgtattgagtacaatgatcccccaggaattcgaagactggcgcgacggcggcgaagacctgcgccgtgaactgacccacgccgcgatgcgtgacctgacatgtcccgcaggctgggacatgaacggcgaatatcgcagtgagtttggtggttttttcccggtgcagatccgtttcacgccatcccgcggcaatttcagcctggcggtatgcagtcccggggatatcagcccgtcctggatggtggtctttattccggtcagcggtcgcccgttctctgttatccgcacgctgccagcctggtcgccggaggttatcacgcatacactcagcctggtggctcaccttgatgccgatggttacagtcaggccagcatcatcagcgttctggcgatggagggcgcagcatga

SEQ ID NO: 376039 - DNA, 1998 bp, Salmonella enterica
atgtcagttaccaattctaatgcaaaatccgcagtaaaaaccagccgtaaggcgaaaaacgccgccagtgccagtaacaccgtattgtcggcggtgctggcgcagaccgaagaacaacacgtaccgctgtccgcactggtcaaatccccgcagaacgtgcgtatcgtgccgtattccacagagagcgtccgcgaactggcggactctattaaagggattggactgctccagaatctggttgttcacgccctccctgacggcctgtacggtgttgccgctggcggtcgccgtctggcggcgatgaatctgttggccactgagaacacgatccacccggactggcctgtccgcgtgaaggttgtgccggataatctggcgaccgccgcttcactgaccgagaacgggcagcatctggaaatgcaccctgccgaacaaattgcgggattccgcgcgatggcagcggaaggcaaaactcctgcacagactggcgatctgctgggctattcgccccgtcacgtacagcggatgctgaaactcgcggggctggctccggttatcctggaagcgctggctgcggacaaaatcaccacggagcactgtcaggcgctggcgctggaggacaatcccgaccgtcaggtgcaggtgtacgaggcggcgtgtcgagagggctggaacaataaaccggaagtgcgcgtgatccgtaatttgatcaccgacagtcaggtttccaccctcaacaacagcaaatatacgtttgtcggtgaaaaagctttctccggcgatgaaatccgcgcagacctgttcagcgacgaacagggcggttttgtggacaaactggcgctggatacggccctgctggaaaaacttcagtgggtggcggagtgcctgaaagaggccgagggctgggcatggtgcgcgggacggatggagcctgtcagccgctatggtgaggataccgaagtgtaccgtattcaggatgagcctgacgcggtttacacggagcaggaacagcagcgcctggacgagttgcaggaactgtacgacgaaaaccagaccgccagcgatgaaaccgacacgatggagtcagagatagaggccatcgaatgcgcggcacaactccgggcatggacgctggaaatgcgcgcacagtccggcgtggtggtgtcatggcgtcacggtgaaatctgtgtccagcgcggggtgagcctgcgtgagcagtctgaaacggaagatgaacccgatcaggttccggtatatgagcgccagccggagcctgtggacgaaatcagtgttcccctgctgaccagaatgtgtgcagaacggacattgtcggtccaggcggcactgatgcagcagccggaaaaatccctggcgcttctggcatggacgctgtgtctgaacgtgttcagcagcggcgcgtataaccgacccgctcaaatcagcctgaactgtaagcattactccctgacaaaggatgcgccgcccggcgagagcggtgttgcgtttgtgacgctgtcgcaggagggaaaacgtcttgaaacgttgctaccggagggctggacacaggacttcaccacctttttcaccctcagcgccaaagaccttaccgccctgctcagtttctgcaccgcatgcagtcttgacggtatgcagatgcgcggcgccggaggcaccacccgcagtccgctcgataagctggaaatcgcgctcgctttccatctgcgcgactggtggcaaccgacgaaggccgatttcttcactggccttaaaaaaccgcaaatcatcgccgcgctgaatgaggccggactgacaggcgcggcgcgggatgcggagaagatgaagaagggtgatgcggctgaactggcagaggacaaaatgcgtgacaaccgttgggtgcctgtctggatgcgcgcccctgatgcagaaaacgacgtatctgataccgaaaacggcagtgctgatgcagacagccaccacaccctgcccgatgcagcctga

SEQ ID NO: 376040 - DNA, 243 bp, Salmonella enterica
atgacagacaacatcatgagcccactgaaatccctgcctgatggcacgttcacccacgaacaggccgaagcggtggcagcacagtatcagaatgtcgccattgaagacgatcaggggacgcaccttcgcttggttgtgcgtaaggacggcgaaatggtctggcggggctggaattttgaaccgggcggcgagtactggctcaaccgctgtatcgaaagccacggtatccgtaaaacgcagtaa

SEQ ID NO: 376041 - DNA, 519 bp, Salmonella enterica
atggcagcacgtggcgtaaacaaagttattctggtcggtcatatcgggcaggacccggaagtacgttacatgcccaacgggggcgcggtggcaaatcttaccctcgccacgtcagaaacatggcgtgtcaggcaggacggggagatgcgcgaacacaccgaatggcaccgtgttgtcgtgtttggcaagctcgctgaaattgccagtgaatatctgcgtaaaggtgctcaggtctacatcgagggccagttacgcacccgcaaatggaccgatcagtccggtcaggacaaatacaccaccgaagtgatcgttaacgtgggcggcaccatgcagatgctcggtcgccacaacagccagccacagcaggagcctcagaccccacctacggcggcaaagggagaaggcaaagcggtaaaaggggcgggaaatgcagcaaaagggaaaaacgcagcagcaccgcagcagccgccagcgcaacccgatccggcgtatgacttcgacgatgatattcccttttga

SEQ ID NO: 376042 - DNA, 144 bp, Salmonella enterica
atgccgggtgatgtttttttctggccggggtgtgtgattttcttcctgccggtgataatacgctgcctgttcctgttcctgttcctgttcctgttcctgttcctgttcattctgctgctgatattccctgacagatttcgctga

SEQ ID NO: 376043 - DNA, 324 bp, Salmonella enterica
atgtccggactgaatctggcggcaacaactaaagaagagcaggataaagtggccattgacctggttgcttcaggcgtggtctataaagaaaggctggcgatgccggtggtcgctgagcttgtcgtcagagaacagcctgagcatttgagagagtatttccgggcgcggctggagtatttgcgcaactcccggacaagaatgccccggaatatgccagaaaagaggatgaggttaaaaaatagcgccattcctgatgcattctgcctgtcgctggccggattttacgcatgccgggtgatgtttttttctggccggggtgtgtga

SEQ ID NO: 376044 - DNA, 435 bp, Salmonella enterica
atgtacggaaccgtcagcaccatctgctgcgacttactgaaagtgtatgagaatcacgaaaaaatcgctgtcatcatctggtgtgaaggcgatgtgcgggaaatgggggcggagtttaatccgaccgctgatgacatacaggccgtactgcgcgccattggcgagtcggacagtgatgcgctctggcgtgatggtattggccagaattttgttgagggtgtattacgcgagttagtcgcactgcgcccaccgcgccagattgctgtacctgaagatgtgctgcgcacgcttttacccctgatggaagccggaatgaaccttcctcgttaccagacgcaggacagggctgctgaagaagaaaccgcgctggatacgttgcgatacctgctttccacaaatatcccggcgcataacctgaccgaaggaaactactga

SEQ ID NO: 376045 - DNA, 435 bp, Salmonella enterica
atgcagtattcaaatcagcaacgtgcgcgtgttattaacgttgaagaatccgaccgcctgtctttcctgccgtacatgttcggcaacgattttatgctggctgaattacagttatatgccctggcgaaaaaatggatgcctgaatacaacggtggtttctggcattttatccgtctgccggaaggcggcggatacatgatgcccgactgcgatcgggtacacatgatcaacggtgaaaactggtttgatcgtaccgtcagcgccgacgctgccggaattattctgacttcgctcgccattaaccgccgttgctggacgcatcacgactgcggcaacgctgcgctcactcgcctgtatatgctgcgtgatacccagctctggaatcacattacgtttcaccctgaatgcaacgctatttacgccgcgctcgactga

SEQ ID NO: 376046 - DNA, 765 bp, Salmonella enterica
atgagaaacacgctcagtacgctgatagtgcgccacggagataatctgttacgccggtccggctggcccgaaaccgtcggcgtgacgcaggtggcccccggtgtggtgcccggctggctggccgtctgcggtgtgctcagtgctgccgaaatcttggcactgacgacgcatctttgtcagccccttaattatggacgggcgcaactgctgacggccagtgcgcagcggctggcggggacgccagtccggttacatctgtacccggtacaggcatatccgcaccctgccacggtacgcgaatgcactgaaattcgccttccgtatgctcaggagtggctgaccacggacgaatatgccgacctgctggcgttcctgaaagcgtccgctgaccgggtatgtgaaattgtccgccaggatacgaagcgcatcgcggcggcgctggcaccgtccggcgagtcccgcctgatggaaaaacgcatcgggaactggcggttactggccgatgaatacgaccatgataactggcttgacgaagaggacgaggacggactggataaggtgctggacgcggtactggtacgtaacgcccgtttctgcccggtgctgctgacgctggttaatgagccggaggaagaaatcgaagccgccggcgtgataaccgactgtttgcgcttcccgggggaaccgaaccgccgctggcttgaccgccgcgtgctccgggatgtggtgaacgaagcccggagtttcacaggcaacatccgttaa

SEQ ID NO: 376047 - DNA, 414 bp, Salmonella enterica
atgatgtatggcacacgtaaagaactgaactcaaagctgaaacgcatgtttggcaacgacgagcgttttgccctgctgatctggacgaagcaggacgttatgtcactgactcaggcgatgaccgaagtggaggccgatgcgattttgcgtgagattggccgaaaaggtatgggcgaacataccggagacggtatttcagacagcacggtacaggcgctgtacgccggattacggactgaaatcccgaccgtcagtgttcccgccgacctgctggcaagggtgacgaatatcgccgggcgggcgctggatacggaggacgctcaggcctggcctcttgtatgtcaggagtaccccggcgttgccgacgctcaggtcgatattgcgcggctcaggcaactggcgctggcggcgtaa

SEQ ID NO: 376048 - DNA, 222 bp, Salmonella enterica
atgaactattccggacacgaaaaactccgcgcagaagtggcggcgctggccaacagcatgtgcgacctgcgcgccaccctgaaagtgctggaagagcgttatcactggcagcgtcacggacttactgaacgactggccgggcagagtctgcggcgtatcaacaccctgctggatgaagcgtacaacgaaagcctgatgctcaatgagtgttttaaagactga

SEQ ID NO: 376049 - DNA, 681 bp, Salmonella enterica
atgtcccgtttaatcctggggaactgtgtcgatattatgtccggctttccggagcgcgccgtcgatttcattctgaccgacccgccttaccttgtcggattccgtgaccgttccggccgcagtattgccggtgacagaaccgacgagtggctgcaacccgcctgtaaccagatgtaccgcgtactcaaaaaagatgcgctgctggtcagtttctacggctggaaccgcgtggaccgtttcatggcggcctggaaaagtgccggtttcagcgtggtcggacacctggtattcaccaaaaactactcgtcaaaatccgcgtatgtcggctaccgccatgaatgcgcttacgtgctggcgaaaggccgtccggccctgccacagaacccgctgccggatgtcctcggctggaagtattccggcaatcgccaccacccgacggaaaagcccgttaccagcctgcaaccgctgattgagtctttcacacacacgaacgccattgttctcgacccgtttgccggctccgcctccacctgcgttgccgcgttacaggcggggcgcagatatatcggtatcgagctgatggagcagtaccacaaagccgggattgagcgcctgacagccgtacagcgcgccatgcaacgcccggccgccaacgacgtcttttatccggaggccgcgtaa

SEQ ID NO: 376050 - DNA, 357 bp, Salmonella enterica
gtggataataattcaaacattaatgatacctggcttgttggcctgagtgtcgacgtcaatggcactgaaatgatggtgcattacctggtttccgcgactgacctggagcatgccgaagcgggtgttctgcaaatggggcgcacctggtggccatcgttgaaacgcgaggatgaccggcatcggtgggaatatgaaacaggcgtggtctggtttaacagcatcattctgctcgatgacgtggaaaacagtatcctgcgtggtctgaagttcctcgatgcgtggacagtgaccggctcaacggatgcgccggtactgcgcgatgagtgggggaatgactggcgggatatcacccgctga

SEQ ID NO: 376051 - DNA, 471 bp, Salmonella enterica
atgttcagagtgacctgtatcgacctggaaaatggcgagtttgcgctttatatcaacggacattatctgtccagtgaagacggcagcggcgagaagctgtacctgggggatattctggaacgtttatcccgtctgcctggtgtgaccacggaaaccgtggagcgaccagtaccagacagtgatgagtggagctggaacgatgtggcagacagtgtttttccggcctgtatcacgctgtcccgcaatatgacagtcgctgcgtttaaacagcgtctttcccggtttcctgatgatgcgctgtgctgcggtacgttctggctggccagtgattttctggcgctggacagttcgctcacggaagacgatatcgatgcggcgatggagctggcacagcactgccatgatgcgaatgacgggttcaactggagccatctgcaatgggcaatcgatgaggtgaagcgcggtggataa

SEQ ID NO: 376052 - DNA, 1275 bp, Salmonella enterica
atgttcgctttggctgacgtcaactcgttctatgccagttgcgaaaaggtctttcgccccgatttgcgtgacaggtctgtggtggtcctgagtaacaacgatggttgtgtaatcgcgcgcagcgctgaagcaaaaaaactgggcataaaaatgggggtgccgtggtttcaactgaggtcggcgaaatttccggagccggttatcgcgttctccagtaattacgccctctacgcatcaatgtcgaacagggtcatggttcacctggaagagctggcgccacgcgttgagcagtactccattgacgagatgtttctggatattcgcggtatagacagttgcatcgatttcgaggatttcggccgacagctgcgtgagcacgttcgttccggcacagggctgaccatcggcgtcggaatgggaccgaccaaaacgctggctaaaagcgcgcaatgggcatcgaaagaatggtcacagttcggaggcgtgcttgccctgacgttacacaatcagaaacgaacggagaaactgctgtcactgcaaccggtggaggaaatctggggtgtgggccgcaggatctcaaagaagctgaacacaatggggatcaccacagcactgcagctggcccgcgcgaatccaacgttcatcaggaaaaactttaatgtggttctggagagaacggtccgggaactcaatggagaaagctgtatttccctggaggaagcaccgccccccaaacagcagatagtctgcagcagaagctttggagaacgagtcacgacttatgaagcgatgcggcaggcagtctgtcagcacgctgaacgtgccgccgaaaagctgcgtggggaacggcagttctgcaggcatattgccgtgtttgtgaaaacatcgccgttcgccgtaactgagccctactacggtaatctggccagtgaaaaactgctcatccccacgcaggatacacgggacatcattgccgctgccgtcagagctctggacaggatctgggtggatggtcaccgttacgcaaaggcaggctgtatgctgaacgatttcacgccaaccggggtatcgcagcttaatttgtttgatgaagtacagccgcgggaacggagcgagcagctgatgcaagtcctggatgggattaaccatccgggcaaggggaaaatatggttcgccggtcgggggattgcccccgagtggcagatgaaaagggaactactttcgccagcttatacgacacgttgggcagatattcctgcagcgaaattgacttga

SEQ ID NO: 376053 - DNA, 1116 bp, Salmonella enterica
atgcgtccggcgacatacgaaccagaacagattattgaagcagggctggccctgcaggctgaaggacggaatatcaccgggttcgcactacgtaaccaggtgggtggcggcaatccgacacgtctccgccagatatgggacgaataccaggcttcacagagcacggtcgtcactgaacccgttgccgagctgccagtggaagtggctgaagaagtgaaggccgtctccgccgcgctgtccgaacgcatcacccagctggcgacagaactgaatgacaaggcggtccgggctgcagaacgccgggttgcggaagtcacgcgtgctgccggtgaacagaccgcacaggcagagcgggagctggccgacgccgcgcagacagtcgacgacctggaagaaaaactggatgaactgcaggacagatatgacagtttgacgctggcgctggagtcagaacgttcactgcgtcagcagcatgatgtggagatggcccagctgaaagagcgtcttgcggccgctgaagagaatacccgtcagcgagaggaacggtatcaggagcagaagacagtgctgcaggatgcgcttaatgcggagcaggcacagcacaaaaacacgcgggaagacctgcagaaacgactggagcaaatttctgccgaagctaatgcgcgtacagaagaactgaagtctgaacgcgataaagtcaatactctccttacccgccttgaatcgcaggaaaatgcgctggcctcagaacgtcagcagcatctggccacccgcgaaacgctgcagcaacgcctcgagcaggccatcgctgacacgcaggcgcgcgccggtgagattgcacttgaacgtgacagagtcagcagcctcaccgcaaggctggaatcgcaggaaaaggcctcctcggagcaactggtgcgtatgggcagtgaaatagccagtctgacagagcgttgcacacagctggaaaaccagcgtgatgatgcccgtctggagacgatgggggagaaagaaacggtcgcggcactgcgtggtgaggctgaagccctgaagcgtcagaaccagtcactgatggcggcgctttcaggcaataaacagaccggtggccagaatgcgtga

SEQ ID NO: 376054 - DNA, 489 bp, Salmonella enterica
atgaacacagcattacttgctccatttatctcaattgcattatctggagtgggcgtttatacccactattactttaagaaatatcaggcttccatggatcagtgccaaaaggtccacaaaatgatggtagatacactgctcggtaccaaaagactgttcagccggagcgcccccgcgcaggcgcttaaatcagaactgagaatcatgcagcagcaactctctcaggaggctcaaaaactggataaaatgacgatacgccttccgttaaagcgtctgcaacgggaacaacgtcatattttgaggcatgctgactggttattacattatctcgattcgcatctggcagataatgaagggaaattttttctgttcctgcatgacttggcgatggatagcgatgataaagtcctggatttcctgacgtcattacatgacacaaagagattcagaaatcgccgtctgcaaactggatcaactacctgtccctga

SEQ ID NO: 376055 - DNA, 519 bp, Salmonella enterica
atgaaaaagagcattattgcttccattattgcactgggtgttctgggcgggactgcacacgctgccaatgaagtaactttcctgggttcagtaagcgcaacaacctgtgacctgaccacttctgtcaacggcgccgctcagccgaaccaggttgttcagctgggtaccgttcaggctaaccagccgggtaattttgttgacttcgccatgaaaccggttgacccgaatgcacagggttgtgcaaatctggctcagaaaacggccactgtttcctgggcttctgctgccctggatggcgaaggctttggggcaaccagcggtacagctactgatgccaaagtactggttgaaagcgtgaactccaaaaacccgggggctgtaaacgctaacgccagcacggttgactttgaaggtgccaagctgaccaccgacggcctgcagttcaaagccaagctgaaaggtggtgcgaccgaaggtgacttcaagtctgtggcatctttcgcagtggcttacaaataa

SEQ ID NO: 376056 - DNA, 558 bp, Salmonella enterica
atgatgagacgaagtgaaatcaggtggatgaaacgtcatgtgtgtgcaggagcgctggttactgggctgctgttccctttggcgacagaagcggcttcgaaggaaaatataaccattccattcacgttaaccaacccgcaacagacctgcaaactgacctttgataacggcggtaatacgatgaactatcaactgggagtaatgaataaaggagtccggatgcaacacagaccgtttaccgtgaaagtggattgtgggcagagtactgtggtgaagacagcactgacagcaagaaacaccactggaaccctgcaggggggcggtgacagcagcgtagtcattatgcggatgaacggtcagccgtcaaataatggcccgctgttctggctggaaaatggtagtaagcgggtgaaactgactgggaaggacgatgatgctttctgcatatccccctccccgaacaactgtgagctccgccctgtgactgatattccggcaaattcaccggaggggaatattgatgtgacggtggtttttgatgtggtttacccacagtaa

SEQ ID NO: 376057 - DNA, 876 bp, Salmonella enterica
atgttaaaattactaattgcttcagtcatcatcatggggggaacggtcatcacttaccctgctcatgcaaaaaccacaactgtatccacatatagtcaaggaatctaccaataccaaatgcaggcaagtaactttatgattaagtcagaccaagcagccctttctatggtaacaatgacttcattcagtcagtgcaacgtacaaattatatcgcgtacctgtaatggaacagctatggttatagcacccgatggaacacgatatcccgcagaagttgagtgcaaggttgcagataagggtttcggcgtaatgtttcgggccccgggcctggttcagaatggcattgttgcgggtgaagggtatatactccccgctggctatacgttgatgtttagtctcagccgaacaggagaagtccgtacgactagaaccctatatgatgaatgtgaggccagttcgctgggatcgtggcttcaccaatatcacttaccatcaccgagcgtcacactcacttcttcatctggagcacgttataccctcggtaatggtgtaatgtcgacaagctttcctgcaggaggtacgacaaaaagtattaccgttgagcatccagattcgataaacagcaaggctggggtaaatggtgcgttcgagcaagtgatactaaaggctagtgggactcctggtgcttctattcgtgtaacacagtcgataactcccagcgaagtggccagaaatgcacaattgttaaaaactactggaggtcagtgcacgacaatgcgtgctggagatgaatgtaaacttgttcttgcgccaggaacaatacgaccaggacagacaagttcgggcacagtgttaataagtgtgcaactgcaataa

SEQ ID NO: 376058 - DNA, 213 bp, Salmonella enterica
atgagtgaatccattgttacaaaaattatttccatcgtccaggaacgtcagaacatggatgacggcgcgccagttaaaacccgcgatattgccgatgctgccggactcagtatctaccaggtccgcttgtatcttgagcaactccacgatgtcggggtgcttgagaaagtgaatgccggaaagggagttcccggattatggcgtctgctctga

SEQ ID NO: 376059 - DNA, 900 bp, Salmonella enterica
atgatgtggagtccggtctcccctgtaacagaaaacataaccttcaccaccacgatgttcagatatttatgtaatcagaaagcagcactgctgaccgccattctcctgatggcggccggcgtgctcaccctgtgtttcccggagtcctggtacccgcaggaaacagaatggcatctcacggcagaaaaagaaattaccgggatacacggcggcctctccggcctgacatggaacccggacagcagaacgctgtttgccgtgaccgaccacccctcctcggtggtggagctggacacggaagggaacgtgctgcgggtgataccgtcagacggcgaccacgattttgaggccatcgaatacctcggcgggaaccgctatgccctgtcccgggagcgggagcggacgctcaccacccactgcattgacagcagcacgaccgtcctcccgccggcaacatacagcctgacgctggatgtgaacaggcacagcgacaatgccggttttgaaggccttgcccggggacggggagagcatgccctgatggtggcgcaggagaaaaaaccgctgcggctttacgtgacggaccggagccctgatgcgctgtcggtgagtgactcgctgacacaccgggcgtccctgccatggttcctgaaggatatctccggtctgcattatgaccggaacaacgggctcctgtatgtactttcccatgagtctgccgtggtcgtggtgtcgggcctggacggcgggaggaaagtgatgtcgctgcaccggggactctgcggcctgcgaagcgatatcccgcaggcggaggggataacctcagatgaccgggacacgctgtggatagtcagtgaaccgaatctgttttaccgcttcacccgcacggcagcgtcctga

SEQ ID NO: 376060 - DNA, 759 bp, Salmonella enterica
atggagctggataaatatcttctttttttcctggcaggaggatcaaccttcaatcagggaaaggcattttcatttcgttgcgctcaggacagtattgtcctgacgaaagtgcatcagacagagatgcatttttaccggtggtaccatcatgtggtgataacaagggaaacgctgtgccggtttgcccggcagctggatgtggatgttcttaaattttatatcccgaaagacatcccccggtaccttgtgcagccttgcccagaggactctgtgttccgtccgttgatggtgagactctgtgccggaacggataacagttacggagagaccggaccagagaatccgttcctgacgtttgcactggtatcggccttttgtgagcaggatatttttttccctttcctgaagacatgcctgaaacaaagtatggcagaccaggtggctacggtgataaaccggaatgtgagtgaaaactggaccatacaccgggttgccggcgagctgtatgtcagtgtcagcctgttaaagaaaaaactgaaagaggagaatacatcctacacacgtattctgctggaatgcaggatgaaaaaagcatcggagttaattgttatgcaggagggggcggtcaagaaagtggcatatcagtgcgggtacagtagtgtgccgtattttatcagccagttcaggaaatattacggatacacgccttcaagatgcaagcctgacggaaatttattttatagttttattgcaaaataa

SEQ ID NO: 376061 - DNA, 180 bp, Salmonella enterica
gtggtcgtggtgtcgggcctggacggcgggaggaaagtgatgtcgctgcaccggggactctgcggcctgcgaagcgatatcccgcaggcggaggggataacctcagatgaccgggacacgctgtggatagtcagtgaaccgaatctgttttaccgcttcacccgcacggcagcgtcctga

SEQ ID NO: 376062 - DNA, 174 bp, Salmonella enterica
atgagactcaggaaaggtcatggattgacgttggtcacacttgcgtgtttatccctgctgggctccctgccagctattgcggcaccgtccgttcaggccggtttttcaccggagggcagcgcaagcagctggttcttaagactattgaggctgcgcaacataatatccggctga

SEQ ID NO: 376063 - DNA, 162 bp, Salmonella enterica
atgataatgatgccggttaaggaggccacggagaagaacgtgacaatgataccgggcggcgcgggacaggaaactctggaaaacgcggccgtgctgattctggccgggatggagcgtaatgatcgtgccaccactagggaaggcaataacaatttatcctga

SEQ ID NO: 376064 - DNA, 741 bp, Salmonella enterica
atgacgatggataacgccacacgtaacgattcgcgggcagtccgggtggatacccggctgcagcgactgctggcctggtcgccgggacagagagatctcatcaaaaccgtggcgctgctgctgatggtggctgaccatattaaccgtatcctgcacctgaaccaagagtggctgtttctggccgggcgcggggcgtttccgctgtttgccctggtgtgggggctgaacctgtcccagcatacgcatatccgccagtctgcgattaaccggctgtggggatgggcggttatcgcgcagtccggatattttctggcgggatttccgtggtatgaagggaatattctgtttgcctttgcggtgaccgcgcaggcgctgaagtggtgtgagcagcgctgcctgtttcactctgcggccgcgctgttactgctgacggcgtggatacccctgtccggaaccagctacggcgttgccggcgtgctggtgctggtcatctgttaccggctgtaccggaccacagatactgaagaacatctggcgcttgcggcctgcctagtggtggccgtccccgcgctgaatctggtcaccagtgatgccgcggcggtggcaggacttctggtgaccgggctgacggtatggcttgtttcgctgacaggcaaatcacggccccggttctggccggctgattttttcccggtattctacacctgccatctggctgccctgggcgttctggcgatgtga

SEQ ID NO: 376065 - DNA, 5259 bp, Salmonella enterica
atgatgagtattgcgcaggtccggtcggcgggaagtgccgccggttattacagcgacagggataactactacgtgctgggcagcatggaagagcgctgggccggaaaaggcgcggagcagctggggttgcagggcaccgtcgataaggaggtgttcacccgggtactggaaggcagactgcccgacggggctgatctgagccggcagcaggatggcggcaacaaacaccgccccggctatgatctgaccttctctgcccccaaaagtgtttccctgatggccatgctggccggtgataaacgcctgactgaggcacacaaccaggcggtggatatcgctgtccgtcaggtggaggcgctggcctccaccagggtgatgacggacggacagtcagaaacggtgctcaccggtaatctggtgatggcgctgttcaatcatgacaccagtcgtgaccaggagccgcagttgcatacccatgctgtggtggtcaacgtcacgcagcatgacggggaatggaagaccctgagcagcgataaggtgggcaaaacgggatttatcgagaatgtctatgctaaccagatagccttcgggaagatttaccgcgcggtgctgaaagagaaggttgaagcgctgggctatgaaacggaagtggtcggtaagcacggtatgtgggagatgcccggtgtcccggtggaggccttttccagccgttcgcaggccatccgagaggcggtcggggaggatgcctcgctgaaatcccgggatgtggcggcgctggatacgcgtaaatccaaacagcatgtcgatccggaagtgaaaatggctgagtggatgcagaccctgaaagataccgggtttgatatcagcgcataccgtgagtctgcggacaggcgggcggaaatacaggcagcacagcctgttccgtcacaggagcagccggatattcagcaggcggtgacgcaggccattgccggattaagcgaccggaaggttcagtttacgtataccgacgtgctggccagaacggtcggcatgctgccgccggaagccggcgtgattgagaaagcccgggccgggagtgatgaggccatcagccgcgagcagcttatccccctcgaccgggagaaaggactgttcacctccggtattcatgtgctcgatgagctgtctgtccgggcactcagcagcgatatcatgaagcagaaccgggtgaccgtccatccggagaagagcgtgccccgcacgggaagttacagcgacgcggtgagtgtcctggctcaggaccgcccgtcactggccattatcagtggtcagggcggtgctgccggtcagcgggagcgggtggcggaactgacgatgatggcccgggagcaggggcgtgaggtgcagattattgtcgctgaccgccgttcgcagacaaacctgaagcaggatgaacgtctgtccggtgagctgataaccgggcgtcgtcagttgcaggagggcatgttattttccccgggcagtaccgttattgtcgaccagggggaaaagctgtccctgaaggagactctgaccctgctggatggcgcggcgcgtcataacgtccaggtgctaattaccgacagcggtcagcgcaccggtaccggcagcgcgctgatggccatgaaggaggccggcgtgaacagttaccgctggcagggcaggcagcagaccccggcgaccgttatcagcgagccggaccggaatgtccgctatgcccggctggccggggattttgtggctgcggtgaaagccggggaagagagcgtggcacaggtcagcggcatgcgtgaacaggccatactggcggggatgatacgcagtgagctgaagacgcaggggatactcgggcagcaggacaccatgatgaccgccctgtcaccggtctggctggacagccggaaccgttacctgcgcgatatgtaccgtgaagggatggtgatggagcagtggaacccggagaaacggtcccatgaccggtatgtgattgaccgggtgaccgcacaaagtcacagtctgaccctgcgggatgcgcagggagagacgcagatggtgcggatttcagccctggacagcagttggtcactcttccgaccggagaagatgccggtggcagacggtgagcgtcttatggtgacgggaaaaattcccgggcttcgcgtctccgtcggcgaccggctgcaggtatctgcggtgaacgatggcgtgatgacggtgacggtacccggcagggctgaaccggcttccctgccggtgggggattccccgttcacggcgctgaagctggaaaacggctgggtggaaacacccgggcattccgtcagtgacagtgcgaaagtttttgcttccgtcacacagatggcgatggacaacgccaccctgaacagtctggcccgcagcggccgggatgtccggctgtattcctcactggatgagacccgcactgctgaaaaactctcccgtcacccgtcttttacggtcgtttctgagcagataaaggcgcgtgccggtgaggtatcgctggaaaccgccatcagccgccagaaagccgggcttcacacgccggcacagcaggccattcaccttgcccttccggtggtggaaagtaaaaacctggcattcagtcaggtggacctgctgacggaggcgaagtcgtttgctgcagagggaaccggttttgctgacctgggacgggaaattgatgcgcagataaaacggggcgatttactgtatgtggatgtggcaaaaggttatggcacagacctgctgatttcccgtgcgtcgtatgacgctgaaaagagtattctgcatcatatccttgagggcaaggaggcggtcacgccactgatggagagggtacccggcgaactcatggagactctgacatccggacagcgtgccgccacccgtatgatactcgaaacgaaagaccgtttcaccgtggtacagggttatgccggggtgggcaagaccacccagttccgggcggtgatgtcagcggtgaacctgctgccggagagtgagcgtccccgcgtcgtggggctgggaccgacccacagggcggtcggggagatgcgcagtgccggcgtggaagcacagacgctggcgtcctttctgcacgacacgcaactgcagcagcgcagcggtgaaacgccggatttcagcaacacgctgttcctccttgatgagagttcgatggtgggcaacaccgatatggcgcgggcatacgccctgattgcggccggtggtggtcgtgccgtggcgagcggtgacacggaccagctgcaggccatcgcacccggccagcctttccgcctgcagcagacgcgcagcgcggctgatgtggccatcatgaaggagattgtacgccagacaccggaactgcgggacgccgtgtacagcctgattaaccgggatgtgaataaggcactgtccgggcttgaaaacgtgaagccggttcaggttccccgcctgaagggggcatgggcgccggaaaactcggtgacggagttcagccgtctgcaggagcgggaactggcgaaagccgcacaggaggcggagaaaaagggcgaagcctttccggatgtgcccgtgacgctgtatgaggccattgtccgcgactataccggcagaacgccggaagcccgggagcagacgctgattgtcacgcatctgaatgaggaccgtcgggtgctgaacagcatgattcaggatgcgctggcgaaaccgggtgagcagcaggtcactgtccctgtactgaccaccgcgaatatccgtgacggggaactgcgccgtctgtccacctgggaggcgcatccgggggcgctggccctggtggataatgtgtatcaccggattgccggtatcagtaaggaggacgggctgattaccctggaagataaggcgggtaacacccgccttatttccccccgggaagcagcggcagagggcgtcacactatacaatccggaaactatccgggtgggggccggtgaccggatgcgtttcacgaagagtgacagggaacgcgggtatgtggccaacagcgtctggacggtgacggcggtttccggtgacagcgtcacgctgtcagacgggaaacagacccgcgtggtgcgtcccgggcaggacagggcagagcaacatattgacctggcgtatgccatcaccgcccacagtgcgcagggggccagtgagacgtttgccattgcgctggagggaaccgaagggggccggaaacagatggccggttttgagtcggcgtatgtggcgctgtcgcgtatgaagcagcatgtgcaggtgtacaccgacgaccgtcagggttgggttaaggccatcaacagtgcggagcaaaagggcacggcccatgacgtgctggagcctaaatcagagcgtgagatgatgaacgcagagcgcctgttcagcaccgcccgggaactgcgggacgtggccgccggccgtgccgtgctgcgcaacgccggactggcgcagggagacagccgggcgcgttttattgcaccggggcgcaagtatccgcagccgtatgtggcgctgccggcgtttgaccgtaacggtaaatccgccggtatctggctgaacccgctgacaacggatgacggtgccgggctgcggggattcaccggggaaggtcgggtgaaaggcagtgaagaggcgcagtttgtggccctgcagggcagtcgtaacggcgaaagcctgctggctggtagcatgcaggatggcgtccggattgcccgggagaaccccgacagcggcgtggtggtgcgaattgtcggtgacgggcgtccatggaatcccgtcgccattaccggcggcagggtgtggggcgatattcctgacagtaacgtgcagcccggcgcggggaacggggagccggtcacggcagagattctggcacagcggcaggcagaagaggcagtccgccgtgaaacagaacgccgtgcggatgagattgtccgtaaaatggctgaggacaaatctgacctgccggaggagaaaaccgcgcaggcggtcagggagattgccggccaggagcaggacagaatgaccccgcctgaacgggaacccccgctgccggagagtgtgctgcgcgaaccacaaagggagcgggagaccatccgggaagtggcgcgggaaaaccggggccgggagcggctgcagcagatggagcaggagatggtgcgtgacctgcagaaagagaaaacccctggcggggactga

SEQ ID NO: 376066 - DNA, 2052 bp, Salmonella enterica
atgagctttaatgcgaaggatatgacccagggcggtcagattgcgtccatgcgtattcgcatgttcagtcagatcgccaacattatattttactgcctgtttattttcttctggatactcgtcggcctagtgttatgggtgaaactcagctggcagacgtttgtgaatgggggtatctactggtggtgtaccacgcttgaaggaatgcgggatttaattaaatcccagcctgtctatgagatccggtattacggccagacgttccggatgaacgccgctcaggttctgcaggacaaatacacggtctggtgtggggagcaactgtggtcggcctttgttctggccgcctgtgtggcgctggttatctgcctgattacattttttatgaccacatggattctgggacgtcagggaaaacagcagagtgaggatgatgttaccggaggacgccaacttaccgacaatccgaaagacgttgccagaatgctgaaaaaagacggaaaagcgtccgatatcctgattggcgatttgccaatcattaaggattcagagattcagaactttttgctccacgggacagtcagtaccggtaagtctgaaatcattcgccggctggctaactatgcccgtcagcgcggcgacatggtggtgatgtacgatcgttcctgtgagtttgtcaaaagctactacgacccgtccatcgataaaattctcaacccctgtgacgcgcggtgtgccgcatgggatttatggcgggaatgcctcaccctgccggattttgataatgcggcgaataccctgatcccgatgggcacgaaggaagatccgttctggcagggttccggacggaccatttttgctgaagcggcatacctgatgcgtaatgacagcgaccgcagctacagtaagctggttgacacgctgctttcaatcaagattgaaaaactgcgaacctacctgcgtgattccccggcggccaacctggtggaagaaaaaatcgagaagacggccatttccatccgggctgtgctgaccaactacgtaaaagccgtccgctatcttcaggggatcgagcgtaacggtgaaccgttcaccatccgtgactggatgcgtggtgtacgtgaagatcagaagaatggctggctgtttatttcttcaaacgctgacacacattcttccctgaagccggtgatttccatgtggctgtccattgccatccggggcctgctggcgatgggagagaaccgtaaccgtcgggtgtggttcttctgtgatgagttgcccacgctgcacaagctgcccgacctcgtggaaattgtcccggaagcccgtaaattcgggggctgctatgtctttggtattcagtccagtacacagatggaggatatctatggcgagaaagcggcggcaaccctgctggatgtgatgaacacaagggcctttttccgctcacccagctataagattgccgactatgtcgcccatgagattggtgaaaaagagatcctgaaagccagtgagcagtattcctatggtgccgatcccgttcgtgacggggtgtcgaccggtaaagagatggagcgtgtcacactggtcagctactccgatattcagtcactgcccgacctgacctgttatgtcacgctgcccggaccctatccggcagtgaagctggccctgaaataccaggaacgtcccaaagtggcgccggagtttattccccgggaaatgaatccggaggcggaagcccgtctgagcgccgttctggctgcaagggaagccgaggtacgtcagatgtccagcctgtttgaaccggatacagaagcggttgcgccgacagcagcagaagcgcaggctgaacagccgcaacagccgcaacagccgcaacagccgcaacagccgcaacagccgcaacagccacagcccacggttgtcagcgataaaaaatcagcagcggcgggtaccgccgtgaatacgcctgcaggcggtgtcggacaggaactgaaaatgaagccggaagacgaagagcagccactgcccccccgggattaa

SEQ ID NO: 376067 - DNA, 489 bp, Salmonella enterica
atgaaaaatttagctcagattgttctggtgacagtggtacagtttattgcctgttatctagctgagtggggagtcgctgaaacagggattatcctgttatttgtcctgctgtggcaggggctgtttatctggttatttattcaaattcgtaaaaaaaataacatatctgatgagttcaagtttagtaaaggaatttggtatgtaattatgcccgtatgctcattactctcgccattattaagtttaatgatttttatcggtggaacattatatgaattaagacgagtaagtggttgtataagcataaaagagtgggtgaaatgtcagcttgatgaccaatatgatgaagatagggggctggattttgaatctgttgagtatcgtcaaacgacttactacaacccctcaactggatatcctatgcatggaggagttgattcggctggtaatacttttgggtctcgctggcaggataataatgacaggtaa

SEQ ID NO: 376068 - DNA, 2823 bp, Salmonella enterica
gtgaacgaagtctatgtcattgccggcggagaatggctgagtaataacctgaacgccattgcggccttcatgagcacccggacgtgggactccattgagaaaattgcgctgaccctgtccgttctcgcggtgtccgttatgtgggtacagcgacataacgtgatggatctgctgggctgggtggcggtgtttgtgctgatatcacttctggtgaccatacggacatcagtacagataattgataacagcgacctggtgagggtttaccgggtggataatgtgccggtcggactggcactccccctttcgctgacgacccggatcgggcatgcgatggtggccagctatgagatgatttttgcccagccggacagcgtcacctacagcaagacaggtatgctgttcggggcgaatctgattgtgaaaagcaccgatttcctgtcccggaatccggaaatcattaacctgtttcaggactacgtccagaactgtgtgctgggggatatttacctcaatcacaaatattccctggaagaactgatggaatccgatgacccctatacgctgattttttcccgcccaagtccgttgcggggggtttatgacaaaaataatcattttgtcacctgcaaggatgcgtcggtcacgctgaaagacaagctgaatctcgatacaaagacaggaggcaagacctggcattattatgtgcagcagatatttgggggcaggccggaccctgacctgttattcagggaactggtaagtgacagttacagttatttctatggctccagccagtcagccagccagatcatgcgtaagaatgtaacaatgaacgctctgaaagaagggatcaccagtaatgcagcccgtaacggtgataccgccagtctggtgaatctggccaccacatcctcgatggaaaaacaacgtttgtcacatgtctccattggttatgtgacaatgcgaaacctgccgatggtacagactattctgctggggatagccatcgggattttcccgttactggttctggccgctgtctttaataaactgacgctgtcagtgctgaaagggtatgtatttgccctgatgtggctgcagacatggccgttgctgtatgccattctgaacagcgccatggtgttctatgcgaaacagaatggtgccccggtggtgctgtcagaactctctcagatacagctgaaatattccgatctggcatcaaccgcaggttatctctctgccatgattcccccgctgtcgtggatgatggtaaaaggtctgggcgctggattttccagcgtttacagccactttgcgtcttcgtctatcagcccgacggccagtgcggctgccggcgtggtggacggcaattattcctacggcaacatgcagacggagaacgtcaacggcttcagctggagtaccaacagtaccacgtcatttggccagatgacttaccagaccggtagtggggcgaccgccacgcagacccgggacggcaatatggtcatggatgccagcggtgcgcagtccagactgccggtgaatatcaacgcgacccggcagatagcggcggcacagcaggagatggcgcgggaagccagcacgcaggcagaaagcgccctgcatggtttcagcagcagtatcgccagcgcctggaatacgctcagccagttcgggacgaaccggggcagcagcgactcagtgaccagtggtgctgacagcaccatgagcgcgcaggattccataatggccagccggatgcgcagcgcagtggaaagctatgcgaaggcacataatatcagtaatgagcaggccactcaggaacttgcagcgagaagtacgcgaacatctgggggtatttatggtgatgcaagtgcagagtggggcataaggcccaagatattgggggtcggtggtggagctggtgttaaagccggtggtcgtgctggtattgattggagcgatgatgatacgcatcaggccagcagtagttcacgatccagccaggatgttcgtcatggtgttgatgccaaagccacgcaggattttaaggaggccagcgattacttcacgagccgtaaggtcagtgagtccggaagccatacggacaataatgctgattctcgtgtggatcatttgtctgccgccctgaactcagcgaaacagagttatgaccagtacaccacgaacctgacccgcagccatgagtatgctgagatggcgtcccgtacagaaagcatgagtgggcagatgagcgaagatttgtcacagcagtttgtgaattttgtgcaaaagcatgcgccacaggatgcagaaaatattctgacaaataccagctcgccggaggtggcagaacgacgtcgggcaatggcttgggcctttgttcaggagcaggtacagcctggtgtggataatgcctggggcgaagcccgcggtgatattggcagtggtatgagcacagtatccggtggtggtgataaacaggatgtggtagccgatcatcaggcccatcaggcaacggtggaacaacggacgcgggacagtaatatcagtaatgatgtaaaaaaccaggttgataatatggtcacagactatcattccgatataaacgatacttatggaaatatccagggtgaggaaaagactattgaccagcagtattctggcctgcaaaaacagtataaaacagaagcactatctcagaataataaatataatgaagaaaaggctgcacaggaaaggatgcctggcgcggatagtcctgaagaactgatgaagagggcaaaagagtatcaggataagcacaaacagtaa

SEQ ID NO: 376069 - DNA, 1383 bp, Salmonella enterica
atgcagggtaaaacgagaattaaaccgcttttcatattatgtacggcgctgatgaccgtcgcacccgccgtctctgccgatgtgaacagcgacatgaaccagttcttcaataagctgggctttgcttccaataccacacagccctccgtctggcagggacaggcggcaggatatgcctccggcggctctttatatgcccggacacaggtaaaaaatgtccagctggtctccatgaccctgccggatatcaatgccggttgcgggggcatcgatgcctatctcggctcattcagtttcattaacggcgagcagctgcagcgttttgtgaagcagattatgagtaacgccgcagggtacttttttgaccttgcgctgcagacgacggtgccggaaatcaaaacggcaaaggattttctgcagaaaatggcctccgacattaacagtatgaacctcagctcctgccaggcggcgcaggggattgtcggggggcttttcccaaaaacacaggtctcccagcagaaggtctgccaggacattgccggtgagagcaatatttttgccgactgggcggcgtcccggcagggatgtactgtgggcgggcaatccgacagcgtcagggataaagccagtgacaaggataaggagcgggtgaccaaaaatatcaacatcatgtggaatgctttgtccaaaaacaggatgtttgacggcaacaaggagctgaaagagttcgtgatgacgctgaccggttcactggtttttggacccaacggcgaaatcatgcccctgcctgccagaaccaccgaccgggctattatccgggcattaatggaaggcggaacggcgaagatataccactgcaatgattcggataaatgcctgaaggtggtggccgacacgccggtgaccatcagtcgcgacaatgcgctcaaatcacagattacgaagctgctgaccagtattcagaacaaggcggtcagcgacactcccctggataataaggaaaaagggtttatctccagcaccaccatcccggttttcaaatacctggttgacccgcagatgctcggcgtgtcaaccagcatgatttatcagctgacggattatatcgggtacgacatcctgctgcagtatatccaggagctgatccagcaggcccgggcgatggtggccacagggaattatgacgaggcggttatcgaacatatcaccgacaacatgaatgacgcgacccggcagatagcgtccttccaggcgcaggtccaggtgcagcaggatgcgctgctggttgtcgaccgtcagatgagctacatgcgccagcagctgtcagcccgcatgctcagccgttaccagaacaactatcattttggcggaggtgcgcagtga

SEQ ID NO: 376070 - DNA, 549 bp, Salmonella enterica
atgtctctcaataaggctttgctgttcctgttgcttctgatggggacgggggttaatgcctccacgcgggaagagattgaacggctgtataacccgcacgggatggccgcaccgtccgggcaaaagcagccagcagatacgcagggcgtgcagaaagtaacgccggcgccccgctggtttcgtctcagcaacggtaaaacggttaacctcgccgactggaaagtggtgttgttcatgcaaagaagctgcccctggtgccaccagtttgacccggtactgaagcaggtggcacagcagtatggattttcggtattcccttataccctggacggacagggggatgccgcgtttccggaggcgctgccggcaccgccggaagtgatgcagaccttcttccccaatattcccgtcgccaccccgacaacatttctggttaacgtgaacacacttgaagcattacctcttttgcagggggccaccgacgccgccggttttatggcccggatggataccgttctgcagatgtacggagaaaaacatgcagggtaa

SEQ ID NO: 376071 - DNA, 294 bp, Salmonella enterica
gtgcgtaaatataaattatcgcttcctttaccggatattactggagtatgggttttctccctgggcgtctggtttcacattgtcgggcggctggtttaccgcaaaccctggatggctttttttctggcggaactgattgccatcattctggtgttgtccggcgcttaccgggtgctggatgcctggatagcccgcgtcagccgggaagagcgtgcgttactggaagcccgtcaggctgccattctggctgctgaaaaagaagaaaagggggataaatcacatgtctctcaataa

SEQ ID NO: 376072 - DNA, 750 bp, Salmonella enterica
atgcgaaaaatacagaccgtatgggtggcagcgttactctgtggctccctgacggcatacggaaaagatgccggatggcagtggtataacgacccggtaaaattacctgacccaaaaacgacggataaatccgctcaggttcgtcaggagcctgacattatgcagaaattatctgcgctgcagaccgcaacaaagcgggcgctttatgaagccattctgtatcccggtgtggataattttgtgaaatatttccggctgcagaattactggacgcagcaggcggggcttttcagcatgagcgccaaaaaagccatgctggcgcatcctgaactggactataacctgcagtacagccactacaacggcacggtacgtaaccagctggccgcagaccaggctcagcaacggcaggccatatcaaagctggctgaacactacggtatcatgttcttttaccgcgggcaggaccccattgacggccagctggcgcaggtgattaatggctttcgcgccacttacggtctgagcgttatcccggtgaccgtggacggggtgattaacccgatgctgccggatacgcgtcctgaccaggggcaggcgcagcgtcttggtgtgaaatatttcccggccatgatgctggtagacccgaaacagggcagtgtccgtccgttgtcatacgggtttattacgcaggacgacctggcaaaacagttcctgaatgtgtcagaagattttaagccgaatttctaa

SEQ ID NO: 376073 - DNA, 216 bp, Salmonella enterica
atgaagataatgtcttttctggttcgggtggtggtgacgcttattgtgatatccccagcggtgtactggtcatgggatgcggtaagcacaaccacagcggacgatatcatgctggcggtgctcattattgccgcttacggtctgatgttcacgctgctgttctgtttcgtgaatgtactgacgaaactactgcagcatgataatgaatccagttga

SEQ ID NO: 376074 - DNA, 378 bp, Salmonella enterica
gtgagttttcgttccactgagcgtcagaccccaaaaacgaacaaactgacggtcagtgtcggggaattctgttcgaaaaaggtactgggtgtctgtctggagaagaaacgcagctactgccagtttgattcgaagctggcgcagatagtccagcagcaggggcgcaacggccaactgcatatcagcttcggcagttcaaaacatcctgactgccggggtatcaccgtggacgaactgcagcagattaaattcgaccagctggacctcacgaacttctacgaagacctgatgaataaccagaaaatcccggacagtggcgcgctgacggagaaggtgaaagaacaaattgcagaccaactcaggcaggccgggaaataa

SEQ ID NO: 376075 - DNA, 582 bp, Salmonella enterica; identical to SEQ ID NO: 370530

SEQ ID NO: 376076 - DNA, 714 bp, Salmonella enterica
atgaaatttaaatatgctttaacttctctcgcattatctgttgcaattttgtcatcagtaccttctactgctttcgccatcggcggcgccagcggcgctaaagtggactatcaggtccagggaaaaattggcgaagttgttatgaacccctatgatatcgcgccgctaaccgccgttattcgtaatggcggttaccagttacgtgacgtgcatgtacggattgtacccaaagaaaatggccaggagatcgcgtataaagttaataataaataccttttaacgtatggcggtattcccgtctttggtctttacccggattatgtcaataccgttgaagttgaatatacaagtatccagggtagtaaaaccgaaaatgtaaaagaaagctataaaatgtatgcaccgcctgcctatattgaatcagcgggtacaaaagaagaacaatcagcactctttactatcgatgttaaaaaggtttccccagaatttaaagatcgcttgtatcttttgaataatacgaaagataagtctgggaatggaacgcgtactgtctggaacaaccctactgggggtgcattagaatggaacttcactacagctaacgctattatcgacacctccggtgatattcgttggtttatgaatccaagttcaatttatgatttaaagtcaatttatcgtgctggcgttatgatgggctttaaacaaaactag

SEQ ID NO: 376077 - DNA, 264 bp, Salmonella enterica
atggacggcgaactgaagaacctcaaatgcaatatcagtcagcttgccgctattacagggttacatcgacagacggttgtcagtcgcctctcgggcgttcccctggcactgggaagcaatgaaaaaaacaagctgtatctcctgacggatgtgatccgcgtactgatggaaacgcccgtttcccaggctgctgaacatcaggacccgaataaaatgactccaaaagagcgtaagaactggtttgactccgaaaaggggcgttaa

SEQ ID NO: 376078 - DNA, 984 bp, Salmonella enterica
atgttattgaaaaatattgtcataggtgcattaatggctattcctgcgctggcgtcagctaatagcctcacggaaacacgggaaagaatggccattgagcaacaagctatcgcctatactgtcagccaaaagtgggacaagctggacgctatgtttcaggaatacaataccggattcccgacaaccagcggcggaactcataaactggttatcgcatggggagggatctataatcttttttcagtagatgtttccgacaatggtatttctggcgtggcaaaagagtggcttaaagcaaaccccaaatccacgggtgcaaggctgctgcaagcaatggtttttgatgctaaagccgtgaatttacgcggtgaaggtgcggccagcacggtggactctgatatatggccgaaatataaaaagctgatgattcaggaaaaagagtatctgttaaagaacaaagatattgccgacaaagatgtgacctggtatcaggaaatggaaatggtcgcacgcaatcttgaggataaagagctgctctatagcactttggaagaagccagcaaaaaatatcccgcctatcaaaatatttatatcgaggccatggttgctcgtttgcctaaatggggtggttctccggaagaagtcgaaaaaatcgccagaatggccgcagaaaaaaacaaagatcaatcgggactttcttactacgcttatatctggagtaatgcaatccattaccaacctgaattaatggccttactgaataaacgtcagattgtctcctgggacgatatgctgcaaggttggagagatcgctacaaacagttcccatcaacccgcacgcttaataatattctgataagctcctgcattgcccgcgataaagactcctttgtgaaagcagataaaatgattcaaggggaaacggagcgggatacctggccacaagggttaaattatcgggaatgccagcagtccttccaataa

SEQ ID NO: 376079 - DNA, 162 bp, Salmonella enterica
atgattaagttaggccaagcgtataatgtaatacgcttaggaaaacttattccaagttgttctgggcataatcaacaaaacactggtgtctataaaagtgcagcagaaattatttgtctttttgtttttgtaatttataaatattatcagatccatatttaa

SEQ ID NO: 376080 - DNA, 495 bp, Salmonella enterica
atggcactttcagataccaaattacgcacacttgctcccagaaaccgcccctggcaacttgccgatcatgacgggttggtgattgaagttcttcccaccggacgaaaaatctggcgtttccgctaccgctttgacaacaaatcgcaacagatcacgctgggcgaatacccagctttctcacttgcagaagcgcggctctggcgtgaaaagtgccgctcactggttgcccatggcatcaatcccgcgcagaaaaagcaggaagaaaagcttaaacagaaagacccaacgacagtcaaaacattcgccaaacgctggctgaccgatatcgttgaaaaaagtaaccgcgatccacgcaacatcactcgcgttatcgagaaggacatcattcccatcatcgggaagctggaactcgaagaactcacaactgcccacattcaggtcgtgctcgaccgcatcaagcaacgaggttcggatcacgtcgcattactgacgtga

SEQ ID NO: 376081 - DNA, 897 bp, Salmonella enterica
atgagcattttggaacgcttttttggccgtaaagaaaaaaactcatctaatatacaaggtgttttagtagcgaatgctgaagttgataacccactaagtttagttgttgtatttgatactctcccggaaaataattcaaaagaactcacccgcttgttgcgtaattatcattccagtatgaaacaggcaacgtgtgaacttgtccctgaactggatttttttggtttagcaggatggggtaagcatgtaatatcgatggttggatttaaaacgccttaccctcaggaatcaatcgaacaatgcgtcgcgccagctcattatccccaggaagtaaaagagcaagtacgggcaaccagtgcaaatattattttatattgtaaggggtatgatacttcacctttagagcaatatgttgcgttggctgtggttgcaggtgcattaagtaacatgggggctgtcgctgtattaaatgaatcggctcacacttcattacctgcgggggtatttaagtctcaggagttgggtaagcatagtctggaaatgttgcgtgaaggtttcccgctgacctctctattttgtggatttgtgaaatatgaagttgaggatatcgaaggcgtatggatgcgtacctatggtgctgattgctttgggctaccagatttcgcagcacacgcacaaggtcatcacgaagggcaaaaatattctgatattttcaataatgttctgcgttacctgcttgaaagtggagcagaaatggctgccgggcataccatgcaagtcggtaaaacgacatttatgaaactgcgcgatccccttgacgatgaatattacttacaggggcctggaaccacattagtggttgaactgattgaagaagatgagtgtaatgctcattga

SEQ ID NO: 376082 - DNA, 186 bp, Salmonella enterica
atgctatttgtcgtatacgtattgcagccagaggtcccacttgtcatttatcactcttcacatgatcacggtgataagaatggcaagcgtaggaaaacatttctaagatatttatgctgtttcgccctaaatatagtcctaaaaaaaatcctggcgcagggccaggattttaagagatcgctataa

SEQ ID NO: 376083 - DNA, 1521 bp, Salmonella enterica
atgaacaccatgacactcactccggggcagttaagtctctctcaactgtacgatatctggcgtcatccggtacagcttcggctggacgccagcgccattgacggcattaacgccagcgtcgcgtgcgtcaatgatatcgttgccgaagggcgtaccgcctacggcatcaacaccggtttcggcctgctggcgcagacgcgcatcgctgatgaagacttgcaaaatctacagcgatcgttggtgctgtctcacgccgcgggcgtaggcgacccactggatgacgcgatggtgcgtctgatcatggtattgaaaatcaatagcctggcgcgcgggttttccgggattcggttgagcgtgatagaggcgctcatcgctctggtgaatgccggcgtgtatccgctgattccggcaaaaggctcggttggcgcgtcgggcgacttagcgccgctggcgcatctgtcgctgacgctgcttggcgaaggaaaagcgcgctggcagggcgaatggcttccggcgcagacggcgctaaaaaaggccggactggagcctgtcgcgctggcggccaaagaggggctggcgctgcttaatggcacccaggcatcaacggccttcgcgctgcgcggtttgtttgaggcacaggagttatttgcctccgccgttgtctgcggcgcgctgactaccgaagccgtactgggatcgcgccgtccttttgatgcgcgcattcatgccgcgcgcggacaacaggggcaaattgacgtcgcgcggttgttccggcacctgctgaccgataccagcgccattgctgaatcacatcaccactgtcataaagttcaggacccgtattcccttcgctgccagccgcaggtaatgggcgcttgtctgacccagttacgtcagacgaaagaggtactgctggctgaggccaacgcggtatccgataatccgctggtctttgccgatgcgggggaggtgatctccggcggtaacttccatgctgaaccggttgccatggcggcggataatctggcgctggcgatagcggaaatcggcgcgctatcggagcggcgcatcgcgctgatgatggataaacatatgtcgcagttaccgccgttcttggtgaaaaatggcggcgttaattccggttttatgattgcccaggtcaccgccgcggcgctcgccagcgagaataaagcgctggcgcacccgcacagcgtggatagcctgccgacctcggcgaatcaggaagatcatgtctcaatggccccggcggcagggcggcgactctgggaaatggcggcgaatacccgcggcatcattgccgtggagtggctggctgcctgtcaggggatagatttacgggaagggttaacctccagcccgttactggaacaggcgcggcagacactgcgcgagcaggtggcgcactatacgcaggatcgttttttcgcgcccgatattgagtgtgcgacggcgctgctggcgcaaggcgcgttacagcgtctggtgccggactttatgtga

SEQ ID NO: 376084 - DNA, 1146 bp, Salmonella enterica
atgcctgaaagcaagtatcgtcagcagactatccgcgcgcccagaggcacggtattaacggcgaaaagctggctgacagaagccccgctgcggatgttaatgaataatctcgatcctgacgtggcggaaaatccgcatgagctggtggtctacggcgggattggtcgcgccgcgcgcaactgggaatgctatgacgctattgttgatgcgctcacccggctggaggcggacgaaacgttgcttattcagtctggcaaaccggtcggcgtatttaaaacgcacgacaacgcgccgcgggtattaatcgccaactccaacctggttccccactgggcgacatgggaacattttaacgaactggatgcgaaagggctggcgatgtacggtcagatgacggccggaagctggatctatatcggcagtcagggaatcgtgcagggaacatacgaaacctttgtcgaggcggggcgtcagcactataacggcacgctggcgggacgctgggtgctgactgctgggctgggcggcatgggcggcgcgcaaccgctagccgcgacgctggccggagcgtgttcgctgacgattgaatgccagcaaagccgtatcgattttcgtctgcgtactcgttacgtggatgagcaggccgccacgctggatgacgcgctggcccgcattacgcgctacacccgcgaggggaaagccgtgtccgtcgccctgtgcgcgaacgcggcggatatcctgccggaactggttaatcgcggcgtgcgcccggacctggtgaccgatcagaccaggcccacgatccgctacatggctatttaccctccggctggcgctgggaggagtatcagaaaaacgcgcaatccgatccccacgggacgatgcaggcagcgaaacgttccatggcggcgcatgttcgggcgatgctggcgttcagtaaaatgggcgtgccgacctttgactatggcaacaatattcgtcagatggcgaaagagatgggggtggaaaacgcctttgattttccgggatttgtgccagcctatattcgtccgctgttctgccgtggcatcgggccgtttcgctgggtggcgctgtccggcgatccgcaggatatctataaaaccgatgccaaagtcaaagagatag

SEQ ID NO: 376085 - DNA, 162 bp, Salmonella enterica
gtgatttgccgcgatcgccagctcatttatgaagaagcgccgcaggcgtataaatccatcgatagcgttgtggattgtctggcagacgccggactgattacgccagttgcctgcctgcgtccggtgctgacgctgaaaacctcaggggagaaaagcgcatga

SEQ ID NO: 376086 - DNA, 249 bp, Salmonella enterica
atgggcaattatattcgtcctttatcagatgtggtattttctatcgcatcagataacctgtggatcgaagattccgcgatccaacaattatatacgacggctaagttaaccggtatgaaacgcgttatcgggatgccagatctgcatccggggcgtggctatcctattggcgcagcctttttctcgcgtggacgcttttatccggcgctggtcggcaacgatatcggctgcggcatggcgttatggtaa

SEQ ID NO: 376087 - DNA, 159 bp, Salmonella enterica
atgtgtaaaagccggaggggttatcttttcccggctttttattatcaattactcattaactcctgttccgttcttttgcgtttaatcaccggaatatctccggtattgttcagcgccccggaaatgtttttaaccactgttctgcactccgtttattaa

SEQ ID NO: 376088 - DNA, 276 bp, Salmonella enterica
atgaatgcctccggcgtcagcgtccgccatatcaacagcgaaacctgcatgaccgcctgttactcacaaatccccagccagcaccttaagggtgactggcaggaagaagcgggatttgagaccgggcacggcgtcaccgtgaagatctccgaggggtgtttgatcctgattgcagagacggacgaagtgagggatctacggaaggagctttatcaggtgaaaaagtcgatgaagcatattaaggcgggggtaaataatgtggtgaacggggattaa

SEQ ID NO: 376089 - DNA, 438 bp, Salmonella enterica
atgctgcgttttgtgaagcccggagacatattttgttttaaattagatgaagatagatattgttttgggcgaattataacactaatgactgtcggacatctttctgaattatttgatataattaaaaaaccccctggaataacagagttagaaattagtaatgcaaggcgaattattgaaccaattatagtggatacatattctttatttgataagaaattagaaaatggaagtgactggagaattattggtcatcaggttaattacaatccaaaaaatttagatggtatctattttgcacttggaataggtgattcctgtaaaaagaaagactgttacggaaatgattttctcatttcagaaagtgagtggaaaacacttcctaaattatctcctaaagggggttttgatatcaaaaaacggcttgaaattgcctga

SEQ ID NO: 376090 - DNA, 138 bp, Salmonella enterica
atgcttgtgcgctgggatctgttcgcccatgatcaaatgaattatatttattctctctatttgttgagggaattttttcacctatggttccggttctggttttatatttctctatataatatttctcgtaacctctga

SEQ ID NO: 376091 - DNA, 447 bp, Salmonella enterica
atgttaaattcaaatatgtctgaacttagaatcgaactggagaatgcgattaaaaatctcggtattcatgattatcgtgtcgataaacccgaacaaatcgtttctgagataaaagagatatatgttaatggtaatcctagaacctggtggttatcattaaaacatagacaatatgtcttttcttataccgataattctggatataaaaacatatcacaaatagtaagtaaacaactcaatgaaagcaatgtaatcaacaaacatatatttttgattgctgatgaagataatgagcaaatatatgtatataacgttcctcttaactccctgcctgaaattatagaaaattgcagatattttgaatattatgttgcagatcatgaactatcttggcttatatgtgaaaatgatcatggtgatttgattgtatgctcaaccattaagtaa

SEQ ID NO: 376092 - DNA, 774 bp, Salmonella enterica
gtgtgggaggggttcaggctgttgcaggagaacgtgcagcagcagggctggcggacatatctgtacgatgcggaacagccgtacacgccggtggcgagcgtgacgggaaagggagaaagcaggcaggtgtggtattaccacacggacgtgacgggcacgccgcaggaggtgacggcggcggacggaacgctggtgtgggcggggtatatcaaggggtttggagaaaatgcggcggacatcagcaacagcggggcgtactttcaccagccgctgcggctgccggggcagtattttgacgacgagacagggctgcattacaatctgttcagatattatgcaccggagtgtggacggttcgtcagtcaggatccgattgggctggcgggggggctgaatctttaccagtatgcgcctaatccgattagatggatcgatcctttaggacttgctatcctggagcatcaatctaattttgatgcggcaaggagaaccggatttgaaaatgcgggtatgacaaaccctgaggatgtcactttctcgaaagtcgatcccaaaactggtactgttgttgagtttaaaggtccaaatggggctaaagttgcttatgatgcacctcatgcagatatggatgtgacagcagggcatgataaaccacatgttggttggcaatccgcaggaaaaagaggttccggaggagctaatagaggtaatattacttatgatggcccacaacatccgcatcgctctgactctaagggagatgataaatgttaa

SEQ ID NO: 376093 - DNA, 264 bp, Salmonella enterica
atgctaaataaatttaaattgtgggtgagcaaacatactgattatacggtaattcataatgaaaatgatttatcttacagtattattatagattttgaagatgaccggtatatatcaagatttactgtatgggatgacctaagctgtatgtcagaagtaatggatgtggatactggtttatataaattaaacaagagaaacgaattttctacatttgatgaacttctggatatatttgatgattttatgataagtattaaataa

SEQ ID NO: 376094 - DNA, 1656 bp, Salmonella enterica
ttgtcgcatttaacggcagcgcaaaatgttgaaatccccgccgtctacgccggcattgaacgcaaaaaacgccaggcgcgcgccagagagttgcttttgcggctgggattaagcgatcgcgtcgattacccgccttcacagctttctggcggacagcagcagcgtgtcagtattgcccgcgctctgatgaacggcggacaggtgattctggcagatgagccgaccggcgcgctggatagccattccggcgaagaggtgatggcgattttgcgccaactgcgcgatcgcggacatacggtgatcattgtgacgcacgatccgctgattgccgcccaggcggagcggattattgaaattcacgatggcaagattgtccataatccgcccgcgcaggaaaagaaacgcgaacagggcgttgacgctgccgtagttaatacggctcccggctggcggcaatttgccagcagctttcgcgaagcgctgtcaatggcgtggttagcgatggccgctaacaaaatgcgtactttactgaccatgctgggaattattatcggtattgcgtcggtggtgtcgattgtggtggtcggcgacgccgcaaaacagatggtactggcggatatccgcgctatgggcactaacacgattgatattcatccaggcaaagattttggcgacgacaacccgcagtatcgacaggcgctgaaatatgacgatctggtggctattcagaaacagccgtgggttaactctgcgacgcccagcgtttcaaagagcttacgtcttcgctatggcaatattgatattgccgtaaatgctaatggcgtcagtggcgattattttaacgtttacggcatgtcctttagggaggggaacaccttcaatgctgtacagcaacaggatcgcgcgcaggtggtggtgctggatgccaacacgcgacgccagctatttccaaataaagcgaatgtcgtaggggaagtggtgctggcgggtaatatgccggttattgttattggcgtggcggaagagaaaccgtccatgtacggcaatagcaatctgttgcaagtttggttgccctatagcacgatgtcagatcgcataatgggtcagtcatggcttaactcgatcaccgttcgtgtgaaagatggcgttgatagcgatcaggctgaacagcagcttactcgcctgctcaccttacgccacggtaaaaaagacttcttcacctggaatatggacagcgtcctgaaaacggctgaaaaaaccacctatactcttcagttatttctgacgctggtggctgtcatttcgctggttgtcggcggcatcggcgttatgaatattatgctggtttccgtcaccgagcgaacgcgtgaaatcggcatccgtatggcggtaggcgcgcgcgccagcgatgtgctacagcagtttcttattgaagcggtgctggtttgcctggttggtggagcgctggggattagcttgtcgatgttcatcgcatttatgctacagcttttcctgcccggctgggagatcggtttttcactgactgcgctggcgagcgcgtttttatgttcgacgtttaccgggatactgtttggctggctaccggcgagaaacgcggcgcgactggacccggtggatgcgctggcaagggagtaa

SEQ ID NO: 376095 - DNA, 474 bp, Salmonella enterica
atgagtctgttagcaaaagtgcaggcgtttatcgagcttaatccggggctgacatcaaatgagattgccgatgcttttcctgaatacgcacgctttgatgtgcagcgttcagcgagcaagttgtatcggtgtaagcgtgttaaccgccgcctggatggagatgtatttcgctattacgcaggcaaggacgaggcagtgattttgacgctacgacagaaaaggtcaggtcgcacaggttcgggtgatccgatggtgctggcaaagctggtaagcctcgctgaagacctggaatccagagggttgtttaagcgcgcctcagcggtgtggctggaggcatttagcgaaagccagttgactggcgagcgcgaagcatttttgcgccagcgccagaggtgccttgatagttgcaaaaagccggtcagaccgggtgaacagatttatctggcagggcgatttgtggggaatgtggaatga

SEQ ID NO: 376096 - DNA, 339 bp, Salmonella enterica
atgaataactactacacatgctccttctgcggggccaatgaaatggatgcaaaaaaaattatcgctaaaggcggtaatgctgatccagcaatctgttctgagtgcgttgttcgctgcgtaggtgttctggcaaataccagtactaccgaaagcacaagaagtacggaaatgaataatgctgccagcatcgaattctggcagctgataacagctctttcagagatggctatttcttctctaaaagctgctcaagagatgggagacgaagaaagcgcctgtttaatagccaaaaaactgtcagttaagttcgattatgcgccttgtcgagaaactgtttaa

SEQ ID NO: 376097 - DNA, 225 bp, Salmonella enterica
atgcctattttagaaactacgttgaatagtgattcttccaatgaaggccttgccgctgatgttcgtgctctaaagattgcggtggcccttttggttaccagaattccgctggagcacaagccttatgccgtttgtgatgcgttaaataactcaggagagagcagtgcatctgagcttgctgacctgattaaacagtttctcgacaaggcgcataatcgaacttaa

SEQ ID NO: 376098 - DNA, 534 bp, Salmonella enterica
atgacagtccatacattgaagcaatgccgcccggaccaagaagaaactgagtatttatggaagctgtttcatgctgcacaacgtaatgatgctcgctggcacggtagtgaaatcagcattatcgccgatgagctatcccggacggatttagatcgtaaccaaaaactgttccttctccgctcctggcaagtgctggtagacgacaaaggtggattcgggcgctttatgggtgcctttgatacttacgtctacaacatgcaagacccggatgatgactgcgtagcgtggaagcctgaacttagcaacctgctgtgtgacgggcaattgttggacgtggttatcgatgcttatcagtctgctcggcagcgcatagcagaactggaggcgcggacggtcaacctgtcaaaacgcagcgttggcgaagtcatgcacatgagcggattcagccgggattatgccgagggttggtgtgctggtaatgacaatgcgatacacgaaatacgcaccgctggcatcaaggttaagggggagtga

SEQ ID NO: 376099 - DNA, 258 bp, Salmonella enterica
atggctactttgacgaaacaggaaaaagcctgggtaaagaaactcaataagctactggcggagtgtccctcaaatcggatcgcgtttgcgacgactggcgattgtgaagtatcgctgtttgatgtgactcgctatgacgaaatttttgatgaagtagagaaggggaaaagcgaatttatcccttccgctatgcgtatcggcgcaacctttaatgagtgcctgacatttcctaaccaggttgaaagcacggcaggctga

SEQ ID NO: 376100 - DNA, 582 bp, Salmonella enterica
atgaccactattaccaaagaacgtatcgaattgttcattaaaagtcctcttgaaaacgggcttacccgtggcgaacaaatggaactggcgcgtatcgcgctggcatcgctggaagctgagcctgtaagccaaacttacgagttgccacaaacgcagtttgagcaggttgctgacctctacgaaatgcaatttgatgatgggcgcacctgcgcattccacacagatggtgcaaaagctgctcagtggttgctcgcatgcgatggtaataaggtgcaggaatacgtcaggcttgagcgctatcatgaggctcttattggcaactctccggtaattccggatgattgggttatggtgccgaagaaactaactgctgagaacggtgccaagagtttgctatccggtgagtttttagaaactacttttataagctttcctgaatgcttggccgacgaagaatgcgaaagctgcgacggcagcgggcgaattaaaattgaggttcctgtcagctggacgacgattaaggctatttggaataaaggcgttgaacattttcgtagcagcaccgcaacaggggacaactaa

SEQ ID NO: 376101 - DNA, 2277 bp, Salmonella enterica
atgagcattagtcgtcgttcttttttgcagggggtaggcatcggctgctctgcctgcgcgctgggcgcttttccgcccggggcgctggcgcgcaacccgattgccggcattaacggtaaaaccacgctaacgccaagcttgtgcgaaatgtgttcctttcgttgccctattcaggcgcaggtagtcaataacaagaccgtttttatccagggcaatccttctgcgccgcagcaggggacgcgcatatgcgccaggggcgggagcggcgtcagcctggtcaatgacccgcaacggattgtaaaacctatgaaacgcaccgggccacgcggcgacggtgaatggcaggtgattagctggcaacaggcttaccaggaaatcgcggcgaaaatgaatgccatcaaagcgcagcatggccccgagagcgtggctttctcttccaaatcgggctcgctctccagccatcttttccatctggctacggcctttggttcgcctaatacctttacgcacgcctcaacatgccctgccgggaaagccattgcggcaaaagtgatgatgggcggcgatctggcgatggatatcgctaacacgcgctatctggtttcgtttggccacaatttgtatgaagggattgaagttgccgatacccatgagttaatgaccgcgcaggagaagggggccaaaatggtgagcttcgatccgcgtttgtcgatattttccagcaaggcggatgagtggcacgctattcgtcccgggggggatttagcggttctgctggcgatgtgccacgtcatgattgatgaacagctctacgatgcgtcttttgttgagcgttataccagcggatttgaacagttagcacaggcggtaaaagagacgacgccggaatgggccgccgcgcaggccgatgtcccagccgacgttattgtccgggtgacacgcgaactggctgcctgcgcgcctcacgctattgtcagtcctggtcatcgcgcgacgttctcgcaggaagagatcgatatgcggcgtatgatttttacgcttaatgtgctgctcggtaatattgagcgcgaaggcgggctatatcagaaaaaaaacgcgtctgtttacaataaactggccggagaaaaggtcgcgccaacgctggcgaaactcaacattaaaaatatgccgaaaccgacggcgcaacgcatcgatttggtcgcaccgcagtttaaatatatcgccgctggcggcggcgtggtgcaaagcattattgactcggcgttaacccagaagccttacccgataaaggcgtggattatgtcgcggcataatcctttccagaccgtcacctgtcgttcggacctggtaaaaaccgttgagcaactggatctggtggtcagctgcgatgtctatttgagcgagagcgcggcatatgccgactatctgctgccggaatgcacctatctcgaacgggacgaagaggtatccgatatgtcgggactgcacccggcttacgctctgcgccaacaggtcgtagagccgattggcgaggcgcgtccgagttggcaaatctggaaagaacttggcgagcagttgggattagggcagtactatccgtggcaggatatgcagacgcgccaactctatcagttgaacggcgaccatgccttagcgaaggaactgcgacagaaagggtatctcgaatggggcgttccgctgctattacgcgaaccagaatccgttcgtcagtttacggcgcgttaccccggcgctatcgcgacggacagtgacaacacctatggcgaacagcttcgcttcaaatcgccctccggcaaaatcgaactttattccgcaaccctggaggaattgctccctggctacggcgttccgcgcgttcgtgactttgcgctgaaaaaagagaatgagctttacttcattcagggcaaggtggccgtgcataccaatggcgcgacgcagtacgtacctttactcagcgagctaatgtgggataacgcggtctgggttcatccgcaaacggcgcaagaaaaaggcattaagaccggcgatgagatctggctggaaaatgccacgggtaaagagaaaggtaaggcgctggtgacgcccggtatccgcccggacacgctttttgtctatatgggatttggcgctaaagctggggccaaaacggcggcgacgacacacggtatccactgcggaaatttactgccgcacgtgacgagtccggtatccggtacggtagtgcataccgcaggcgtgacgctgagccgggcatga

SEQ ID NO: 376102 - DNA, 1089 bp, Salmonella enterica
atgactaaagagaaagatactgagcagcaggacctggtcaccagggctttctctgttagagagaaagaatcaggtaaagacatcattttgcgtcctaacagcaaccgtacggtgcagtctattgctttgatgcggctcgggctgttcgtcccatcaccaaagagtgtggggcgtcaaaatcgggaatataaaacggttggctttgacgcaacgaaagagttacagacgctctctttaatggagagcgaggggttcaccaatatttcaattgtcggtgagcgtcttaatatgtcagtagattttaagacgtggatgggcatcattcgaacctatgccaatcatccgattaacaatgacactataagcttaaaattcactgaattcctcaagctatgtacgcctgaaaattatcgctcatctacagcgtccagaaaacgtatagacgcctccttacgcaggttagcatccgttaccttgtcgttcaccagtaataactcgtccaaagtctatacaacgcatctggtacagtctgccctgttagacccggaatcagatcaggttgtccttcaggttgatcctaagattttcgagctctatcaatacgatcataaggttttgatgcagctgaaggcaattaaggagttggccaagaaggaaagcgcccaggctctctatacgttcatagagtcattaccgccaaatcctataccgatatcccttactcggctgaaaaatcgtctgaacctcaaaacacgagcaaatagtcagaatgctaccgtgagaaaggctcttgaagagttggcatcgataggatacctcaagtacaccgaaattaagaaagacggaaaagtatacttccagattcataagcgggatcccgatctgaatttgaacaatactcagcctcctttagaagtggttgaagatgaagaagagaactcagggtcttctgttttagaaggtgagttatgcccaccagctgacccgattgacggcgatgatgttcttaccgtccatgatttaaccgctgaagaactgcgctatattcgtagtcttcgaagccagaaaaagaacagcaacgccagctaa

SEQ ID NO: 376103 - DNA, 576 bp, Salmonella enterica; identical to SEQ ID NO: 267001

SEQ ID NO: 376104 - DNA, 2421 bp, Salmonella enterica
atgaaacatctcgcttttattactgctgtagccggactcggtatgtctgttcaggccccagctcagatatatgaatcggcctttaaggacacgaacggtattgagatccacgccccgtcttctcgtcttatgcttaatccggcatcaccggtaactttgacacttatttcaggtcttgatcgtttcgttaatgtcaaagtcacgaaagacactggaactgtcattcttaatactacgactacacggacgggtgtatcagaccgactaacagctgctgacggtagtgagttctacggcaaaaaagtaactttgcctgctttgggtgaaggcaaatttgtcgttcagataaacgtgttagatctcaatcagaagcctgtagcgacctataactataactggctaattgatgtcacccctccagcggcaaatgctcttaccgctaatactggttctggctctaccgctggtgacgtgtggaagcttggattagaggcaacggggcagtatgacttcacctcttcgggcgtaagtgatgcaaatggtattgataagggcctaatatatatttacaggcaggacggtagcctctacagcactacacagatgcagtatgacgtatccggccaaaagatgtaccacacttactctaagaattcagttaagggaaccggaataccagacagcaacctggatgaagactttactgcaaaagttgttatcttcgataacgcaggtaatagccgaacgctgccaactcaaaaatttcgctacgacaacacgctgggtgagatgacactgtgggccgttcatgatccaaatacgtcttccagcgtcgtacccggggtttctaattatccggcttacaaagccggtatggtcgttaacgaaaaccctattcgattagtctaccggatcccaaaatctaactaccgtgcttattcagaaggtgggcttcagttcatcaatcaatattccgcccccaaagagatagctgtagacagcacttatgcttatgttgaaatgactcttccctatggctcaattaatggggatatggctcgtatggcgaactttggccagtggggagggtattatccgtcatacagcctcgttctaaacccatctgcaaaccaaacgcctgcatttgcgggtacctgggtagatttcctcgatgataaggggaactgggttaagtggaaggattttgagagtgtggcttcatcacgactgccaattaaaatttcccgacttcgttttaacgttgaagcccggccctttgcacaggagatcggcggtaaggcgacctgcaccattccggcaggaaaaacctcgtgtgaagcgcctgagacgtttgatatggccttgggtacccagggctacaatagaatcctttacttcgttcgcagcatcagcaatcccattttgcggtctgagcaatggattatgacacgctggaacaataaacaactgccggtaataaactcgatatcatatgacgagactaacaagcagctggatgtactggcgtcacttgaaggcgatggtaactggttcgactcggtctcattgagggaattttatctttccgataagaacaccggtacccggatgtcaccaacaggcgtaatcaaatctcgtatctcaggtaactacacgattgcttatgatttatcccgtcagtctgaaggaaaatacaacgttgaggtcaacatcagggacttcttccagaaccagaccaataaaactttcggagaaattgctctggataacactcctccgacagtggccataacattcgacggaaagccggtaaaagacgatacggtagtgtacggcctggagaacctcaggatcgctctggcagataatctgacaaccccgaggataacccgtcttcagctcgtaggtggccccacagctgataacgttgagcttacgtggtcaccggcaggcaaagatacatacatgcctgagtatccgaggctgttcccaaatttcgaaccatctgaaaattattcaattagcgtaacagttgccgatagtcagtcgaataccaaaacctatactcagaagttcagttatctaccgaataaccttgtgcagttacataatctacgcacattgtcggtcagttcacctctcaaaacgacagatggcgtaccacttgcgtacctgtccactaacgttctgcgtaagacaaatggagaaattgctaaaggggtccagaacgcaacgctgactgtgcggaaggatgcagccttcggtattaaatttaatggggcacaggcggctccaggcgagtcagttgaggtgcaaatagatatgggccagggggataatcttctgttacccgtttatccttccgaaaatgggaaagttggcacctcagaattcatgattcagatcgacgagttgaagtaa

SEQ ID NO: 376105 - DNA, 588 bp, Salmonella enterica
atgttttcaaagcctatgaccactttcacaccagaacgtattgaacaaattttggaattttccgagggtagtaacccaagcgaagcaatgagtcttagagctgacgaagttgctgtactggcacgtattggaaaggcagttatgtcgattgcgcctgtttatcagtgcgagttttgccaccatgacgcaaccgggcaacttcagtggcactgggaagatgtgaacaaagctttttatgataaatacgatccagacagacgcggaagacgtcgaatcctctataccgccccgccgatgcctttagtttcggctgacctgcttaacatggcttcatctgctattgaagacttgctcactaacaaagacagaagtggtgcgggaatgtggaatgacattccagaacagctacgacgcgcagcagaactggtaatggataatagccgggccgctgaaatagaagcgatgctgatgcgtctttatgtagaatgtgacaccggtgagcgcagaggcaacggcagtcaatctggcgtagcaatgccttcgtggcaaaccgttgaagaggcacgtgtgttgctgggggtgaaatga

SEQ ID NO: 376106 - DNA, 264 bp, Salmonella enterica; identical to SEQ ID NO: 26605

SEQ ID NO: 376107 - DNA, 762 bp, Salmonella enterica
atgcaaatctcaactgaagttctgaacgtcttatctcgctgccgtgctgaagggaactttcttttcctggccgaccagctcgaccgcagcatttatgttaagacaaacaaagtgctggaagctgccggtggcaaatggaaccgaaaagagcaggcacatatttttacggcggatgcagctgagcgtatcgagcaaatcattctgacaggttcggtcgacatcccacgtgatttgttcaatttcttccctacccctgagaatttagtcacagatatggttctacgcgctgaaccagctgccggggaacgtgttctggagcctgagtttggtgatggccgcattctgaaagccttaaaactggcggctccggatgcattgattaccgggatcgaattgaacgatgagcgattccttgcagtgaagaacgatagtgtccttagcacaggggccgagctggtgcataccgactttcttgggtaccagcccgatgaaacttttgatgttatcgttatgaatccaccattccttaaacgctctgacgttaaacatgtcatgcatgccatcgcaatgctcgctaagcgaggtcgcttacaggccattctgtcagctggggtattgttccgggaagacacactgacaaaagcgctcagggagcgagtcaaacaacttggcggacaaatttcgcctcttccggatgatacatttagggagtccggaacaaaggtcaaaacagcccgccttgaaattgatcttcgccgctaa

SEQ ID NO: 376108 - DNA, 765 bp, Salmonella enterica
atgtataaattagtatctcctcgtgaactgactgagattattaccggtttactgcttaaacctgaactccttggtgagctggactcaccagaaaagcatcggatgtttatggcagatttaggccgggtggtggcagaacattgtggaggtctggtaaacagcgtcgtcttgccaggagctgaagttacagtgccggatgggttaccgcttaacggccagccagtacgttatctcggaatcaaagagagcatccctcacctccttgtagagcctgatgcttccttaccttcgctcgctaaaaacgtctggatgtatgcagatcctgaaggctggaaagaacattttggagctgaggaagactgccttactcatgaaatgatgcagctgttccgtaaaggtatccaggctcttcagaaggagcatgatacccctgaaattagcctcacacttcaggactggcgcctggaggaggaaacactgagagaagaggacagtcaggcctatcaggtcagcgttaccggccaacataacatccactgtgaagttgttaacaaggaaggtaacccctgttttggtgtcatgttcgaaatcgatcagggtgtgcctgccttacacatcaacaccggcggggatatgttgctccacattcattgcgcccataacggactcgttctgacccctgatgcaagcggtcagcgatttgagaaggctcccgttgaccgcttcgcttataacagcccatccctgctgttgtctgccgactaa

SEQ ID NO: 376109 - DNA, 525 bp, Salmonella enterica
ttgaaaccgatgctcaaaaaagattttttttcagctattgaaaaccttctcaaagctggctttcaacctcgcttttacactgttaacagtggacgaatcggtctcattacattcactgataaaaatggaacaaaacaggtcgaacaggtttattcctgcacttctttagccgccaatacttttggaaagcgcttcaccacatggttagaagaaatttttcaaaagcataatgaaaaaaaagtagctgattccgggatcgaggttggtagccgtgtctgggataaaatgatgtatacggtgcgcaccatttcagaaattcgtgctgggggtgtgctggtgctggataacggtgcacagcgtactctggatgaagttcaaaaaacggctcctgaagcaaaccaggtagagccaaaggaaatctcttcacttaaggagctgctgaacgcttccaaaaatctggagccgacttcgcctgaactaattgcggctcttaatgaggctcagtcaaccgccataaaacggtga

SEQ ID NO: 376110 - DNA, 438 bp, Salmonella enterica
atggcgatgaataaaaaagaacaagccgcctatgatgagctggtggcacaggccagaataaaccgcgctttacgctggtctgactatagcgttgaacgcgatatgcccgtaccagaggtctcgggggaataccaaaacggctggagcttcaacaccgccactggcactgtttatccgacatggagcggaactacggttcacggcacacgggaagagggagaggttgtcgatgcaacctcccgccgcatgcgaggcatgaatggtagccagaacggcataccacaatacagcaccaaagaacgcgccctgaaggcattacgctgttcgcttgaaatcaagtttgctatgcagctggatgccgtagataaagcaatcgcaaaagaattagagtcgtccaccgctcgccgggagagcgatacctcagatgccaaacggtaa

SEQ ID NO: 376111 - DNA, 258 bp, Salmonella enterica
atgccaaacggtaaaccatcaaatcaggcccgtgatcagaggggccttaacgccctgaaagaggcggttccagcgacggcacaactacagatgcgggttacccctgatcggaaactgcgttacgtcaatcaggcaaaggccgaaggcctgggtctaacagactgggtccaaaagcatatggataacgtgtgtgatctggcaggccagcccgacacaaccatgtacaaagatgatggagaaacaagtggccaaaaataa

SEQ ID NO: 376112 - DNA, 189 bp, Salmonella enterica
gtggccaaaaataacaacagtctcaaacagcatgtcttcaatatgctgtcggctggcagcgaacttaaagaagtgaagcgttttctcaccagcaagcgccttaaagcccgcccagcagtgttaatgatccacgaacaggcgattgctgtgcagaacactgagtacctgaataaaccggcttatagctaa

SEQ ID NO: 376113 - DNA, 252 bp, Salmonella enterica
atgagcgtaatcccagattacaccagggttcagcatgtccagattattcgcgagcgagatgggcagaaggaagttgttcgagtctatgatgaagatggcgacgtagttctgtgtttacctgcctacattcaggatgaggaaataaatcttattctgcgccggttgaatgacgtatattcagtcggatatcgtgtaggtgatgcagcccgccgccgcgccatcaaaaaagcgctgggggatgatgaggagtaa

SEQ ID NO: 376114 - DNA, 2391 bp, Salmonella enterica
atgaaaatcaaactagccctgcttattgcatttgcaggtttcagcgcaggagcttccgctgaaatcgcagaattcagctttaaagataccctgaacgttaaaaagaccgtatcgcctgcatccgtatggattaatccggtaacgagctttgatgttgccgttatttccggtctggaccgttatattacgctcagtctgctgaaaagtgacgggagcctcatctggagcacgaaaagcagcctggttaccgtagatgaccgtaccacatcttcgacaggctttgattattacggcaagactctgaccgtaccagcgatgggagaagatagcttcaccctcagagaggtgattaccgacttgcaagggaaggaggtctcccggcaggattacccgcttgcaattgaccgaacgcctccggcaacgggtaccataagttatacgagaaacgggtggaactttggcagcgaagcgatcttcacttcagtaccagccggtatgcagtacgccagcgtccaggcactggtctttaatggactgagtgataaaggttccgggcttgctaatgctgaatatttcataaccgatgccgctggagtggagcgtaaaaagccagcggaaattaatacagtggaaggtagcgtaaccgttcaagtcgccgacgcaagcagcaatgccctggcaccggaaaaccgctctgaatataaagtggggatctacctttatgacaaagcgggaaacaggatcgaactaagccgccgaagcgtaattgatcgggttaagcctgacgatatcatccaggtgcaggacgccactaccggatcatgggtcacttatcagtctggcatgaccgtcttccagaaccctatttccgtacgggtattaaggaaaaaaagtgactttactgctgttaacggttccaaatatggctgggcggactcgaatttccagacgtccgatagcacttataatatttatactttcaaatacatatatcccaatgtgggggatacttatcatgaattccagactctggcaggaggagtaagacgaattcatcataactccctcaacttcactccagccccggcgatggaaatagccccgaagatagtggctaaagagatgtaccggagtgataccagtgagtggttaactcaggcctcaatcagcgttaaaaccgccaccattagccgcataaaggtaaccgctgaaccccgaccatacgtgcaaaagttcagaacggtaaaaaatgcagcctggttctgcactatacctatcggacaaagttcatgcgagatgacggttaacttcaactacaccagtgacaaaggatttgagtatctgcacctttactcgggaaaagatggtgacagcatattcgatgcgcttgctggtaattttacggttatctgggataacaacccaccggtggttaatgtcgctcaggtaaacaaggcctccaagacaatcactatgacggccaccgataatgatcgcgtcaacgcctggaacatcagctactgggataccaaagttttcgaagccacccttaaaaatgcccggggggaacctttcacgctgaagcctgtgaccgtcagtgaaagcgattataaaaccaaaaacgccaccttctcatacgctggtctaccggacggggattatacggtggttagcgtctctgccacggatcttgttggaaacaccggaaccaaaacgcttaatgcaccgctgaaaattgactcaacgcttccggttatcgcgttcagttttaatggcgcagacgcagaaggaaaactggttaaagggcttgagaaccttcgcataagcgttactgatgcctctggggatgcttccctgacatcgcttcagctcgctggtggacctaactctgaaaaggtcaccctggcattcacgccgttatccaaggatgtctttattccggaataccccagaatcttccccaacactgacgaatcgggacagatgtatcatctggaggcactggctattgacgaatcaggtaaccggaccactaaaacgcttaattttacctaccagcctgcgaatctgattatgctggataatctcaagacgctggccacagccgtagcactgaaagcaacggacaacacgccgctggccatcatccgaaccagtgtgttgcggcgtcaggacggttctatcattaccggacagttaaacggaaccctgactgttcagaaaaatgcccagttcggcgttacggttgccggagttacggtccagcctggtgaaactaaatcgctgtcactggatcttggtaatggtgaagagcgcacgtatcccgttactcccgctgtaagtggtcaatctggcacggccacatttgctatagaattccctcaaacataa

SEQ ID NO: 376115 - DNA, 471 bp, Salmonella enterica
atgaccaaatattatgatcgcagtggaattgaaatctccagcgcaaaaatccgctgtgttgattctgtaaaaggtactgcggaatatacttttcgtattctttgcgataaatgcaatggtcggggagagcgtaagcatttttatagaagtcgctgtatggcttgtaaagccacgggttacagcctcgaaacgacccgcactgcttacacgctgaatgcgctgtaccgcattaatgctcaagctgcccgcaaagtgtcagcatccttgcaaaacgagcgtttgaggactgaaaacgcccacaactctgcgttcaatgcatggtgcagatctcatcaaaaaatggttgatgcaatcacccagcaatccagcagtaataattttctggaaagccttaagtcttctttaacccaccagcgtcagttaagtgataagcagctggcagtcgccgcccgcattttagggattcattaa

SEQ ID NO: 376116 - DNA, 297 bp, Salmonella enterica
atgatccattcatttaaagacagacggcttgaaaagttcttccgtaatggaaaaacaacggcaggtattccttctgaaattattaacgcgattctgtgtcgactcgaaacgctggataatgtccagagtgagcgggagttattatccaacagcttgcgttatgaacgcttaagaatgacgtcaaaccgttattcctccattcgagtaaactctaagtatcgattattctttgaatggaatgatggcgcacataatgtccatttgtcagcacatgactataaatcgctcatccattaa

SEQ ID NO: 376117 - DNA, 1146 bp, Salmonella enterica
atggacgcgatgttttatatccaggccagtactaaacaacaggcaagttacatatttagtaccctttccccgaagcctactgcgaactgccagcttacagatttgcagaatgagacggtcgtcccttccataagccctatttcgctttcacttaacccctggtcgatcaattcccagtcccgaacccgggaattgagtatggccacgcatggtcttaacctgatctgtgcagtcacggatgagcatacccgtcagatagtagacttttgcgataaccttggacagcagcttaaggatccggacgacaaaagcgcctgggttaagctcattaattctgaatgcgcattgcttaattctccgcgtttatatcccgttctgctggagccggagacaccggcacaatttgaaatctttgtgccagctccggaagatggcgatcacgacacggttatagccagcgttgttgaagaatgtttcggagatgaatgccggtacagagcaacggacaaagcttttgcaatgtcggaaaagccaatcatcaggctggaagcacatttcaatgacaaacgggaaaaggttttagaactgaccttttccagtttcaacctttcactttctgcgtccgtgtatgaacaccagctacgtcagattttattactttgcgaagattttggcgtaaggcttcagggtagagccggggcatcctgccacatcaatatgcgcagcgcttaccgtcgtcttgcacatgtcggcaccggctctcgcccaggtgatgggagtgatgtgcggggctatacctcatctaaagagcaaaaagatgttaaggggctgctcgataagtcaaccaggggaagtgagcttgtaccggcgaggcacgggcagcagtttaacggtgtcttagtgaatgccacacccgcaccggccacgacgggttttatatacctgtcgcatgattttccggaaggccagtttatgatgacagccgaggtgttgcatgttggaataacaccgggcgggatctactacattgaaacactggacggataccggtttatcgttacagcgtttgaaaagggattaatgaacggtttaagggagtttttggctgtaaatgaggactactttaagtattaccgctggtcttag

SEQ ID NO: 376118 - DNA, 378 bp, Salmonella enterica; identical to SEQ ID NO: 267000

SEQ ID NO: 376119 - DNA, 429 bp, Salmonella enterica
atgcctaataatactgaagtcattagctgcgacttattttcaattctttcctcacttaattttagtgttgaggatattacagggctaactccggccaaattcagaaagggggctttcttgcatgcaaaaatatctgcaagccaggccacgcgagcagctgatatttcccttcaattactcacggatcgtgtttcaggtgaaatgaactacgtaatagtaattggcaggcacgaagggctcctgcaaagcgaagcaattgacccaaacgctgataagcagtaccgggaaaaccgtcattctcgccattttatcccagtaaccgatgccaataccaaagccctgaaaaaaacctgcaaggtaatgaaaacatatatcaaagagcaggcatttaagcctaacacctgggggcacaatttcattaagggttga

SEQ ID NO: 376120 - DNA, 258 bp, Salmonella enterica
atgtctgaaaaacactttatcgtaaagatccagaaccgtaacggcgaccatgagaaaagctatgttcgtatactcgtcagcgattgtgagaaaaatgcttgccagacggcactgatttccgagtgtgctggcgaggttgaacagctgagttttgaagacggtggggtttatgactacaacggcgaaaatcactacagtgtcaggagctgcgtggaggttgcccctgaagatgttgcaactttgcaacgctacctttaa

SEQ ID NO: 376121 - DNA, 156 bp, Salmonella enterica
atgttgcaactttgcaacgctacctttaacacctgcggcattaaaaaaaatatcgggtgtctgttacaggatgccgctgttttaaacgatgcctcaaagatcgctatcgctcctgatgcctgcattaagagcgggtttgtggtaggttcagcgtaa

SEQ ID NO: 376122 - DNA, 609 bp, Salmonella enterica
atgaagagctgcttttctgatttacccgttaaagacggcaagtccggaagttggaaactggacactttcgaaattaccacagataaggcgctgaccctcgcccttcgtgccgagtgtactggtaatacagatgagtttatcccgcccggtagatatcgccgcttgtccaacggctgggatgtggtgatgtccaataccccgatggagatccgaacctgccaggattttatagagcgagccaccgggcgggtgctcattaatggtcttggtcttggtatggtgctccacgccattcttcagaaagacgatgtaacccatgtcacggtaatcgaaaaagaacaggatgttattaacctcgttgcagcctcgtttgcaaccgatcttcgcgttgaaattattaatgctgatgcaatggagtattgtccaccagctggcgttacgtacaacgcttgctggcatgacatatggacagacttcgcaacagctaatctcgcacagatggataagctggaaagtaagtaccgggacatctgtgactggcagggatcgtggggcagggaggagtgtgagcaaaagctcattgagttccagaatcttgaggctgattaa

SEQ ID NO: 376123 - DNA, 1251 bp, Salmonella enterica
atgagtacgattaatacggacttaattgcgcatatctacgctgcctccgaatcgccgttgaccaacgacgagctttatcgcgaagtgcagcgtaaaactggcatgtcggatgccgaattgcacgaactgaaagaatttgggtcagataaaaccagaaccagcggcgtcaaacataaggttcgctggtttcagcagactctccgtcaggccggggtcatcgaacgcgttccagaaaaacggggcgtctggagatacgcctctaagacgaaaacaaacctgcatgagtcatgggaaaagctctgtgttgtcggtttctcaacttctcttggggcatcggtttttggaaacgcctatgccttcttcagcaatatcaccgagcaaattcatctttgcctgacctcgccaccttacctccttcgaaattcaagagactacgggcacggaggggggcgtggcgagcaggcttatattgactggcttctgcgtatcctcgaaccgatcgtgaaacagcttgtaccgggcgcaagtgtggcattgaatatcactcaagatagctttaataggggtaggccttcacgttctctgtatctggagcgtctgacactggcattatgtgacaagctggggcttgagctcatggacaggcttcagtgggtgaatcgcagtaagcccccatcgccaacgcactgggcatgtaagcaacgggtgcagctctgctcatcgtatgagcctgtgctgtggtttaccaatgatgcgagtaaggttcgttcaaacaacttacgtgtactacaaccgcattcagaccagcatctaaaattgcaggcagcaggcggtgaaaatcgcacgaccttttatggtgatggggcgtaccagcttaaaagcggttcctttggaaataaaacagaaggaacgatccccaagaatactttgttttacggcaatagctgcgctgatacgagattttgccattccattgcccgcgagctcggttttccgctgcacggtgcaacgtctcctaccaggcttgcagcgtttctgattgagtttttgacagagccgggagatcttgttgtagatcccttcgctggcttgcataaagtccccatcgcagccgagcgacttggcagacgttggctggcgacggacaaaatcatggagtggctggcgatttcccgaaacctttttacggccgcaccgggatataagagtaaccccatgctggatgagctcgccgaactgtatcggacttaa

SEQ ID NO: 376124 - DNA, 147 bp, Salmonella enterica
atgaagtcagattcagaaatggcttctcctatcgagttgcacattggcgatcatgtccagcggcatggtgctttatctgaggtcatgcatattgttgaatccaaatgcgatattcccggcggcatccgggtagcagcatgcatttga

SEQ ID NO: 376125 - DNA, 327 bp, Salmonella enterica
atgcattctcaggatcctatcacgaaattaacccagacgttgcaacgcgacgatggttctcaggttcgtattgtagcgcagcggggatatggaagcgggcttacagcctcgcttgatgtgtacgttctccgtcgtgattcctctgaaagcaactggtcactgtgcggaaaagatcctcaccccgagtggagaaagatgtcagtagatgagtatcagaaatttggacgctcagaaatgctgtgctatgccacaccaggtgaaattctcagggtggcatccgctattggccagccaatgagcttcctcgatggcaaccctgcgttttag

SEQ ID NO: 376126 - DNA, 258 bp, Salmonella enterica
atgaatctgaacgaacgaagcacgagcgcagcgacgccagatttgagccgactttatctcatttccgggcgcattatgtttgatgatgatgatcaggcctacctggtcgaagccgattcccctggtgatgcagaggaggcttttcggcatcatattgccgacagtgccgacgacttagaaaaggtgattatagtttcctctacaagtttcgcttcagctcacagcagtcgcgtaatttgtcggcctgccgtgaagtaa

SEQ ID NO: 376127 - DNA, 792 bp, Salmonella enterica
gtggcagataattatactctggcgtcgtttattattccctgcactcaggagcaggctaaaatggcacaagaagcaatcacattcgttaccgaagcagaaattgcagaaggtgagcgtttgcttgataagccactggcagattgttctctgactgagaagctgattctcagtattattgagaaccaccctgagtatgacccttcagagccgagctttgggcaaccatcctgcccagactgtaattatgaactgtcgttcgcaacagaagttaacagcagtgggctgtcagtttttcatggagagactattgatcttgaccatgcaatttgcctcacaactgccgtgctgtcggtattcgacctcccggaaatggtaacaattactgctgcatttacatgcagtaaaagccggacagatgaatttgggggtatgactattctggtcacaaaggatacccactattaccaggatggctgtcagttttctcgtctcatgaatgaggctcacaaagccggtatccagtatgctctgtgtaaagtgacgcattaccacggtgagagcagctatgtggcaagctatgtcctgagctgcgacgtagcggattcagcccaggaggtcgttaacagacgactgaaggcatgtgccggaaaagagccagaagacggaatctatattctgagtgaagaagacaacaccagtctttcggtcgaactcgttacagaactgtctccgctcgattacgacaagctgagcaagcttcttccttcccttgacaccctttgcggcgcataa

SEQ ID NO: 376128 - DNA, 450 bp, Salmonella enterica
atgaccaataaattcatagtatctaccgttgtttgcatcaatgactttgcaagtgatgttccgcaaagtgtttccttacggatagatacaatgcttgaacagcgtatccgcaaattggcgacatacgtgaaaaaaaacgatcttcagttaactgagttttacttctatgacgctaactggtcattttgtggtgaagatgaaattcaagaaataacagaccaggatgaatataagcatagcgatagcacaaggcaggaagcgatgctgcgggaagtaatgccatcagcacgtacggaatgcccggttattagggtgatgaaagattcatttcagctttctgctctaccacgccattgtggtgatgacatgactcttaacactccttcaattccgctgtctgagttgaaaacaaatgtcacggcttttattacaccaccaacctatatctaa

SEQ ID NO: 376129 - DNA, 2385 bp, Salmonella enterica
atgtttattgaaaaaagtgactcattccttgaattaccctcagaagttatttttcctgaggcggctaatgctgccattttgaaacatgataaatgggctgatgtttgggagaccctgacaaccgatgccgatctgaactataccgatgaaaaggagactgtgagtctttcttctctggtcacgtcagccacatctgctatttatcaggctattacggacggatggacgatgtgcgtgggatacagtggcggtaaagactcccattctcttcttcacctatttctgatggcattgatcagggcagtacgtaacggcacaaatatcagcgaacatcatttcattcagatgtccgatacgctgatcgaaaaccctgagatgcactatcaggcttcacaggttctcaaccagcttagaatgttcattgctgaacaccagctaccggtcacagtccttgtcgcccaaccgtctcttacgcagagctgggtaggccgcattctgactggacgtggacttccgacctggactaattcttcaacccgtcagtgctcaaccgactacaaaatcgcccccctgcgcaaggccaaagctcgttatctaaaaaacgccccggcatccgtacgaagcagggtatgcctgatgctgggctccagggatgatgaaagtgcccgaagggccggaaatatcctcaaaatgggagggcaggcgaggaaagtaaccctgactgagcacggtggtgaactctatccagtaaaggagtggcgcactcaggacatctggtcttttctaatggcctgtggttccgaatcccgcttccctttaccaagctttatgccggataacttcagcctggcaacgctttataaagacgccaccggagagtgtatctggtcgccggagaaacccacgcgaacctcagcttgtggggctagatatgggtgctcgctttgcacagccgtaggggttgaccattcaatggaaacgctccttcgcactgaccctgagaaatatggttatcaggcaggcctaagtcgtcttcagcgatttctttctaagatccagtacgactggagcctgcgggattatatcggtcgtaaagtgttcgaaggcgggtatgtgcgtcttcaacccaatatcttttcttcgtccctgactgaacgtctttttcatgtctgttgcagccttgattatgttgaagccagacgtgcggcaaagcatcgcagaaagctactttccggcgaggtggacgatacggcttataaccgtcgtatggctgagccacaatttcggcttgtacatgaagcaaacgtgatccacgttgatttcctctggtcgttgcactgtttcaaccctcgcccgtttcgggcaattgagatctatcgcagagtctgggaagaggccgatctggaccttcttgaggatgagcctgacatgctgcctgtggcccgtacaccaatgccagctccactctggatgaaactgcccggaggccggttcggtacagcttatgatggactgactgatacgttgccgctgatgacctattttgacgggcaggctgaccccagggcttcacgtagcctaaagaccggagagagcagttctgtcgtcgtggcattcgaggaagaggatgagctgactgttgaagaagatacggcgtcctggattatctggcatgaatacgacgggttacgccagagcatcgctgacggtgagtttactccaacgactgctgctcagtatcttcttcgttatggcgcggtccgaatttcaaaagggaagggcgctgtctatcatcgtctcgcacaacggggacaaaccttttcccgcctggggataggcgaaagagtgtcgcttccagagctggttgccagtcggcgttttaaaatactcagcgatactgcataccgtcaggttgtagcccggaaattgcgtggacagataaaaaagttcagattctgggcatgcgtagctgcctgtgtacagttgcacgtacacaacaagacggcactcggagaaagaatcttaacgttactcgaaggtgagagggaacagcaacaaggtgcgatccaggcgaagctgaaggcgggaatgatggatgcagttctaactctgtgtaaccagcgactccgggtgaaagaaaatactaaccagccagaggagttccgctattaccgtgccgtaagagctcgtttcatgcgccatttatctgaatgccttaagccagaaaatggcggcgttatccgtgacgttatctgggaactgagggtgctgagcagtgctcacggtacgaccaaaacaggtttttactatgtcgatagcaatcgcccgacagcgaaaggactgttaaaccgccttctgatgaggatggtcaggcaggtcgtataa

SEQ ID NO: 376130 - DNA, 240 bp, Salmonella enterica
atgcaaaatcaaaatacccccgctcaggaaaaacacaccgtatacctttttaatgctgaacatgctgacaagacagccgccaagcaagccgggaaactcttcacgctggacattgaacacccaatgaccctcaacgatctctcgctgctgtgtgagtcggtcgcggacgctgtgggagcacctggcggtattaaatatgaaatcacaacagagcctaatggggttcaggaggaatactga

SEQ ID NO: 376131 - DNA, 312 bp, Salmonella enterica
atgactttgaaaatgggaagtccccggacttccaagcctgaggggccatttgtattaatcacttttgagggggacgaatttctttttgatgacagacataatgtcgtcaagataaatggcaggcctaaaaaaatggatgtaaagcgaaattattttgagtccgatctgggagaagggaaagcgaaatactggactttaaatatcgaagaggctcatcggttcaattcgattgatgaagcgacagaacaactttgtaaactgaatcgccctcatctgatcaaaattcgcaaagttgagggggtatctgaatga

SEQ ID NO: 376132 - DNA, 189 bp, Salmonella enterica
atgaccaaagagatgtttttacgcattttaaatgaggcacaggctcgtgtggataacgattcgcttccgcttgatgttcgtatccggtcacgcaccacggtaaatgattgcgtcatccgggcagataaagaggggtggcctattgagtataaacagaaggtctgggtagaggcagtcagtggctgttaa

SEQ ID NO: 376133 - DNA, 534 bp, Salmonella enterica
atggtcaaggtgataaatatcaacgggaatttagttgagttacctgagccctcagcaaagttatccaaagcggaatcacctgatggtaggttctcaaaacctaaaaataagatctctaaaatacagcgagctgagctgcgaatgaaatttggggggcgttgtgcctattgtggttgcaagcttcctgaaaaagggtggcatgccgatcatgttgagcctgttcgacgcgactttgaactggtgagagccccggtcggcagcggcgtaactcatgttgtccgaagtacgggtaaggttatgcaccctgaactgcatgcaatagaaaacttatttccatcatgcgctccctgcaacctttttaaaggagcttttagtgttgaaggaatgagaaatgaaattaccaaacaggttgaacgggctcgcgcatatagcgtgaatttccgtaccgcagaacgttttggtttgcttcatattgtagtaaaaccggtcgtcttctggtttgagcagtataacgaacagaaacaaaacgaataa

SEQ ID NO: 376134 - DNA, 609 bp, Salmonella enterica; identical to SEQ ID NO: 266997

SEQ ID NO: 376135 - DNA, 831 bp, Salmonella enterica; identical to SEQ ID NO: 119722

SEQ ID NO: 376136 - DNA, 264 bp, Salmonella enterica; identical to SEQ ID NO: 94215

SEQ ID NO: 376137 - DNA, 228 bp, Salmonella enterica
atgtataagttcactcccgtccaaattattgctgattatatactgaggtttcttaaaaataatgcggatgccaagctttacgaggcaatgcagcggcttgaaacaaaaatcggtcagtttatcgctgatggggttgatgaacatcaactacgctcttcattaagcaaagccagtcgatctcgttccagggcgactcttatacaggagtgtgagaaacttatttcgtaa

SEQ ID NO: 376138 - DNA, 321 bp, Salmonella enterica
atgcccaatagcttcgataagccgcagacgcgcccagcacataactctgatgccgaacccttttttcccaaaaaccttggttcgtttatagagcaggtgtccggaagagatctggcaatgctcacagaatccgaaaaagaacagcttgcgcacctaatcaaaattggacggagatatggagtttctgtagctatcgttcccgatacagactctgctgagcttcatgaattactgtctaatgccggttccattgaaaggcagttttccatctatgaacgcatccagacgaagattgcgttcacacggtgtcaggaagcataa

SEQ ID NO: 376139 - DNA, 312 bp, Salmonella enterica; identical to SEQ ID NO: 105669

SEQ ID NO: 376140 - DNA, 492 bp, Salmonella enterica
gtgaccactctcgtatttgaaatggcggatattaataaactgatcgaagaaattcgcaccgcaaaaacgttttcggtcaccgcagatcagatctatgacccggcatgctatccggggggagccctccttaacgctgagggacagactgaagaagaggcgcgtaaagctggtagggttttctttccctcatcctcaaaaattgccagcacacatctggtgccaaaagtgcttctcgcgcacagtcatggtgtatacctgatcactaatgctgagcttgagggctctcccgcatcccgcgatactgtggcttacgcccaggggatgaatccaaaactggatgaggactgggattacgcttgtgatgccgctttgggtgggtctgattgtagctataccattcccgttgagtggctggagttagcggtagagcagggttttcaggagtttcgacttcgaatgagtgaaaccaagatcaaacttgtcactaaatag

SEQ ID NO: 376141 - DNA, 294 bp, Salmonella enterica
atgtcaggtttaagcagttccgcccagaagcttacaatggcacagatttacgtgttacgacggatggcatccggcacggtctatgatatctctggcaatttcagacgggccagagaacggcgtacgtttatggggaatcctgatgatgtgacgtgcaggagctctccggtcctgttccggctcggcctcgtggagttatgccagccagcaagccatctggagccaggtttatactatcggctcaagttgagctcctcagggcatgaggctctcaaggcgaacgcacacctctaa

SEQ ID NO: 376142 - DNA, 204 bp, Salmonella enterica
atgaaaatgttttttaccccttatgttcgtatcgttttctatttttgcgcattgatttttattgtttacagtttcagtgattttttccagggcgtccctgacagcaccttcttcagtgcggtcatcatgctacttgttatcggaaccattgttgcccggcatctggatcgcaaaaaatctctcaaaaatacttcacagatttaa

SEQ ID NO: 376143 - DNA, 225 bp, Salmonella enterica
atgcataaccacgaaattcagaccattgctatatttagtgcccagtataaaaacatcgaagatgctgaaaatgcaggtgctttatattctgtagatattgaatatccgatgacactaaatgatttatcgcggctttgcgactctattgccgaagcagtaggtgtgcctggcggcgtcaaataccagttcgtgtcccagccggaagcgcatgaaaccagcttctga

SEQ ID NO: 376144 - DNA, 201 bp, Salmonella enterica
atgaaacaaacaaagtcttctatgtcacgtattgtgcagctgtacgacgggagccgatacggaaactgcgagcaggctgataacgaaggagagctttttacggtggtgttgaataagccttcgcagatcgatgacatccgtaaaatcgtagacacaaccgccgaagtacttggcaaagctttgccagtactcctcttataa

SEQ ID NO: 376145 - DNA, 312 bp, Salmonella enterica
atgatcacatctctaatgaatttccgcgatttaaccggagaggcagtcatccaggcgcggcaatgcgttattaatgcggagatcgaagcggcccgggaaaaggtaattcatgctcgttcgttattcgaagcgggtatacataatgttgtaaacggtagttctggcattaaggctgcggcagcacattttctggtgataaaacgtttacagactgacactcggtatctggatgcggttatcactgataacctttgcatgttttctcctgagggttatctgtatctgtttatgcaacagcgttatatgcgataa

SEQ ID NO: 376146 - DNA, 177 bp, Salmonella enterica; identical to SEQ ID NO: 105663

SEQ ID NO: 376147 - DNA, 282 bp, Salmonella enterica
atgaaaatcagccagctggaatccgggatgcaggtttggtctgtaacccgtaccaaaatgggaaataccaccattacaacggtcattgtccaccccgttgtcattatagaaattcatgataatcatgtgattgctcgctggaacggcaatgcaccacgtcgttttggagaaacggctatcaggggctggaagaaggagaagcccctgcttgtccgtgaacctttcggaaatgctcgcctggccacccgggctgaaaaagccgctatgcaggaaaaagagtaa

SEQ ID NO: 376148 - DNA, 606 bp, Salmonella enterica
atgactgaattaaataaaagcccgtccggtttttccggagctgatgtcagtaaagaacaggctgccataagggcacttgtagaaagagtagtgaccaactatcgcagccggacagcacctgatcgggttcaaaaggcttcggtagcgtttaatgggggattaatcctgaccctgatgctggccttgtcgctattgggctaccttgtggcggaattgttcagggggtatgttgcggatagttcaccctatgtgcctggtctaagttattcgcaatttttgatgctgatgatcgttgagctgtgtctatgctttctcgcatggtttttggttgtcacaggggactatccccggccgtggatatttcaggtagtcccgatggagcagtactggttctttgacgaagtggatgacgacgatcttgcccggctttcctgtaacccttacatcaagcgctggctacttgatgaaatgtccggtattcatcgactgacctacacgaggctgcatgatcgactggagcgcatctgtaatattccatcccatctcgaatacagccgtattcaggcacataagctttccctaatcaacggaaccagtgcctcctga

SEQ ID NO: 376149 - DNA, 216 bp, Salmonella enterica
atgctagtcacacacagcgtagcctcttgcctgcttaaatgcaaggagaagaaggccatgaaaatgccgaaccaacccattgttttgtgcatattaatagtttgtttaacgctgttgatattcacctggctcacacgaaactcgctttgcgagttgcggatgaaagacggaacaagggaggtatttgctatcctggcctacgaatccggtaagtag

SEQ ID NO: 376150 - DNA, 204 bp, Salmonella enterica
atgaaccatgagagccgaactgtatacctgaacacggccattgaggccctgctgaaagctgaggcggctctgaacgatctggcattagcctatgagcttaaacctgatgaaaaggcaagcgcatgccatcccagaaccggcacactttccactgcgtcccaggtaaaaaaactccgccgtgtccttgagaagcagaaggtatga

SEQ ID NO: 376151 - DNA, 357 bp, Salmonella enterica
atgaacatgaaaaagcccaaagctgcattacagaatgccatgaaagaagatgtgccagctgtgacacagattcagatgcgatctacggtttccagaaaggttcgctatgtaaaacaggcaaatcgagagggtctgaaattatctgagtggatgtcgcggcatctcgacgctgtctgtgataccgcagatgagattcataaaggcaaacgctcaactccggttgcgcctgggaagattcccccagaggtataccaggtgatatacgatcagtgcggcgggttcgtggagtgtgatgctaatgcccaggttatctgggaagcctgccgtaatgccattcttaacggagacaaagggtaa

SEQ ID NO: 376152 - DNA, 600 bp, Salmonella enterica
atgaataaagaacaactaatcgacaaactggaacgcgtggtatgtggtcagtactcctacgaaatgcaggagcttgcgtattcggccctctgctgcattaaaggcaccccggacgactgcgctaagttccctgttacgcgtccgctgcctgacaccttagtggacgtatgggacgaaatcgggcaataccttggcacaggcaaagccattgaaactcgcagttgcggcgtttcgcttctgcttcatggacactgctacgattcaaatcatgtgctttactggcgcaatgctggcgcacttccagcagcttgcgatacgccactggctggtgggtctcgcaaactgttcacctgctcagcctgtggagtggacggtctggatgaaccacctgaaaccagttgccactgctgcacagagggggcccactgggttgagagcaggctcttcacctccgggcaggcagaccctgaagaatttagacccgtggcggtcgtgaaagagtgtgcaggctcaacgccggatgatcggctcatctggagtgtgattgaacagctcaacggcgaactggcggaaggcgataaactatttaagcgacgctga

SEQ ID NO: 376153 - DNA, 945 bp, Salmonella enterica
atgaaactttcccgtcagacgacttctgatacttctgttgatggccgttcacgcgcatatgcctggggccgtgtccattatttcattatcgaacatgcaccaatggctgagctggtcgctattgacgagctgctggaaaaagctggctggagcaatgacggctgtccgaactatgagaaagatgacgagtttggtaatgctggttacagctgtggttactggatcgatattgacagcgtgggaagcttcaaggctgactacaaacgtcttaagggggagattagtgcgcatatcgcctcaaaggcggcagaggtggagatccgcgtactggactcgatgtccgacaaagaatgtaaagatgttgcctcggtggcatctactgttcgccgtgacttacgtacgcagtccgaatcgcttcattcactgcgtacaatcgtaacggttgatcattacaatccctatgtgaccaccagccgcccgctgagcatttccgcctggacacttatccacgactgtctgaaaacaggcaccatcaatgacgtctgttcacggttgagttcattaatcctgcactctgaagccgcgattgcccgttgtaagggaagctccgactactcttcggaacacgctcagctatcgttttttgctggtaacgactatgtcaccagacgcacccttgttgatgcagctcacgaagaggctctgcgaatgaaccgccgctttgatgaacgcattgcaatgaacgcggattctgatgccagaaggctccagtgcgaattcaaccttagcaaccatgtcgtacagcgtaggaccgttgaatctgctcatatccaggcactcaatgaagacgtcacccgttcacaggcggaaccacgctgccctggaaagcttcttctgaatatgaccagtcatgaggaagtgcgggactcactgagcgcctgttag

SEQ ID NO: 376154 - DNA, 177 bp, Salmonella enterica
atgaaagataacaagacacgtcctgtagactcgtatgctcatgctgatttcatggagtccgtcttcagcaacctcagggctttctgtgatgtggaatgccagcggctaactgccggttatcccccaactgtcaaaccagaacagcaaagcactgacggccagctgtcggcggcataa

SEQ ID NO: 376155 - DNA, 1185 bp, Salmonella enterica
atgtccgcaatcgaaactgaagtaaaaaacaacagcaacgaaatcagccttcgtggttacctggaacgcactggtaacggtgcccgtaaaggcaacggccttatcattgacccttcggttgttgtagagcaggaaggctttaacacccgcacggccggtatgggcgagctctactattcaatgcctcacgttgtggaacacctgaacagcctggccgatgcctacatggaagacccgttcagcgtgacgcctatcgttgttcagatggttaatggcgtacctgtactgcgtcagggggcttgccgtatccgttccatcgctattgcaaaccgccagctggaagcagaagggcgtgaacgcattactcgtattcgctgcgaagagtttcgcggtagcgcttcaaaagcagaactcttcaccctgaccggcaactccaacctggcgctgtctgtcgtagctgaagcgctttcaattaagcgtctggttgaagataaagaagagcctaagacctttgcggaactggcaaaaaaacgtggtaaatcagagcagcatcttcgccagatggttcgcgtactggacctgccttctgaactacagaccatgcttgtgagcgatcaggtgagcatgtacgttgcactggacgagtatatgtacagcggtgaggatgcggtagataacatcaacaaagcgatctccatctatggcaaggcgacgaaaaacacgctgaaattcgtcaaagctgccaaggtagaagagcgcatggcagatccgcagactccggaaaacatcggtgctgagcaaccggcagatgatactaccgataaccccccggtaccggatcaactgaacgatgaaagcaatacggagacgctggatacgccaccggtacaggaaccggctccagctccaaaggacagcgctcctaaacagaacccggcaggtaaagcaccttccatgtccagcgttctgaacaaaaagactgtgaccgtcattgcagacaccgcgatcccgatttttgaacgtattgctgaagaagccaagcttaaagaaggtgaatctgtcagtactgatacttacacgcttgttctgaccaatgatgaaatgaacgatatcatcaacgctcatgctgacctgaaagagtacctgcgtaagcatgctgataagatgaacaagggacagtcatga

SEQ ID NO: 376156 - DNA, 282 bp, Salmonella enterica
atgaagaaggctgttatcaacgtagacaaaactaacccactgccagtcctgacggattcggtgacccgggtaagtattcagtgcacggcaaaagatgaaaacggggcagggatcgaagtgaatatactcgacctgattcaggatcatgatacggctgaagtgaaagtgcagtttgggagctcgcctgttcaggctctggcgatgctccgccgggttatgacagcactggaaaagcaggcaaacgcagaactgaatacaaaccactattcgcgtatgcagtga

SEQ ID NO: 376157 - DNA, 279 bp, Salmonella enterica
atgctaagcgtggtcagacgaaagctcagcagtatcgtcgacatgcaggagaccgtcagacagtcctcacaaatgcttgagtctgatgcagccatattcctgaaacgcgccatagttgcgaggatgcttcaaaaaataaaatatcaggatagtgaagttttaaaagactgccttggcgatttttttatttatgaacaacgtgaaaaattgcgccgacttggcgtgattactaactgggggattaataaaacagcagacgggaagaataataagttgtga

SEQ ID NO: 376158 - DNA, 297 bp, Salmonella enterica
atgaaaaaacaactggcgtacgcttcaaactgttctgacagtctttattcgtatatttatcgcactctgcaaaaacgggctggtgatgagaatgaaagcctttatcagcaggccatttcccgctgccgtacagctaaacaaaaaaagaaactggccgggtattatgccggtccatggcagctgcttttcaacgcgtggtgtaacaatcgcgtccctaacacagcggtgctggctcttctactccagcagtgcttatctcatttccagtgcgaagaagtgatcgcagcctggcagtaa

SEQ ID NO: 376159 - DNA, 438 bp, Salmonella enterica
atgtacagaaacgacagaaacgtggattccttcaacctggttaatgctcttcagccggtctttcgtaacaccggctgtgggatatttgaatacgatcgtaaaaagcagaatgaaaccgctgattcaatcttacgagcgttggcgttaaatgccgatttcgcgagggccttaaaacagtacgtccggattaattctgtacgacgggttgttcagttcgatgacggctcggttcgctatggtattcatgccgaatttgaagggcatgataaaattaattccttccgtatttttaaagatgaagatacagacgcatttgactcctatttttatttggtttgcgataataaagctgagctggtggattttaaaatgaactctctcgatattcaattacaggctgtttttgaaaaagtgacaggtatttatctgtcacattaa

SEQ ID NO: 376160 - DNA, 537 bp, Salmonella enterica
atgaaaaacgtaaatattttgactaccgatatcgcggccattaatgctctttctggcgtagaactgacggactttctcactgccgggtatcaggtaaactggtcaggagaaagggaggtttcgctggtgggctttccgtgtttagcaagcaacaagcagccggtagaagttggtcccggtattttcattaatcgcgtgtacagcaaagacagccagtctctgtgcgggaaattgcgctatgacctgtctaatggtctggcatccggcgcattttcatttttctcccattcaggctggtatgggggattccgtgtcgtatccttccgtgacaacgggccagctgcgttgatcaacattggcattgtccatgaaaatgttttgaatgcgttttgtgctgacttcccccgggccaatgtgagcgtaaaccgttttcattgtggcatgacgcttgagcagatccgcatgttcatttcagacaccgcttacgatatgccgctttataacaacgagtctgactttcgcaggctcgccagttag

SEQ ID NO: 376161 - DNA, 369 bp, Salmonella enterica
atgggcgttgatatctgctggcgatttcaaagggaagaaaagcctggtaaatggattaatttatcaagcaattataaaggggaccgatcatatctccactttgcctggctcggatttgatgtagatcgtgaaagggcgagcacatcagcagtttttatccacgcattacgcggattacctgatgatataccgtccgaagatgatgatttattcggtgaacattcatactcatggctgacttcggaagagattttgtcagccataccacccgataacgccggagaggtgatccaggaatttgtcgaagaagtaaagcgtctccacgtggagaacggcagcgtccgtttcgtctttggatttgtagggtaa

SEQ ID NO: 376162 - DNA, 306 bp, Salmonella enterica
atggaacgtgtaatattttcagtaatcttttttatgatgctgggcgtacctttttaccttctttataaaattgcccgggacatttttgggaccgccggtgctggtgagcctgcacaattgcctcagggcaagcaaagacgctcaggaggcgctggttcgggttcgatctggcaaggacaccatctacaggggagcagccatttgaaccccctcggaggtgattgtaatggtgaaaatagcatagctggtggttgtgatggtggcggtggaggaggaggaggaggtggtggtggtggtggtgactga

SEQ ID NO: 376163 - DNA, 285 bp, Salmonella enterica
atgaataaatttttatacgtgcttttggcctggattgttgtgctttttatcgccaacaaactgctcgcaagacgtaagcccaagacggttaaaatcctggtacagcgcaacgggaaagccgcagaggttgatgctgtagtggttcagggttcaaagagagctaacaacagttctgttgcggacagcgacgcggtagatagttattttgaaatgaatccttactcccgcgaaaaccagtcgaatggttgggctatgctggccagagacgatgaccagcttaaataa

SEQ ID NO: 376164 - DNA, 354 bp, Salmonella enterica; identical to SEQ ID NO: 26525

SEQ ID NO: 376165 - DNA, 123 bp, Salmonella enterica; identical to SEQ ID NO: 31757

SEQ ID NO: 376166 - DNA, 732 bp, Salmonella enterica
atggatgctttcaatctgctgtggagcattacgggggtagctttcattatccttattttcgtcgtgttgctgtgtctgttgggttttatgacctctgccatagcggaacggcggactgcaaaggcaattgaatctgggcttcctgaagaagctcaggggctacttagtgatctcacctttcagttgtcggctcatagcactacgcaggttgatcacattctcgtagccccacatggtatatacgtcatagagcagaaaaactacgtaggcaagctctacggtactctggaggaaagccactggcggaaatggactcagtcccgaaccctcaagttgcagaacccgtttaagcaaaaccaggggcacatcagggctattcagtctgctcttaaggctagagaactggaatgtatcaatgtcgtcatcataaacggacgttgtaagtttgatggcatcaagccggaatggttatgtatggggatggacgattttatccataaagtcaaacaacgacgagggctacggttgttcacaccggagtctgttcagcacatctgttcggtgttgaagtcaacaaggaagtcgccagggctctatacggaccttactcatattcacaacataacgacaaagtacaaagccccgatgaaattcgagcaacgagtaacatacattctgctcaactttatccattatctgtgggcaagtctgttcactaagcagaagccttag

SEQ ID NO: 376167 - DNA, 1182 bp, Salmonella enterica
atgttaagcagtaaaaaaaggaagtcccctacaaatatcaaagaatcgctcaatgataacgctgaccgtttttataagatgtttcgcattcataccacggcaaaagttgctatgtcgctaattgccatgaccgctgtagggttttctttctacaatctttacgaacaatggcaggacgctgaagggaagaaagaccatatagctgtaatacggatttctggcgagatgggtaccggctcggaaacgggcgatggaacagtgatcgcaacagctcttgccaaagcttacaataatccccatgccaaagcagttattatcgaggcagagtcaggtggtggtggtccctctgacgccatcattatttaccgccagataaacgcgcttaaaaaccaccagccacagattgaacgcgtatcagatgccggttgctctctttcatctgtagccgctgacaagagtaacaaaaccgggagcacagaacgtggcgatgaagcacggtcgaagcaaaactccctcgaagtactctccagcggtaccggtcgttttttctctgatatcgcagactcatataaaccaatcatcgttagtgtgaaaggcatatgcgcatccgcatgctattacgcggtatcgcccgctgatgcaatttatgccgacagtaatgccctgatcggttctatcggtgtgcgtatggaccactggaatctgtcagagatcatgagcacagtaggcgtcaagaatgagccccttacggccggtgagttcaaagatgctcttgaccccttccacccattgtccgattcaacgagggagttcatgcagaaggagatcctgaacacgatgcatgaaaaatttataactgatgttgaacttggacggggtaaaaagcttctctcgcgtcatgatgccgatgctgtttctctctattcaggccgtgtatggccaacacctcaggcagttaagtacggcctggtggatggagatcttacgtcagtagagatccgtacacgtctttcaaaaatgtactccactgacacgttcaaaaactacaatgagcctcatcgtaatctccgttctgcactcggcatgctgatgagcctgtcttcaaatattgagagccttaccggtaccactacccgcttggtagaatctgttaatgccaccagctacccctctgtgaggtaa

SEQ ID NO: 376168 - DNA, 663 bp, Salmonella enterica
atggctgcggataatacaagcagagcagcagtgctcagaacaatgcttttttttggcatggtcatttattttggttacagcctggctttccagaatactgaggagctcaaatatcagattactcaggaggttaatgcaagccggtccatcatatcaaatgaccgttggaagtctgttattgcaaatagtgaagcgactttaaattggttggtacatgactataagttaattgactatctgaatactattctgatccctgacaccaaaaaaccagccagaggtattaacattgttgctgaaaaatttacctctattaattacactatggccaaaaacatacccctcttactttatcagtccattttccggtggaacttaatcctggggtggctaatcgtttttctgccctatctatttgccatgctagcagatggaatgtaccagtggaaattgaagaggtacgtatttggtaaggttacagttcagttttatcgtatttggtttcgagcattttgggtgatcagtgctttaacgatggtctacctggtcatgccgaatatgtcactatttaacaatatcgctcaacttttcccaccagtcgctttattgatactgggaattgcattgaatcgcttgtggtctaactttcaaaaactcatgtaa

SEQ ID NO: 376169 - DNA, 2085 bp, Salmonella enterica
atgtcagattcgaagaggactaacctccatgcacaagagaatttttatcggcctattcttgagtatcgtagtgcctcaatacttttgatttgttcggtttctatgctttatatgggactttcttcagacggactggacatcgccccaatagttctgttcacctcaatattgctttttttgctgtgcctttatcgttgcaaaacagcagcgccattcttgatggctcattggcgtgtattcaagcgacatttcatgttcgttagtcttgattcactgcgtgtaattaacaaaagtaactttttctccaatgagcgaaagtatcgtcaactggttcaggattatcaaaataaaaataaggatatacccgagcgaaagtcctatttttgtgatgggtttgagtggggcccggaacatgcggatcgggcatatcaaatagctaacctctccagtgataaacgtgagatcgagttgccattcgtcttcaacccaattaagagacattttgacgcaatggctcgtaagatgggcggcagcaatgcaatttttgctgtggaacgtagggaacccatatttgtaactgaagacaattggtttggtcatactctgataaccggaaacgtgggtaccgggaaaacggtgctacagcgtttactaagcattagcatgcttcatcttggtcatgttgttgttgtcatagatccaaagaacgatgcagagtggcgagaatctctaatggaagaggctaagaccctcggtcttcctttctataaatttcatcctggccagccagcatcttcggtctgtattgatgtctgcaacacctatactaatgtttctgacctaacatctcgtcttttgagcttggtgacagttcccggtgaggttaacccattcgttcagtatgccaaggctctcgtttccaatgtgatttccgggctttcttacatagagaaaaagccttctatttatctgattcacaagaacatgaaaagccacatgtctattgtgaatcttacagtcaaggtaatggagtcatgttacgcgagatattatggttacgatgtctggaccgaaaaagttaagtacgtcgctaacgaaaccttgccggtacgtttcaagcgtctcgctgaatggtttacggctcatttcatgaattacgaggggtccgaacaaatagactggttagatactgtttcccagcttattgattactcaatgtccgacccagagcatatggctaaaatgaccgcaggtattatgcctgttttcgatatgctcattgaaaaacctttaaatgagcttttatctcctaacccgaactcagtatcatcaagagaaattgtaacaagcgaagggatgttcagcactggcggggtgctatacatttcgcttgatggcctttcaaaccccgatacagcagctgctatttctcaattaataatgtcagatctgacctcctgtgccggtagtcgctacaacgctcaggatggtgatatgtcagctaattccaggataagtatttttgttgatgaggcacactcagccattaacaaccctatgattaaccttctggcgcagggtcgtgcagcgaaaattgcactgtttatttgcacccaaaccatctccgactttattgctgcggcaagtgttgaaactgccaatcgaattacggggctctgcaacaattatataagcttgcgagtcaacgatactcctactcagacgcttgttgtagagaactttggtaagagtgcgataagcacaaatatggtcacttatacgaccggttcagaaacatctttgccgcataataacttctcaggttcaatctcagaaagaaagcagacaactttagaagagagtattccaaaggatctcttgggtcaggtccctatgtttcacatagttgccaggcttcaagatggcaggaaggttgtaggccaaatccctattgctgttgctgagaaacaaatgaagccaaacacaactctgtcggaaatgcttttcaagaaggccggaaaagttactttgcgtcaaaatctcgatatcaaaaatcttaataaatttctaaggaagttgcattga

SEQ ID NO: 376170 - DNA, 276 bp, Salmonella enterica
atggaggtggcgtttaaaagaaagcgcaaaaacagatttatggtaagtactcctaatactctctatctgacccaatcttgcgtggaaaaatttgggtcgcagttagaggctcaagatcttttcaataagcttcctcagtacctcgttaattctggtgctgtgatcaatacaaaatgccatgcatttaacatgcctactttgctggccgcatcagaccgggcgaaagtggacattgaacgaattatcaataacctgaaagaggctgggaacctataa

SEQ ID NO: 376171 - DNA, 153 bp, Salmonella enterica
atgattttattgaatttatttgttcgcgacaccgttgtgcctgaaaaagcagctgacgagctatttcataaaaatagccatttagaagtctggatgtctgaaattgtggtgaaaaattgtgctattagagcagaaaaatctaatccgcaataa

SEQ ID NO: 376172 - DNA, 1257 bp, Salmonella enterica
atgggtattacgtcccgcttaaaagtcatgtcgttcttgcaatattttatctgggggagctggctggttaccctgggctcttacatgatcaacactctggattttaccggcgcgaatgtcggtatggtctacagctcaaaaggactggcagcgattatcatgccgggtattatggggatcattgctgataaatggctgcgcgctgagcgagcctacatgctttgccatctggtttgcgcgggggcgttattgtacgccaccaccgttaccgatccccagacgatgttctgggtgatgttggtgaatgcgatggcgtatatgccaacaattgcattatccaatagcgtttcgtactcctgtctggcgaaagcaggtcaggatccggtaacgtcatttccgcctgtgcgcgttttcggcacaataggttttattgttgcgatgtggacggtgagcctgatggggctggaactgagcagtgcgcaattatacatcgcttctggcgcatcgttattgctggccctgtatgcgctgacgttaccgaaaattccggtagccgagaagaaggcgaacaccacgcttgccagtaagctcggactggatgcttttgttctgtttaaaaatccacgcatggcaatcttctttttgtttgcgatgatgttgggggcggtgctgcaaattaccaatgtcttcggtaatccgttcctgcatgattttgcccgtaatcctgagtttgccgacagctttgtggtgaagtatccctctatcttgctttcagtttcgcagatggcggaagtgggctttatcctcaccattccgttcttccttaaacgctttggtattaaaacggtaatgctgatgagtatgctggcgtggacgctgcgtttcggcttctttgcctttggcgatccatccccgtttggctttgtgctactgctgctgtcgatgattgtttatggctgcgcatttgatttcttcaacatctcagggtcagtatttgtagagcaggaggtggactcaagtattcgcgccagcgcgcaggggctatttatgaccatggttaacggcgtgggggcgtggattgggtctcttttaagcggtatggccgtggattatttttctattgatggcgtaaaagattggcaaactatctggctggtctttgccgcctacgctctggcattggccgttatttttgcattgttctttaaatatcagcaccatccagaaaaactgtcgaccaaatcattagcacattaa

SEQ ID NO: 376173 - DNA, 255 bp, Salmonella enterica
atgactaatgcagctctgctattaggtgaaggcttcaccctgatgttcctcggcatggggttcgtgctggcgtttctgttcctgctgattttcgccatccgcggcatgtccgccgccgtcaaccgcttcttccctgaaccggctccggcgccgaaggcggcacctgccgccgccgcgcccgtcgtggacgacttcacccgcttaaagccggtcattgccgccgctatccaccaccatcaccgccttaatgcttaa

SEQ ID NO: 376174 - DNA, 597 bp, Salmonella enterica
atgaggcgtatcgataataaaaagaatgtccgttttgataaagtgcacaagaagctcccgggccttgtcgctatgcactcaacaagaaatgtccttttcatcaagtcccagcttaaaaaagttactttttcatggcggctaaaccgaaaccaggaagttaaaacagcagagcaacttgtgagtttgttggagcgcaggagagcctcagaagtaaaaaatgtagcaactaccaatttgaatgtcgtgtctaatatcgataatgctttacaccgtcttgaatttcacccactgaagcagggcgaatcttatcgcctttgtcgaactaactctttccctgttccgattgctcacatttttgcatttaggcctgaagggcaggaacgaaacgggaataaatatgctgagactgattattcagtagtaaaagcatccttgcccattttcgcagcaggcaacatacctcaattaaaaacgctctctgactgggctcctgaaaacagccagggcccgtccaaccaacggaagctgagcctgaaatatacagaactcgtgccgggggctgagctgggcattttcattgtcagccccgaaaattaa

SEQ ID NO: 376175 - DNA, 906 bp, Salmonella enterica
atgcaatggatttccacagccagccagaaaatcgatgagcgtctctatcgtgtctgcgtctgggtaaaaaaatatcacgctgatgcgattaaccgcgttgtgcttaccgttgatctaagtaaagcccgacatgaccctgacgaggaccaggtaagagcagagctgctgtgcggccattattttttgcttcgtaaggaaaacgcttcgaactctgcgcctgacgatcaaaagtttgctttcctgcctgacgggcgcaatctgtgttggcagaccgcaaccccggtgcttcagcatctcctgctcaataaaaacgttcctgagtcgctgaggttgcttacggactacatacatatgcgtctggccaggctgacaatggtaccaatgtccggaaccatcatgaacgaggctctgctggacagcatcagctgggttaaggtggatttgacctacttctggcagtacgaacagctcagctctcatctgggacccatccagataacccacaaggcactagtacgcttcgggcatctggcaaagaatgatgaaaactccagtgccataagaatcctgcgtcagcgtctgtcttcagaattcttacaagaatttcagatggctgaggatgagctaaagcgcaaacagtcgttgatgggcaccatggacgtgaaaatgctgtttcatgctcattaccccagccagaagatgctggtggctcgatataaaaatggttgggtaatggtggattgttttctgtttcatcataccaaacctaagaaaaaagcaaaaaacaaaactactgtggctaagcctcaacttaaagagactaaaagagaagggagtgaaaatggaactgggcattatggtgtgcatcgtgttgttactctccgtggcggcggcgtggatcagtaa

SEQ ID NO: 376176 - DNA, 330 bp, Salmonella enterica
atggtgtgcatcgtgttgttactctccgtggcggcggcgtggatcagtaataagacagttgatttgctcgaaagattctatttcaagcgtccgctgagcatggagtacgcggcatggctacgtgtaatgtgtgcaggcttgttattggtttttattcaggttgctccacaatttacacttctgtatacccttaaacttgtcacgcttattaatcttggaatccagacaatgaaattaaatggcgtgtacaaatataaaagaacgggaattttgcctccgggaggggcactctctaatctcaccagacttaacccgttcaagaaaaaataa

SEQ ID NO: 376177 - DNA, 1176 bp, Salmonella enterica
atgaagaatcaatcagtgatcagacagttttcggaaagcgaattgcatcagcagctggaaacgttcggcaaccatgataaacagctttcacgcttgatccgttacttttcccatctgagatacaacactgctaaaacctatctgcactggctacgagtatggaacgaatggtatctggcgaatgcccggttgcatacagactggccagtaagttcgctccccgtgtctgaggacgctctgcttgcgtttatggggcatcttgaaggcaaattgtcacgaagcagcataaacagctgtcttcaggccttaaatagtatccataaaaaagggcttaacctgcccgggattattacgtctgaagcatggtacatgctggaagccttaaaacaatcggaagcccggaagcgaaagacgactaaacaggcaactccctttcttattggcgatctcaaggctctgataaagttacgcagtactacaaactcagttcgtaaacttcgtgacctgtgcctgatctggacaggctttgaaacactgctccgttcatccgaaattcgacgtatacgtctgaaagatctgtctctggatagtatgaccggtgaatttaacctgacggtataccgtacaaaaacgaacattagtacacttcttacctaccggctgacacgtcagttaactaactgcctcttgagattgatgaacctcgtgaaaatggatcagcacagtcatccggatgaattccttttccaggccgtaaatttccatgatacaggctatatgccacccggctggaagcttcggagtaaggggaatgagctatctgaacttcttaaaaggcataacctaccctatcgtgctaagcaaagtcttctgaacgatgaagatgaagaagacactgtggacgatgccggtatgctcagcaaaaattcccttttacgagcatttaaagagatgtggaatgagctttatccaaatgagactaaaactcgttactggacagggcacagcgttcgtgtaggcggagcgatacagctaaatattgaaggttactcgctaccacagattatggaaatggggaactggtcgaatgaagaaatggttatgcgctacattcgtaatattgaagctggtaaaaaagcaatgatcaagcttatgcgaaatgcctttgatgaatag

SEQ ID NO: 376178 - DNA, 213 bp, Salmonella enterica
atgtctgacacaaagcagtcttatttaatgaaattccgtaagtgtagttcgttcgaaacgctcgaaaaagtatttgaaaggttatgtgaaaaaaactcgggtgtcgcctctcttgaaatttctggtgcttatgatcatcgtaaagccgaactgacaatgaaaaagttatatgacaaagttcctgcgagtgtgtggacctttgttcgcgagtaa

SEQ ID NO: 376179 - DNA, 1083 bp, Salmonella enterica
atgcgtaagagttatacatttggtattccatttggactccagcgagaatcaggactctttttagatattacagaggtcagccggggtattgactgtaactgcatctgccccgcttgcaaaactgatctgttagcaaagcagggggaggtcaagctttggcatttctcacacagtacagctgtagccggtgactgtgatggtctgatggaagccatccggggaaagattattgaagtcatcaacgagcaccaggttcttggtttcccaaatcttctcgctggcgacgatggtgggccggtttcactgaatgaggttagtggaagcggcagtatgttcggaggcacagctgatctgttcgtaaaggttaatgatttatgtgtggccgtctttctggacagggatcgcagcatttcagagaagttaacctttgaccatcttcatccttccgaaagagttgccgcattgcgtatcgatcttcctgatattgaatatgaaatcagtcaggtgcagctcgggcgacgtaaaacaacatacagtgagtgcattgaaagcctgatcattgatgagaccagttcccgggaatggctatatcatccattaatgcatgaacttgaatctgaacctcttcaggagtatcggggacgggagccttcagaggaagggcctcttcttcagcgccttgctgactgtaagatgaaattgcctgatatccttccgggcagtcataacgcgctagtcaggttacagcaggatacgattgtatgtctgtgtcggttaacggttcgggcttatgacatcgctcagaccgatgaatttcctttgttccttcgctatttcaggttgcactgcctggaaaacagcgaacatgtcagttacgaaagactgatctgctggcaggaaatgatttcaaaaacccaggaaggccagtccttgacacaaaacgaacttgaatatcttcatgagattgtccgcatcgccttttacaatcaccggcttaacaatgtcagtatttcagatgttaaaaaccatgacactggaaagaagagcggcagggtagagtcacaaaactattcacttttataa

SEQ ID NO: 376180 - DNA, 1554 bp, Salmonella enterica
atgaccgcactattgcggtgttgtggtaagggatacgcttcttcggtgatcaatatggcaaatattgttacgtgcaaaacaaaggacggcgaaacagtccagtatgttgacgaggtaattggttcgggctcgatgaaggatgtttacttctcgcctgataaatcatacgtcgtcgctttttatcataaaccgcagaacgagcaggcccgggatcggattgatatgatcaccggacgctacaggcaaaacatttttggccagtccggaggtgaatactggaaggacctgttttgctggccgacccacgttgttgagcatggggataaaatcggcatcgtggttccaacctacaaaagctactttttctttaaatacggctctaaaaacgatgattttctgggcataaaaggccgtgaaaaggaaggcaaatggtttgccagcgccagcaaccagaataaatttctcgacccacgtgaacgaggcaatacgcttacctatctcaaggtctgtctgctgctaacaagagccgtcagaaggatgcatgcggcaggtctctgtcacagcgatctaagctataaaaacgtgcttatcgatccagaaatgggacatgcctgcatcattgacgtagacggcctggttgtccctggaaagtatcctcccgacgtcgtgggcaccccggattttatcgctccggaagtggtgaaaaccagccatctttccaaagaggatccgaaccgcgtattgccaagcatttctactgaccgtcatgcgctgtcggtgcttatctacatgtatctgttcttccgtcatccgctacgtggcggaaaaatacatgacatgtcggatgaagtacgtgatgagaccttatctatgggtgagaaggcactcttcattgaacatccgacagacaaaagcaatgcagtcaaagtcagtcagctatcctccttttcactgccctgggctgacccggagaaaattccttacaccatcatgggcccttatttgacgcctttgtttgaacgcgcctttattgatggcttacacgatgccaataaacgcccgaccgccgatgagtgggaaagtgccctggttaaaacagtcgatctgatacagccctgccagaacaaggcgtgtgaacagaaatggtacgttttctcaggtaagacaaagccggtttgtccctactgcggtacgccatacaagggtaaattaccggttctaaatttatattcatcccgaaaggaaggcagttatcgtcctgacgaccaccggttgatggtgtggagcgggcagtcaatctatgcgtggcatgtgaatcgcctcattgcgccaaatgagcgcacaaccgatgcacaaaggaaacgagttgggtattttgttttccataacgatcagtggtggttagtaaatgaaggcataaatgggcttatgtcattaccggataaacgacagattgccattggggaaaaaattgaactgacgaataacgctcagtttgttctgtcaaaggaggaaggcggcaggctggtcgtcgttcagttagttgaaaactaa

SEQ ID NO: 376181 - DNA, 1638 bp, Salmonella enterica
atgtcgcaaaatgttttacttgaagagaagattatccgcttagtgctgtctgagctgggccaccctgtagaaggtgagcggctttttcttctatcgcacgacccttcccttactgaagagattatgcggcttaaagagcggattgagagccttgcacagggtttatctgcgcgggttagcgaaggttataacgacgcagagatcgccccctcgtcagcatccagcctttccgatcagcaacaaacggtcgtaagtgatgctgataacccgggcattgacgctaccgatacaccattactgcaacccctgccagaaaatgaacctcatcctccgttctggaagctgatgccttattacgaatttgataaaccagcacagagggaagacgaaaacctgtcttccctggtattaaaacccgggcagataccgacaggccagcagcgggccggattagctgtgccacctgccgttcccccgagagctaaaatagttattcccaacgcccgcgcaggcgaacgtttctcttcgccggttgctatagttctggatgagggccagcaggctactgtcagggacgttgtctttcccaggaacattggcctgacctttgacaaagagcataagttgctgacaggtacacccaccgaaagcggcgatatagagctttcagtactctggtcatgcgcttcgcacgacgaatgcgaaacaaaacagctttttatagtcaatcccgatccgagaagcctgtggaaggtggtagagccaccagcagacgcttcctaccctaagtcccatctggacgctgctggcctggtcaggggtgacatacgtattgctgccgccagtcgccggggacgatctcatgagcatgccgggagcttcagagatgacgacttctatatcaaccactgccaggaaacaggatggtctgtcatgctggtcgcagacggggccggtagtgcggtaaattcccgggaaggctcccggattgcagtccaaacggctggcgattaccttttcaatcagctcagtggtttgaaaggcgtccatctaaagcagcacatcacggcgtgggaagggagcgatcagcaggcaaccataaacgccatgcttcatcattttaaacaggcagctacgctcgcggtcaacagtatccagaacgaagccatttgtgcagaacaacctgtgaaatcctattcaacaaccctactggcaactgtagcgctacgaactgataacgagctgtttgcggctgcattctggcttggtgatggtgcgataggtgcatacagcccttccggtaaagtcaggatactgggaaatcccgatagcggagaatacgcaggacaaacccgctttcttgaccagagcattatcgcagacccctcgtttagcggccgcatcagcgtgggtaaatggaatgatgtatctcacttgatcctcatgacagatggcgtatcagaccctctgtttgagacagataacgggcttcgcagtgacgaaaaatggacccgtctccttgatgagctcatccctgtccttacagacgccagtattgcgcctgagaggttaggcgactggcttaactttttctccacagggaaccacgatgaccgcactattgcggtgttgtggtaa

SEQ ID NO: 376182 - DNA, 1041 bp, Salmonella enterica
atgagacgccttcccgtgttttttgtcctggactgttcagagtccatgattggtgaaaacctgaaaaaaatgactgatggtctgcaaatgatcatcggagatttaagaaaggatccacacgcacttgaaacagcctgggtttcggtaatcgcatttgccggtgtagcccgtacgattgtacctcttcacgaaattgcctcgttctaccctccccgccttcccgttggcggcggtacgagccttggggccgcattgcgtgagctgaccgtacaaattgatacccaggtcagaaaaaccactcatgaggctaaaggcgactggaaacccgtcgtgtatctccttaccgacggacgtccgactgacgacacaaccgcagaagtgaagcgctggaaggatcactacgcgagtaaagtgaatctcattgccgttggcctggggccgtcagcggacctgaataccctgcggcaactgacagagaatgtcatgctgttcaccgagtctcaggaaggggactttacccgcttcatcaaatggatcacagcctcggttacggcgcacagccgcagcgtcggagacgacaaacaacctgagctcagccagactgaatacatagtccggctggccaaggacgagccagtaaaagcgtacgacgaaaactgcgttacgcttaccggccgttgcagcaagacccgtcgtccgtatctgatgaagtatgaacggccaccagcaaggatttccgggctcgatttcagcctgaacctgaacagctttaatattgccggatgctatcccatcgatgaagactattttgcatggtcagatgccaccgctaccggtttgcaggtaaacaccagcgaactgcatggcgtaccgggttgccctcactgcggtaatgccagtgcgtttgccctgtgctcatgcggaaaattgctgtgcattgacggcccggatgacgtgatctgcccgtggtgtgaaacaggtctgtcattcagcaatgatggcggaaacactaacttcgacgtaaacagagggagaggttga

SEQ ID NO: 376183 - DNA, 639 bp, Salmonella enterica
atgcgccgcctgcctgtttaccttgttatcgacacatccggctcgatgcgcggtgagtccatccattccgttaacgttggaattcaggcgatgcttagcgctcttcgccaggatccctacgccctcgaaagcgttcatatctccattatcacctatgacaatgaggcgcgtgagttcattcctctcacgccgctggaagacttccagttttctgacatcgttgtgccaagcgcaggcgggacgttcaccggtgctgcccttgaatgtctgatgcagtgtgttgaacgggatgtacgtcgctcagatggtgatacaaaaggagactggcgtcctctggtattcctgatgactgatggaaccccttctgatgccctggcgtacggtgaagcggtaaaagcgattcgcggccggggattcggatccatcattgcctgcgccgttggtcctaaagcaggccatgagcacttaaaacagctcaccgataaggttgtgtctctggagacgctagattcaaccgcgtttgcaggtttctttaaatgggtatcggccagcgtgtcttccggcagcacaagcgcggggatcaataacggaactgatacccttccccctcctccaccagaaatccagctggtgctctga

SEQ ID NO: 376184 - DNA, 642 bp, Salmonella enterica
atgtctgtcagtctgagcaaaggccagggcgtaagcctgaaaaaaaatgaatacgatctctcgtccgttactatcggcctgggttgggatattaatgaggaaaagaaaggtttcctcggcgggatctttggtaaaaaagaagaagaatacgaccttgatgtgatcgctttcctgtgtaattcagccggaaaggtgaccgatctcggcaatgtggaaaatggtaaaccaacgcttgtgaatggcgatatcatctttttcaacagccttcgccataagtcaggaaatatctggctgacgggcgataaccgaaccggagccggtgatggtgacgatgagcaaattattgtgcgcctgaattcccttgacgctcagtacgagaaaattgtgttcatcgttcagatctacaatggtgaaaagctccagcagcactttggtaaagttcagaatgccttcatccgggcagtagatgcccgtaatattgaaatggcacgattcgatctttctggcggacccgccttcgccagccagcgctccatggtttttgccgagctgatacgcgaggctacaggctggaaactcagggcaattggtgagccttcagaatcagattcgtttgtctcgcacctgaggaattacatgtga

SEQ ID NO: 376185 - DNA, 639 bp, Salmonella enterica
ttgagacgcttacccgtatatctgctactcgacacgtccggctctatgcacggagagcctatcgaagcggttaagaatggcgttcagacgctgcttaccacgctgaaacaggatccgtatgcactcgaaacggcttacgtgtcagtgatcacctttgattcttcagcccgacaggcagtccccctgacagacctcctgagtttccagatgccagcactaacagccagcggcaccacctctcttggcgaagcgcttaccctgacggccagctccattgccaaagaagtacagaaaacgacggctgacactaaaggtgactggcgtccccttgtattcctgatgacggatggaagtccgaatgatgactggcgtaaaggcctgaatgactttaaagcggccagaaccggcgttgttgtggcatgtgcagccgggcatgatgccgataccagcgtcctcaaagaaatcactgaaatcgtggttcagctcgatacagctgacagttcgacgattaaagctttctttaaatgggtcagtgcgagcatttcggtaggcagtcagaaagtggagtccagcaaaaaagaagtgatcggtcttgaagacctgccaccgccgccgccagaagtaaacgtggtcttataa

SEQ ID NO: 376186 - DNA, 162 bp, Salmonella enterica
atgtcggtaattcaatggtggttaacttatttctttaatgccgcttctgagtatttaatctccacccgacagatgtcgtgccgttttatcaaatctacaaactctggcctcttcctgaaactactctcctcttccgatctcttaagaaggaattacatttga

SEQ ID NO: 376187 - DNA, 468 bp, Salmonella enterica
atgcaattaaataccagacaggcccggatttttaagcttgccaacttactgggcaccggcaagcccgtttccgctgccgacattataaccagtctggaatgctcagagccgacattaacccgggcactcaaagagctacgcgagtcatattctgcggagatcaaatacagcaaggcaggtcattcctaccatctcgttaatccgggccagctggataaaaagacccttcgccggatgaatgaagcgctcgcacagaatgctgaactgaaaaccggtgagtccacagggaaggtcgtactcgataaggataaaaaaacagccgtgtcattatcgctacgcatgcggattttaagaaaaattgaccgtctggctgcgctgagtggctcgacccgaagtgaagcggtagagaagctggctctgcactccgttgatgaactgataaaagaatacagcgctaaaaagtcctga

SEQ ID NO: 376188 - DNA, 1209 bp, Salmonella enterica
atggggttcagattcagaaagtcgatcaacattattcctggtgttcgcctcaacctgagtaacggtgcaccgagcctgagtgtcgggccgagaggtgcttccgtttcttttggaagccgggggacctatgccaatctgggcttgcccggtaccgggctgagttaccgtacccggcttgatcgggccgcgcgttccggaggtgggaaccggacggctaccgacccggggctcagacaggcgcttgaggaggaagccgctgatctcatgtcagcggtgaccgcaatccgtaatattcacgagctgacgccggatcctaaaacaggcatcagctgggcagagctggaagcagtatacctgcataacagaacgtcgccttttcaggttccggcaccggtgcgtccagaaaagccagactatcttgcattgccggaaaagcctgccgagagcgaaggcattagttttctgggtaaatggtttgaatcggaatcagctaaagctgagcgccacgccgaaaatcttcgccggtggcagcaggagctgattgatgtggagcgtgagaatacccttcgacagcaccggtaccagcaacaacggacggcctgggccgaacagtatgcaaactggaagtttgaggctgaagaacatgaaaaacggctcgccacggctcaggcagatgcccggcagcagttccggacagacgccgcgtttttcgaatcatacctggcgggtgtgctggcagaaactgaatggccgcgtgaaacgcttgttgcatttgaagtaaagccggagctatcagcagtcctgctggatgttgatttagctgagattgaagatttccctgataagatttacggcgttaatgcccggggcacggagctgacggaaaaagccatgacgcaaaaagccgtacgcgaaaactatgcccgccacgtccatggctgcttgttccgcctggtcggtatcgttttacatacgctaccgttcgacaacgtgattgtgtcaggctttacgcaacgggtcagtaagcggaccggctatctggaggatgagtatatcctgtcctgcaaatgcagtcgcagccagatgtcgtcagtaaattttgcaggcttagaacacattgatccggttgaagcgttaggcgatcacccggttattcgaaagatgagcagtaccttcatttttcagcctattgaaccactaaccctttaa

SEQ ID NO: 376189 - DNA, 957 bp, Salmonella enterica
atgaaaaatcgtctttctccctggaatctgggagccacgctatacatgcctgcaacacgggaagatattgctgatgccgtcctgcacgggaaaatcccgggtttgcgctctctggtgatttgcctggaggatgctgtcagtgaagcagacatccccgtcgccctcaaaaatctggagcacctgctgcacgagctcagtaacagcatgcatagcctgggtaaaaatgactggcctctggtgttcattcgcccccggcatgccgaaatgggcagatggttaaaagcgcattatgatctttccgctgtcgacgggtttgtgttgccgaaatttaccctcagttcgttagctgaatggtgggatatcatgggcgggactcacctgtgcatgatgccaacgctggaaacagaagacgtctttgacgtggttcagatgcgggagctggccacccgtctggtggaacatccctgccacgaccgcattattgcgcttcgaatcggcggcaacgatcttatgaacgttgtgtcgcttcgccgtccccgggacctgacgctgtatgacagcccgatgggctacgtcatcaaaatgctcgtttcggtcttcggcccgcgtgattttgccctgaccgcgcccgtatgtgagcatattgacgatcatgccgtaatggccagagagctggctcttgatatggcacatgggcttgttgggaaaacggccattcacccgggtcagatagaggtcattcaaaacgcgctgatggtcactcagggtgagcattctgacgctctgcggatcctgaactctacccaggccgtgtttaagtcgcagggagcaatgtgtgaacccgccacacatcgccgctgggcggctggcattctggacagagctcgtttttatgggttacagaacgagcaaagcgctgatggaatcagattacttaccgtgacccagcatcattaa

SEQ ID NO: 376190 - DNA, 1080 bp, Salmonella enterica
atgcagccacatgacacatttaccggctcataccagcccggtgacgtggaatttctgctaaagccggttgtcattgagatgacgccggttgagcaaaaagaagagctgattcagtcagggaagaaacattattcggacatgctcagtcaggagccagcgccaacacaatggcatcttgatttgtttcaccgggcgctggatcggggcgcagagagacttgcaaaagaagtcacacagctcgctattgctctggccaaacgctttggtgatgagcccattgtactggccagtcttgtcagggctggcgtgccgctcggcgttatgctgcaccaggccctgcgtgacatggggaaaacctcatggcattacggtatcagcattatccgggatcgtggaattgacggtgcagccctcgacgtcattgaagagcggcatggtaccagcggtattgtctttgttgacggatggacaggtaaaggcgcaattaccggagagcttgtacgcgcactgaaagatcgcccgggctatcctgagcagccgcgactggttgtcctggccgatccctgtggctgctcctggcttgcagccagtgatgatgactggctcattccttttggcatcatgggtgcgccggtgtcaggcctgatctcccggtcagtgtggtcctctgaaggattacacgggtgcatggtttgcgagcatctcagtgaattcgaatgcagccggatgcttgtcgataccgtcgctcatttccgtaagaagttaaccccgtcatccctcgctcccctgagctggaatacggagtcagcccggatcttatggcagacaagtcgcgacgttatcgcgttcctggccgatgaatttaaagtggacagcgtcaatcgtataaaacccggtattgctgaagcaacccgggctgtattacgtcgggtaccggaccatgtatttgtgcgttctattgacgacccggacgttgccttgcttgtagggcttgctcgtgaaaagggaatagttgttacagaaatggggggaaccctcggccagtatcgggctgtaaccattatcaagaaggtactttga

SEQ ID NO: 376191 - DNA, 774 bp, Salmonella enterica
atgaataaacccgttgttctgagcgaccttgacgacacgctctttcagacccgtcgtaaaatggtggacgagctggccctggagccattccgtaccggtgccgttgatcgcaccctgaatccacgaagctttatgacggaagaacagtccatgttggtggactggctcctggagcaggctgaactcatacctgttaccgcccggggaactgaagaaatcagccgcgtccggatccctttccactcctgggcaatcaccacgcacggggccgtcattctcacgcctgaaggcaaacccgacgaggagtggaaggcccatatgcttggccagctggctccctaccaggaaaagctgacatcgatgcagcgtctgatcactgaaatgatggacgcaaaagggatcaatgcctgggcaaggctgaacttcgaatactgtgaaacggcggtttatatggtgatgaagcaccgcgacagcacccgccttgacgagctcaatgccattgcagatgagatagaaacggtgtttccgaccgagggcttctacatccaccgcaacagtaataacgtggcctggcttcccaccccggttgagaaagggctggcagtcagatggctgcttgaaaaacttcgggctgaacgcggagtcttccccgtaattggcctgggcgacagcctgagcgatcatcgttttatgaaactgtgcagctggtttggcatcccgcgtcagagtcagtttgcagatgccatttcacagcgaatttttggagaaaattaa

SEQ ID NO: 376192 - DNA, 1143 bp, Salmonella enterica
atgtctgataccctcgaagatatgatttatcgccgtaccctctcatgcggtacgatacaggtaacccgcgaccagggtgatgtttcgctcgatgacctgtttgatatcgctgaaagacgtaacccgaaacgcgcctttctgtttgtcagcaaagtactcggcaggcacattcccgtgccaccctcagtcatgcggcaggcctacagacagcttgccagccagttccccgcaacgctgacagggcccgtactttttatcggtatggctgaaaccgccgttgggctaggggccggtgtgtttgatgaagtgcgccaccagcatcgtgaatctgtctatctgacctctacccgtcacccggttgatggcacgttactttgcgagttcaaggaagaacacagccacgccaccgatcatctgatctatctgccagatgatgaagagaaaagacgtcgtgttaccaacgcacgaacgctggttttgattgatgacgaggcaaccaccggtaatacctttattaacctgctttctgccctgcgtaataccggcaagcttcaacatattgaacaggttatcgccgttacgcttaccgactggagtagcaacgccctgtcggagcgcacatccttgcccgtcacttcggtttcgcttgtaagcggtcagtggggatggaccccattacctgatgcacctgtcccggacatgccgaaagtcaacgtaacttcacgcggagaatgggacatcctgggaaaacagtcctggggtcgactggggatgctcgcacctgcggccgatctcggccatgaggtctccgtccgcaagggggaacgtattctggttctcgggaccggggaattcgtctgggagccgttcctgcttgctgaacggctcgaagctgccggagcacaggcactttatggttcgaccacccgctcccctatcgccgttggttatgccattgagtccgccatttcctttacggataactacgggctgggcatccccaattttgtctataacgtcgcccaccagcagtttgaccgtattcttgtgtgtactgagacacccgcagaaagtattgacacgcagcttcttaaagccctggctgaggttgcgcccgtcgtggagattgttacctatgaataa

SEQ ID NO: 376193 - DNA, 1059 bp, Salmonella enterica
atgaacaagaaaatttggtttatggaaggtttgtcctcccagcgagatattattcagggggtaaaatcatttgcacaaaaaaataattttgctattaccgtatttgcctcccaccgtaacgaaagacatgaaattctttccgttgccgattattctttgactgaacctgaagatcctcaaaaacgtcttcagtttattcaggaaaccattcagacctacggcatccaccatattcatactggccgtaacagccagtggtttgaagaacaccgttcagccattgaatcgaccggagccacccttactaccggtgcaacaggcgtcgactggttaactctggctgacgaaaaagttacttttgctcagtttatggagcaaaacgggctcccggtcgtaccgtcctggcgggtgaatacgctggcagaattaaagacgcacctcgcggccccgccgttctcggacagcccggtatgcgtgaagccggtgacgggtatctatggcatgggattctggcgctttgatgacagtgcttcgcccatggccgtctttaatcatcccgaacatcgtctggtcagtccgcaacagtatattgcagcagcatcggcttctgagtcgtttaaaccccttgttttgatgccgtacctgccaggcccggaattttccgtcgatatcctcgcggataagggcgaaatactcgcagccgtgggacgccgtaaggaaggggctatccagtatctggtaaacgaaggaagcgcctgggaactggcttgtgactgcgcccgggttatgaaggccgacgggctggtgaatgttcagacgcgaaacgatgtgaatggcaacccggtgctgcttgaaaccaacatgcgtccgtcaggcggggtgggttatacccttcacagcggggtgaaccttcccgggttgtttgctgcctttaagctcggtctgatgtctgaagatgcggtgatccagagcgccagaaataccttttctccggttgcagtgagatccatcacagatgtcatcgtttacccggaatcactctctaaccatctgaattaa

SEQ ID NO: 376194 - DNA, 582 bp, Salmonella enterica
atggtttcattagttaagaaccagacggtatcactcagcaaagaatcatctgcattaagccagcttcatttcggtctcggttgggatccggttaagaaaaaaggtcttcttggaggattgtttggaggcaacgactcaatcgatctcgatgctggctgcgtattaatggacagcaccggtaaaacaattgacaccatctggttccgcaaactgaaatccacctgcggcgctgttgtgcacagtggcgataacctgaccggtgagggtgacggtgacgatgaggtgattaaggtcaacctctcccgactgcctgcaaacgttgaatacctggcgtttacggtaaacagcttccgtggtcagtcgttcaatgacgtcgaaaacgcgttctgccgcgttgtcgatcaaaccggcaaagagctggctcgctacaagctgactgagcagggctcacataccgggatcgttatttcttcgctgcgccgtaataacggcaactgggactttaccgcccttggccatgcctgtcgcggccgcacaattgacgatatgcactccgatatcgtttcagcggttattcgctaa

SEQ ID NO: 376195 - DNA, 1158 bp, Salmonella enterica
atgaacctgacgccggggggcaatgcccccgttccagcccaggagttgcgggtccggatcacctcgggcggccaggtggatgcttcggcgtttcgcctgtatgccgacgggaaggtgcagggtgatgcggacatggtgttttatggtcagccacgtaacgatgatggtaccgtcagcctggtcagtgaaggccagtactcaacctttactgtcgcgctcaaccggctgaaacctgatgtccagaaaattgcgttcaccgtgacctgtgacggtgggcagacggtgtccggtcttcgtaatctttccatcgacgtggagcaaggggctaccggcctggttagcggcagtgtcgaactgagcggccgtcaggaagcagccttaattctgggtgaattttaccgtcgtaataatgactggaaattccgcttcgttgcgcaggggttcaacggtggacttaaaccgctggcagagcatttcggcgtaaatattgccgacgaaccggctcccgcagccccgactcctccggttgtaacccctccgccagttgagacaaaaatcagcctgagcaaggtatcgctgacaaaagagaagcctgcaatcagcctgaccaaacgggataacttcggtgaaatccggatcaacctgaactggcaccggggcagcggcaaatcaggctttgcaggcatgttcggctccaaaggaatcgacctggatctgggggcctttgttgagcttcaggacgggtataaatcggtcattcaggcgctcggtaatgcattcggtaattatcgcgatgaaccgtatgttcagctcaagggcgatgaccggacgggtgatgtatcagacggcgagtggctgcatatcaatggacgtgaatggaagcatatccgcgaagtgctgatttacgcctttatttatgaaggtgttcccagctgggacaagactgatggtgtggtcaccattcatgtgccggatcaaccgcccattgagacccgcctgaccgaaggtgaaaaccgtcgcacattgtgcgccattgccagactcgtaaacgaaaacggcgcaattaaagtcgagcgaattaaccagtacttcaaaggccaggacgaaatggaccgggcatttggctggggatttcgctggagcgccggctctaaataa

SEQ ID NO: 376196 - DNA, 456 bp, Salmonella enterica
atgagctttttcgacaaggtaaaaggtgccattaactctggccgggacgaactgacccgccaggttggtcgtttcaaaaacaaaaaatttatgcacggcaccgttgctgtatgtgcccgtattgccgtatcgagtgacggcgtgagttcggaagaaaagcagaaaatgatgggctttcttcgctcttcagaagagctgaaggtcttcgataccaatgaggtgatcgagttcttcaataaactggtttcaagcttcgatttcgatgttgaaatcggcaagggcgaaaccatgaaatacatcctggcgctgaaagatcagcctgaggccgctcagctggccttacgtgttggtattgccgttgcgaaaagtgacggtaacttcgatcaggacgagaaactggcctcccgcgagatcgctatcgcgttgggcttcgacccggctgaatttggcctctga

SEQ ID NO: 376197 - DNA, 1041 bp, Salmonella enterica
atggtttccacacacatcggcttcccgactgaaacggtcattgttttcattgcgctttcagtcggtgccatctttattgacctgtttatgcaccgtgatgacaagcccatttccctgaagagtgcggcgctctggtccgtattctgggttgtggttgcgatggcatttgccggtttcctctacatccaccacggtgctgaggttgccagcctgtttgtaacgggttatgcgctggagaaagtgctgtcggtcgacaacctgtttgtcatgatggccatcttctcctggttcgccgttcctgatcgttaccgccaccgtgttctctactgggggatcattggtgccatcgtcttcaggggcatctttgtcgccatcggtacgagcctgctgagtctggggccgtatgttgaagttgtcttcgctatcatcgtcgcctggacggcggtcatgatgcttaaaagcggtgatgacgatgatgaaattgaggattattcccagcatctggcttaccgcatggttaaacgcttcttccctatctggccgaagctcagaggtcatgctttcctgcttaaccagaaggaagtggatgccgaactggcgaaaccagaaaacagcgatgtcaccattggccgtggtaaaaaggcggcgctgtatgcgacccctctgttcctgtgtgtggccgtggttgaactctcggatgttatgtttgcgtttgactcggtaccggcaatcattgccgtcagtcgtgaaccgcttatcgtctatagtgccatgatgtttgctatcctgggcctgcgtactctgtactttgtccttgaagcactgaaacagtacctggttcatctggagaaggccgttatcgtgctgctgttcttcatcgcggcaaaactgggcctgaatgcgaccgatcacatctggcatcatggttacagcatcgcggcaacaaccagcctgtatgttgtactgggtgtactggcgctgggcattctcgcaagcgtcatgttcccgggcaaacctgaatctgaggaaaaggggagttaa

SEQ ID NO: 376198 - DNA, 579 bp, Salmonella enterica
atgagtgtttctctttccaaaggcgggaacgtctccctgagtaaagcagctccgtcaatgaaaaacgtcctggtgggccttggctgggatgcgcgttcaacagacggtcaggactttgacctggatgcttcagcattcctgctggccgcaaatggcaaagtgcgcggcgattcagatttcatcttctataacaacctgacgtcatctgacggttccgtaacccataccggtgataaccgtaccggtgaaggtgatggtgatgatgaatcgctgaaaattaaactggacgccgtcccgtctgatgttgacaagatcatcttcgttgtcactatccatgatgctcaggctcgtcgccagagctttggtcaggtatccggtgcgtttattcgcctggtcaatgacgataaccagactgaagtcgctcgctacgatctgaccgaagatgcgtccactgagactgccatgctgttcggcgagctgtatcgccacaatggtgagtggaaattccgcgcagtgggccagggttatgctggtggtctggcatctgtatgtgctcagtacggcattaacgcgtcctga

SEQ ID NO: 376199 - DNA, 576 bp, Salmonella enterica
atggcagtttctctcgtaaaaggcggcaacgtatctctgaccaaagaagcaccaaccatgaatatcgctatggttggcctcggctgggatgcccgtgtaactgacggtcaggcttttgacctggacgcttccgtgttcgcagtaggcgaagacggtaaagtgctgtcagatgcgcatttcattttcttcaataacaaaaccagccctgatggcgcggtagagcaccagggcgacaaccgtaccggtgaaggcgacggtgacgatgagcaggtcaaaatcgatctgaccaaagtctcagcagatatcaaaaaactggtgtttgccgttaccatctatgatgcagaagcgcgtaaacaaaacttcggcatggtgagcaacagcttcatgcgcgtttacaacaacgacaacggcacggaaattgcccgtttcgatctgtctgaagatgcctcaaccgaaaccgctatggtcttcggtgaactgtatcgtcatggcgctgagtggaagtttaaagctgtcggtcagggctttgccggtggcctggcggctcttgcctcccagcacggcgttaacatctaa

SEQ ID NO: 376200 - DNA, 1242 bp, Salmonella enterica
gtgaatctacaatccggacaaaacataccgcttcagcaatctgcgatcaggctgaatcttcagtaccctgccaaatccggctttaaaggcgaacccgatacctgcctcttcctgcttaatgctcagggaaaggtaaccggcgattctgactttatcttttataataatctgtcttctcctgaaggggcagtaaagctcgttaccggttctcagcagtccagcattgagatagcactggatcgtgttccggcgaacgtcagtaagattgcgatcaccgttgtcattgatggtgaagatactatcagtgggctcagtttattgagcattcaggctcctggtatcgctgattttcaggctgagactcagggccgcagtgagaaagcaatcatcctgggtgaagtatatcggcacaatggcgcctggaagcttcgtgcgctcgggcagggtttcaacggtggtcttgagcctctggccattagctttggcgttgatgtcgcacagccagctccgcagccagcaaagcctgctcgtatcagtctggaaaagaaacttgaaaccagatctccgcgcctcgtaagcctcgctaaaaaagcctcggtcagtctcactaaaaataaactggacacccttgaggcagcggttgcatttgtacttgacgcatccggctcaatgagtggccagttcagtaagggcaacgttcagtctgtgctggaccgcatcgccgttcttgccgcccagttcgacgacgacggtgaaatggatgtctggggatttggagagaagcacaagaagtatccaaacgtcacactggacaacctggacacatatattcagtccattcgcgggtctggaaagcgttcagcctgggagaacctgccgggacttggtgggacaaacaatgagccccctgtgatggaagaaattgtcgactactttaaggactcgaaaatcccggtatatgttgtatttattaccgatggcgggatcagcaagacccgggcgattaaagatgcaatccggcgttctgccaactaccccatcttctggaagtttgtcggcctgggtggttcaagctacggtatcctcaaaaatctggatgactttactgaccgccgggttgataacacccacttctttgccatggatgatttcggttcgatcagcgatgaaaagttatatgataatttactggaagaattcagaccgtggatcgatgaaacaaaaaggttaggcatcctgtaa

SEQ ID NO: 376201 - DNA, 132 bp, Salmonella enterica
atggaccgcatcaagtacctgaaatggatagctgaagaatcaccaactgatgatgaaatcgacaactacgatagtatcattagtcggggcgcagaaagggccgagaaggttcagttgtctttaagacgttaa

SEQ ID NO: 376202 - DNA, 282 bp, Salmonella enterica
atgagccagcactggtatgaggtgaaaagcaatcagggaattgttcaggtgatgttaggctgggatccacctttgcagtggtttcatatgtgcattgattatgacattaatgcagcagaagacccactctatactaatctggctgaacctgatccctactacgttactccggaatatctgcaatttgtacttgaacgcttcgaaataacggatattgtaataaagcccgatacctctgggctttacgaagaattattaatggatcagcttttagaccgatag

SEQ ID NO: 376203 - DNA, 192 bp, Salmonella enterica
gtggaaggtattgagacactgagtttgcggcttgatgagaacgaaactatggcccttgctcaatttgttaaacgtctgagctggagcgttctacgtggttgtgctgtgagtgacgaagaagcctgggtaatgaaaagcgcagttgataaattacaacaggcgttaagggaagaaggttatgcgcctcgatga

SEQ ID NO: 376204 - DNA, 372 bp, Salmonella enterica
atgagtaactctaagcaaccggaatatgacatggccaaagtacaagggctctttgttggataccgaaaatttgctgttgatcgcgagtggcttcggcagcaggaagaacaacgttatcgggatcgccagcgacaatttgatgaatggtccagaaaatgggtcactgtaactaggctaaaagagactcgtttatggactgacggagccatcaggcgatggctgggtgaacctcagcaacagggtaaatataaagttttccccgttgaagcggttttggctgctgagaagttgaatgagtttcagctctggcttaaaccccggctggaaaagaaacgtgcccagcatcaccactttttaattccatttctgtaa

SEQ ID NO: 376205 - DNA, 393 bp, Salmonella enterica; identical to SEQ ID NO: 148958

SEQ ID NO: 376206 - DNA, 297 bp, Salmonella enterica
atgatcaataatgattacccgttaaacacgctcaaccagctgcgtcccttgctcattggttttcgcaaggcgaatggcctgacgcaaaaagacctgtccgaaaggttaggcgtcactcaacagacatactcacgtctggaagccaaccctgccagtgcgagcattgaacggctattcaaggtgttttccatcctgggcgtaaaaatcagcttctcctcggcaaccacctcttcagagaggaagcagacggaagaaatgcttaaatcaaactcacctgcacgacaggaggattggtaa

SEQ ID NO: 376207 - DNA, 1326 bp, Salmonella enterica
atgagccggaaacagcaacgtctggtaatttggatgaacggcatcaaagtcgggtactgggaaaaaagcaaaggggtagacagcttagaataccttcctgaatgggttgctgacgaacagggaaggccgctgtcattgtcccttccttttactcccgggaaccaggtctggcgtggaaatgtggtacgtgactattttgataatttactgccggacagcgaaggcatacgcagacgtctggcaatgcgttacaaggccgatagcctggagccttttgatctgctgacggagctgggaaaagactgcgtgggcgcgatacagctgcttcatgacggagatgaacccactgatttatattccgtgaagtatcacccgcttactgaatcagaaattgcggcaactttgcgtaataccacggagacattgctaccgggcaggccagaagataacgacgacttacgtttatctattgccggtgctcaggagaaaacagccctactgtggcatgaagatcggtggtgtatgccggagggtaatacaccaacgacgcatatattcaagctaccgctcggacttgtggggaacatgaaagccgacatgagctcgtcggttgaaaatgaatggctctgctcggtacttctcggccagtacgggctccccgtggcaagaacgcagattgctcactttgaagatcagaaagcgctggtggtagaacgttttgaccgaaaatggtcaggagacggacaatggatcattcgtttaccccaggaggatatgtgtcaggccctgggcgtttcgccattacgaaaatatcaggcggacggcgggccaggtatatcggaaattatggaggttctgagtaattcagaccgtgctgagcgtgacaaagcgcagttttttatgacgcagataattttctggatgatggccgcaacagatggccacgctaaaaatttcagtatttctattgggccacagggacgttatcaccttacaccaaactatgatgtgttgtcggcatggccggtgatcggtcatgggaacaatcagatatcctggcagaagtgcaaactggcgatggccgtacgtggcagtagcaactattaccagatatatcgaatacaacgacgccactggatcaggcatggtgagataaccggcctgagtaaacagcagacagaggcgatgatagaggaaatcatcgccagaaccccgggtgtcattgaacgtgttagcgggcttcttccggaccagttcccccagcagcttgcggaaagtatttttgatggaatgaggcagcaatgcaggcgcctggctgagaaatga

SEQ ID NO: 376208 - DNA, 207 bp, Salmonella enterica
atgactgaagaacaaaaaagaatagagcgggctattgagttggcttgtcgttacggcggaaccgatgaaatgcatcatctgcaatgggtcgtggatcagatggtaagagaacttgctggagaacgttatgcacagattgtagctgatgccaccagcggagaagatgggcctgatacttacaaatggagtgttgggatcgcgccttaa

SEQ ID NO: 376209 - DNA, 138 bp, Salmonella enterica
atggctattttagcaatcattgcagttatcgccctgggtgggtacgcctacggatttattaaaacccgtgagctgagcgctttgcgtaaagaaatgaaactgcggcggagctggacttacacgcaatcagaagtgtag

SEQ ID NO: 376210 - DNA, 243 bp, Salmonella enterica
ttgcacggtgcaggtaaacagtttgccgacctttacagccgtatcgacggtgcaactgtgacgctgacacccgaagatcagctgttactggcaacgatgccatttaatattcaggatgtagaagacatcgtaaacgagcgcggtccaaagacaattagcggccgtccattctgggaagttgagccaggcccgcatgattatgaatatggcccgcaatatccgtatttcccagaccagcgctag

SEQ ID NO: 376211 - DNA, 816 bp, Salmonella enterica
atgagagagccaagaccacgccataccttgcaggtcattcgtgtaccttctctggaggttcaggacctggggctgaccagctttgatagctggcttgacgagcacgggtatgacaaaacgaatgccagaaataaccgtaccatctgggcgagagaaggcggatggcatctgaaacgttgcagaaatcttgaaactggcacggacgatttctggtttatcgctttcgatggtaaaggcgggaagatttacccgctgaaaacccaaagagactaccgggctgcatatcgtaagctggaagcagaaggttatgcgcctgcggtcatcgagcaaatgaccacaggcgcagcatataacctggcctatccacgttccaccctaaaacaagctgagacggccaccagcgagccaattcggaaacctgacgtagatatccagggtgagcactgcgagcgcgtagtgacgcaacgtagtggcgtggcacagggtaaattcaaagctctgctcatcgagaatttcgcaggccgttgtgcggtaaccggttgggttaatggaggtgtcctggatgcggcacacattgaacatggaacccggtacaatccgtctaatggcatcctgatgactccaacaatgcatgcgctgtttgatgccgatcttatgggcatagatccggccaccctgaccgttcattttaagccaggcattgaggtgggcgagctgtttgaaggccgtaaaatcacaccgctggtgtacgatctggacttagagcggctggccgtacgctgggcagaataccagggccttgctcaggaccaatga

SEQ ID NO: 376212 - DNA, 174 bp, Salmonella enterica; identical to SEQ ID NO: 124403

SEQ ID NO: 376213 - DNA, 300 bp, Salmonella enterica; identical to SEQ ID NO: 267055

SEQ ID NO: 376214 - DNA, 288 bp, Salmonella enterica
atgcctcccctcaaagctcagcttctgctcgaagaatccctgtccgcatactttccggaatcactgttcaacttcaccggaatacgcacaagcaggctgaacagatcctacgcggagagcagccagccaaggggcttcagtatgcaaagcgagcgaagaagctcgcttctgaaagaaaagccacaattgatctggataacgagcacctgtctgaaatcgaaaagtatcggtagccctagacttttagccgctgaagatctcttagataccattggtgaaacttgctga

SEQ ID NO: 376215 - DNA, 2040 bp, Salmonella enterica
atgacaaaaagactgacttgggagcagaaaagtattgtcagccatgacaccggacatgcgttggtaaaagccgtacctggtagcgggaaaacaaccatacttgtaaagcgcgttgaacggctggtcaagacgggaactgatcctcgctccattctgatcctgatgtacaacaagtcggcgcaggtgagcttcacggagaagttgaagacggcactgatgtcgagcgtgattccagaaatccgcacgttccacagcttggccttaaagattgttggttacggagaacgccaacagataatcaagaagaaagacctcattactccaagcgactaccgctatgagcaactggtaaagcaagcctaccgctatggctttgaccatgaggcgaattttattgaccccaatgaaattgaaaacttcgagctgtttattgctcgctgccgggcggcggccgtaactcctgttgatgctgccaatgatccaacgttcagcaacatcaaacgggagtttattcgcgcctatggccgctattgtgagctgctggaggaaaacagtctgcgaacctttgatgactgtttggttgaggctgtcgcactgttgcgtaatgacagcagccttggtgcccacttcaagcacatcattgttgatgaatatcaggacgttaacctgatacagcatgacatgacccgcttgctatctaagtcggatacgtcagttatggctgttggtgatgttaaccagtgtatttatgagtggcgtggtgctcgaccagactttatcggcggactgtttgaaaagcactacccgaatacgaaggtgtttcaactgtcatgcacgttcagatttggccatgagctttccttgatggctaactcggtaattcggcgcaactctacaaagctgaccaagctttgtgtcagtcatcctagcacccccaaaacagaggtcagattgcactttgataactgcctatccaaggtgctatcaaacctctcggtgagcagtggaacacaagccatattgtcccgcactaaggcgaaccttgctgaggcggaaattactttacgcctgtgtgggctaccttatcgctacctcaatggttcaagcgcattatacacccgcactgaaatcgggatactggtagttggcgtcttgctgtctgtgtacggcgatctgcggctactggaaaaccatcccaacaaacaagcgattgtttacggctttctgaaggaggctggttttagctggcagaaagggcaattcaaagcggcgctcagtggattgatggctccgcacgccgacctatggtctgctctaggccagttattcgagggcgcacaaaaccaaaaagatcggctgggcaggctcgccactatctgccagaaagacggagaggaaacgcctgctatcgatgtgttactacgcctgcgtatggagggtttcattgatagtgttggctctgagggtgtaactcgcactggatcgaacgaccagcaacgaggggtcaagaggatcgaggagctacttgtctccagtaagatcgattcccgcacgtttttaaaccttatcttgaatccaggcgaggctgcaactgactgcgatcccttcatcctttccacactgcatggttccaaggggctggagtgggataacgtaatactggtcgggctgaatgagcaggaatttcctggcggcaaacccgatgatgtttacagcgttcgcacatcgatgaacacccctccgaccgaagaggtaatcgaggaggaacgtcggctgttttatgtcggtatcactcgcacaaaacagcagctaaatctggttgtccctcttgatgaagggcttgcgcggtggctcaaaaaccgctgggatagcaccccgaagaagtcaccgatagctactcgcttcgtctatgaggctggctggactgcttgtgcggttaccagtgatgcgatctataaaagcacggtagagaaacagaaggctgacttcagcaagtttcaccaatggtatctaagagatcttcagcggctaaaagtctag

SEQ ID NO: 376216 - DNA, 987 bp, Salmonella enterica
atgacaactcaatccagctcaatacaatacgcttacgcgctagacgacgagggcaccctcacgcacattggcgctgccctgcgctcacatacttacacctgcccaggttgtaagagccccctgaccccggtaatgggcgagttcaacgctaagcactttcgccattcggaagaatgctgtgcccttgaaacctatcttcacaagtgcggcaaagaagcattcttctatcgctaccaacaagctctcagccgtgaaatgcctattagccttgagctggagcgccgggttgcctgtaatggtcctcatttagccttagttagagacgaagcacgtcagtgcgtaaaatccgtgcctgcacgctacaacttgactcaatttttcgatcaggcagagctggaaaaacacgataaggtcacagggctgcgaccagacgtgatgttgtatgatacgactggcgaaaggcgttgctacgtagagatttgtgtcacacacccctgctctcaagacaagatcgaagccggtatcccgattcttgagtttaaggtccaatctgcctctgatattcagatgttgcttaccggggcctactcgatcaaggagaagatcctgagagtattcaactggcttcccccgtttcaatctgtggacacctgtagcggcgtctgctcagtaggtaacgtggatatgtctgtctggagtttaagtggttccggccgactcaacgaacaaacgatgccgctcgctgaagtggatttaacaatcaattctgacgtgaacacatggcctagatcgttaggggccgctgagctggcagataacttacgagcttttatccgtcacgccgatcctcattcactatttcccaactgcattatgtgcgagcaagcaggccgatgggaggatggctatctgcaatgtcacagtaaagcaaagatcgttccctacaccgaggcccgtcagtgcgccaattacaaggttaaggcatga

SEQ ID NO: 376217 - DNA, 309 bp, Salmonella enterica
atgcgcaaatttaagtacataatctgtcaccagtgcgaaggccacgggaccatggaaaacccggcctttgaaaatggattcacccaatcagaaatggctgagtgggagccagaaatgcgtgaaaagtattttgccggagcatttgatgttcgctgtaacgtttgtgccggtgacggtaagctcagcgtaccaaacgtagcggctatgtctttttcagaacgacgggttctggcagcacggcggcgtgatgagcgtcttcaggctgctgatgaacggctgtcccgccaggaacgagcaatggggtactga

SEQ ID NO: 376218 - DNA, 858 bp, Salmonella enterica; identical to SEQ ID NO: 105554

SEQ ID NO: 376219 - DNA, 204 bp, Salmonella enterica
atgcaaacccaaaaagaaattacagttggccagatctgggaagaagtggatccaagactgatccggaaagtgcgggttgttgaggtggcctcgttagaagggcccaaaggcatcctaatcgaaaacgtggagtctggtcgtaagaactgggcgtcgtcatcccgctttaatggaaagcgtggagggtatcgtcttatttcctga

SEQ ID NO: 376220 - DNA, 405 bp, Salmonella enterica
atgtctgaagcactcaaatcgttaaacaatattcgtactcttcgcgcccagggccgcgagctgcctttagaagtacttgaggaaatcctcgaaaagcttaatgtcattgttgatgagcgtcgtcaggaagaatcatccaaagctgccgaactgcaagctcgtcaggagaaacttgacgccctgcgtaagttaatggaagaagatggtatcaacccggaagagctgcttggctcattccaggccaaatctacggctaccaagaaaagccgtggaccacgcccggccaaatactcatttactgatgaaaatggcgaaacaaaaacgtggactggacagggccgtacccccaaagctctggcagaacaaattgcagccggtaaaagtcttgatgatttcctgatctaa

SEQ ID NO: 376221 - DNA, 456 bp, Salmonella enterica
atgttcaaaaacagattttctttattgtgtcttgctgtggcatcgtcacttactcttactgcttgcgatgtagttgatgctgcctatgacgagactttaaatgataacgcacccgaaattgtaatagctggaggattcaaaattgatatccaaggtaatgcagttccggttgagggatatgataattgctctttgaatactcttcagggaagctttgatacggataaatcaaattgtattgttctggatagaacacgtaaaaaagtaccggttctagttcatttgtcatccggtcccgtcaaagaagaatggaagatcgagcaccaggttgaaaaaaacaaatccggcaaaaatttcatccaaactcgtatgattagacctgacggtaactttgtagtgcctgcatcctcagaacgagggatctttagtggcaaacattacagtcaagccagctaa

SEQ ID NO: 376222 - DNA, 666 bp, Salmonella enterica
atgttctctgaacgctcagtacacttaatcacttcctgtacaaagggcaagaatcatcagggccacgtctggccgacattggacatagatccaaaacaaaccccggacgacgcagcatatgcctggagtaacattgtagacgacgccagaagtaatcaggcggtaccggcattgtccttgtattcaggtaatcactggtctacggcaaaggaaattttaaactcaaccagaaatctggagttgtggataatctctgccgggatggggtttttaaatagtcgagatcgggtgccctcttacgaggcgacatttcatcaagtaccattcaggcatgatctctggtggaaagccatcacaaaatcactaggtaagcataaccgttgcgcaactataagccagttaatgcagtccagcccgaatgatgaatatttgattgcggcttcgcctgtttatattgctgctgtccagaatgacatcctgaagggcattgagagtttgactcatcctcttacgcaactaacgatcgtgacatcaggggcatatgctggcccacttgaagaatacttaattaagagttcttcaagaatgatgaaagagctagagtgcaatatggtgtgcctgaatataaaactggctcaatacatacttaaaagtggtagtcgttag

SEQ ID NO: 376223 - DNA, 231 bp, Salmonella enterica
atgacaagtacacttgacccatcacacaagcaaattgaaatgtggcgcagagctaccggttccgaaggtggactcgacgaataccgcaactgggttctggaaaatagtatgagatttacagcatacggtatccataccgttatcgtcttttgtgttgcgtttgttaggaataacactgtcatgcagaaaaccggtcatcttactgggggcagacgcgaagaatcaaaatga

SEQ ID NO: 376224 - DNA, 333 bp, Salmonella enterica
atgcagattggaaaactggcggcattgactggcgttagcatacggatgcttcggtactacgagagcgcaggtttgcttcatccttcgcgaaccgatacgggctatcgcagtttctcgtcagaagatgtggatattgtcagacggatacttattctaaatggtgcaggtttcacgttaccggttgtgtgtagtttgctgaactgcgtacatgcaggaacctcaccttgcgaggaactaaaagctaaagtgcgagaacaactggcacagatagaccgtcagtttgacgcgctctcggaaagccgcaatcttctcaataagtttcttaatgactag

SEQ ID NO: 376225 - DNA, 378 bp, Salmonella enterica
atgttaaaactagtcatgtgcgtcaaaaggcgtgcccatttaacgcgagaagaatttgatcattactggcgtaaccaacatgcctcactggtggttaaacactcagaacgtcttggtattcgtaagtacatccagacagttcccctggcgaacagtgccgcgcaatcagcgcttcagcagacaagaaattcattgcccgtcgattttgatggttgcgccgagttgtggtgggacagtctggaatcgcatattgcagcccgaaaaacagaagaaggattaagcgcccttcaggagcttattgacgatgagggggaattcgtggatttggagcgttcacagctatggtacggtgaggagcggtgtgtgatttctgggtga

SEQ ID NO: 376226 - DNA, 435 bp, Salmonella enterica; identical to SEQ ID NO: 10324

SEQ ID NO: 376227 - DNA, 351 bp, Salmonella enterica; identical to SEQ ID NO: 10325

SEQ ID NO: 376228 - DNA, 276 bp, Salmonella enterica; identical to SEQ ID NO: 10326

SEQ ID NO: 376229 - DNA, 423 bp, Salmonella enterica; identical to SEQ ID NO: 10327

SEQ ID NO: 376230 - DNA, 1695 bp, Salmonella enterica; identical to SEQ ID NO: 31949

SEQ ID NO: 376231 - DNA, 363 bp, Salmonella enterica; identical to SEQ ID NO: 39670

SEQ ID NO: 376232 - DNA, 237 bp, Salmonella enterica; identical to SEQ ID NO: 10330

SEQ ID NO: 376233 - DNA, 708 bp, Salmonella enterica; identical to SEQ ID NO: 10331

SEQ ID NO: 376234 - DNA, 1680 bp, Salmonella enterica; identical to SEQ ID NO: 10332

SEQ ID NO: 376235 - DNA, 1668 bp, Salmonella enterica
gtggacgaatatcccatcatcgacctgtcccacctgctgccggcggcccagggcttggcccgtcttccggcggacgagcgcatccagcgccttcgcgccgaccgctggatcggctatccgcgcgcagtcgaggcgctgaaccggctggaagccctttatgcgtggccaaacaagcaacgcatgcccaacctgctgctggttggcccgaccaacaatggcaagtcgatgatcgtcgagaagttccgccgcacccacccggccagctccgacgccgaccaggagcacatcccggtgttggtcgtgcagatgccgtccgagccgtccgtgatccgcttctacgtcgcgctgctcgccgcgatgggcgcgccgctgcgcccacgcccacggttgccggaaatggagcaactggctctggcactgctgcgcaaggtcgacagcgccgcgctgctggtcgatgaggtcttgcccaaggtaccactcagacagtgggtgctcagtgtccccttccagctacgcttcctgtttgccagctacccggacctgatgggcaaggccttgggcatcgtctatcgctcgattgccacctggctgctccggcaggctggcttcactcacgacaccgcccgcaccggggcggtgaccttcatccagcgcttcggctcggccctgaacctgaatgtccactttcatatgctgttcctggacggggtgtatgtgacgcggtgccacgacggcaacagcgacgacaacaacaccagccaggtgttccgccgggtcaatgcgcctaccaagggcgatctggaggcggtactgcagcagctcagcacccggttggcccgtttcctcgtgaaggagggcgtgctgacccaggacagcgagaacagttacctgactctggatcacctggcagacgagcccatgcagcaggtgcacgggcacagcattacctaccgcatcgccctcggcccgcagcagggcaagaaggtcttcaccctgcaaaccctgctccccaaagcagcggaagacgacagattgactcagttggccaaggccggcggcttctccctgcacgccggcgtggcagtgcaggcgcatgaaagacagaaactggagcacctgtgccgctatgtggcgcgcccggcgatctcggagcagcgtctggcgctgacaagagacggccgggtacgttacgaactcaagacaccgtaccgggacggcaccacccatgtgatcttcgagcccttggacttcatggcgaagctggcggcgctggtgcccaaacctagagtgaacctgacccgcttccacggcgtgttcgcccccaacagccactaccgtgtaacgatcaccccggccaaacgtggcaagggggcaggcaaggtcggtaccgtgcaccttgcgcccgaggaacgcacaccgctggagcagcgggccgccatgacctgggccagacgcctgaagcgcgtcttcaacatcgacattaccgaatgcgaaaagtgccaggggccggtgaaggtgattgcctgcatcgaggaccctgtggtcatcgacaagatcctcaaccacctcaaggccaaggaagccaaacaagtttctccatccacccaattgccgccaccacgagctccacccttgctgcctgggtgggagcagggactggcggattga

SEQ ID NO: 376236 - DNA, 270 bp, Salmonella enterica; identical to SEQ ID NO: 38997

SEQ ID NO: 376237 - DNA, 909 bp, Salmonella enterica; identical to SEQ ID NO: 38998

SEQ ID NO: 376238 - DNA, 840 bp, Salmonella enterica; identical to SEQ ID NO: 38999

SEQ ID NO: 376239 - DNA, 600 bp, Salmonella enterica
gtggctaaatttacagagttagaaaaagaaaaaattcgtgaagaattgcttaaagttgcatatcgattttttgtagataaaggctttaagaatacttctctcgaggatattacttcatcagttggcattgcaaagagttctttttatatattttttgaatcaaaagaaatactatatatggaattgttagcacatgagggagagcaaattgaaaagcaggtttggccaaaggttatagctgcaaaggatatacgttcagctataaagatatacttaaatgagatggctttggaactagaggataagattttaacacaaaggctggtttacgaccttgaggaatacaagattgtatctagaaagctaaatccagattatgttggctcagagcatctaagaagcatcgttcctcttgtggagtttataaagttacgtcaagactctaatgaaattatcgatgaagagccaggcattatagctggagttttaagagcagcttggttaataggttctcaaaagggagatttgcagcaatacaattatgaaagaattaaagagttattattcgaagctgttgctgatcgagtcactcgattttaa

SEQ ID NO: 376240 - DNA, 657 bp, Salmonella enterica; identical to SEQ ID NO: 39001

SEQ ID NO: 376241 - DNA, 252 bp, Salmonella enterica; identical to SEQ ID NO: 39002

SEQ ID NO: 376242 - DNA, 279 bp, Salmonella enterica
gtgggtgacagcaaaaaggcactggcagagctggaacagaaggagtttccccaggtgggtcaggtcacctgtagtatcggttttgcggctgtggaccctgcccagccaccggccaatatcctcgacaacgccgaccaggccctgtattacgccaagggcaatggtcgcaaccggacctgccactacgaaagtctggtggaaaccgggcagatagctaggcgagacaatatggaaggcaacgccagcgtcgattttgatattgatgcactgtttgggtaa

SEQ ID NO: 376243 - DNA, 729 bp, Salmonella enterica
atgtctcttaccgcccaagcgcctcggccggccacccatgtccgccaccggcccgagcagaccctgctgtaccaactggttgagcgtcattaccccgagtttgcccggctcatggccgcccaaggctcacccctgccaggctatgtcgcccgcgagttcgaggactacctcaagtgcggccgcctggaacacggctttctgcgcgtacgctgccaatcctgccaccacgagaagctggtggccttctcctgtaaacgccgagggttctgtcccagctgtggcgtccggcgcatggtcgacagcgccgcgctgctggtgatcgacgagctgcacaacgtgctggccggcaacagcgtcaaccgccgggaattcctcaacctgctgcgcttcctcggcaacgaactgcgcatcccgttggttggggtaggcacgcgcgacgcctacctagccatccgctccgatgaccagttggaaaatcgcttcgagccgatgatgctgccggtatgggaggccaacgacgattgctgctcactgctggccagcttcgccgcttcgctcccgctgcgccggccttccccaattgccacgctggacatggctcgctacctgctcacacgcagcgagggcaccataggggaactggcgcacttgctgatggcggcggccatcgtcgccgtggagagcggcgaggaagcgatcaaccatcgcacactcagcatggcctgttga

SEQ ID NO: 376244 - DNA, 1515 bp, Salmonella enterica; identical to SEQ ID NO: 52478

SEQ ID NO: 376245 - DNA, 786 bp, Salmonella enterica; identical to SEQ ID NO: 16905

SEQ ID NO: 376246 - DNA, 501 bp, Salmonella enterica; identical to SEQ ID NO: 83644

SEQ ID NO: 376247 - DNA, 840 bp, Salmonella enterica
atggtgacggtgttcggcattctgaatctcaccgaggactccttcttcgatgagagccggcggctagaccccgccggcgctgtcaccgcggcgatcgaaatgctgcgagtcggatcagacgtcgtggatgtcggaccggccgccagccatccggacgcgaggcctgtatcgccggccgatgagatcagacgtattgcgccgctcttagacgccctgtccgatcagatgcaccgtgtttcaatcgacagcttccaaccggaaacccagcgctatgcgctcaagcgcggcgtgggctacctgaacgatatccaaggatttcctgaccctgcgctctatcccgatattgctgaggcggactgcaggctggtggttatgcactcagcgcagcgggatggcatcgccacccgcaccggtcaccttcgacccgaagacgcgctcgacgagattgtgcggttcttcgaggcgcgggtttccgccttgcgacggagcggggtcgctgccgaccggctcatcctcgatccggggatgggatttttcttgagccccgcaccggaaacatcgctgcacgtgctgtcgaaccttcaaaagctgaagtcggcgttggggcttccgctattggtctcggtgtcgcggaaatccttcttgggcgccaccgttggcctccctgtaaaggatctgggtccagcgagccttgcggcggaacttcacgcgatcggcaatggcgctgactacgtccgcacccacgcgcctggagatctgcgaagcgcaatcaccttctcggaaaccctcgcgaaatttcgcagtcgcgacgccagagaccgagggttagatcatgcctag

SEQ ID NO: 376248 - DNA, 348 bp, Salmonella enterica; identical to SEQ ID NO: 6026

SEQ ID NO: 376249 - DNA, 942 bp, Salmonella enterica
atgagttgcatcatgaagactggccgaggattatccaggcgattaaggggcaaacgtcatagctatcggttgcaccgtacaacaagttactgcaccgtaaaaattactcgctgcgctcgcaattttccggtgagcaaggcgttaaacatcatgagggaagcggtgatcgccgaagtatcgactcaactatcagaggtagttggcgtcatcgagcgccatctcgaaccgacgttgctggccgtacatttgtacggctccgcagtggatggcggcctgaagccacacagtgatattgatttgctggttacggtgaccgtaaggcttgatgaaacaacgcggcgagctttgatcaacgaccttttggaaacttcggcttcccctggagagagcgagattctccgcgctgtagaagtcaccattgttgtgcacgacgacatcattccgtggcgttatccagctaagcgcgaactgcaatttggagaatggcagcgcaatgacattcttgcaggtatcttcgagccagccacgatcgacattgatctggctatcttgctgacaaaagcaagagaacatagcgttgccttggtaggtccagcggcggaggaactctttgatccggttcctgaacaggatctatttgaggcgctaaatgaaaccttaacgctatggaactcgccgcccgactgggctggcgatgagcgaaatgtagtgcttacgttgtcccgcatttggtacagcgcagtaaccggcaaaatcgcgccgaaggatgtcgctgccgactgggcaatggagcgcctgccggcccagtatcagcccgtcatacttgaagctagacaggcttatcttggacaagaagaagatcgcttggcctcccgcgcagatcagttggaagaatttgttcactacgtgaaaggcgagatcaccaaggtagtcggcaaataa

SEQ ID NO: 376250 - DNA, 1014 bp, Salmonella enterica; identical to SEQ ID NO: 29928

SEQ ID NO: 376251 - DNA, 501 bp, Salmonella enterica; identical to SEQ ID NO: 80748

SEQ ID NO: 376252 - DNA, 561 bp, Salmonella enterica; identical to SEQ ID NO: 5006

SEQ ID NO: 376253 - DNA, 2967 bp, Salmonella enterica; identical to SEQ ID NO: 5007

SEQ ID NO: 376254 - DNA, 243 bp, Salmonella enterica; identical to SEQ ID NO: 15164

SEQ ID NO: 376255 - DNA, 678 bp, Salmonella enterica; identical to SEQ ID NO: 120701

SEQ ID NO: 376256 - DNA, 1200 bp, Salmonella enterica; identical to SEQ ID NO: 120700

SEQ ID NO: 376257 - DNA, 885 bp, Salmonella enterica; identical to SEQ ID NO: 54013

SEQ ID NO: 376258 - DNA, 1797 bp, Salmonella enterica; identical to SEQ ID NO: 120698

SEQ ID NO: 376259 - DNA, 1218 bp, Salmonella enterica; identical to SEQ ID NO: 233747

SEQ ID NO: 376260 - DNA, 246 bp, Salmonella enterica; identical to SEQ ID NO: 23313

SEQ ID NO: 376261 - DNA, 150 bp, Salmonella enterica; identical to SEQ ID NO: 23314

SEQ ID NO: 376262 - DNA, 471 bp, Salmonella enterica; identical to SEQ ID NO: 23315

SEQ ID NO: 376263 - DNA, 258 bp, Salmonella enterica
atgcagggcgaaaagcagcagccatatttttttaaccctggtatgactgttgaacagcttgaagactggctggagcagcaaaagcttcatctaagccgctataaccgtctggtaaaagaaaaagcagagcttgaagaacggctcagtgatatttctgtggaaattgaacggatgtctgctggtggttttaacggaaagttgagtttccccagggagtcaagtccgcctctgagaaataatcaacagggtagtgtttga

SEQ ID NO: 376264 - DNA, 387 bp, Salmonella enterica
atgtccgatccgatttccggtactgggctggctggtggtgccctgacgggtgccagtgtttatggactgctgaccggaactgattacggcgttgtatttggcgcatttgcaggggctgtattctacatagcaacagcagcagatctgagtgcatcgcgccgactggcatattttatcgtgtcatatattgccgggatcctttgctctgggttggttggctccaagctggcgaacttgaccggatacagtgataaacctctggatgctattggtgccgtaatcgtctctgctttagccgttaagatcctgacgttcctgaataatcaggatatcggctcgctggtggcgctcataacgcgccggggaggttcaggtggagctaaatga

SEQ ID NO: 376265 - DNA, 615 bp, Salmonella enterica
atgaaccaacaattatttcaaaaggcggctggtattagcgccgggcaggctgcgcgctggtttccgcacattgatgcggcgatgaaggaattcggcattacagcaccagcggatcaggcgatgtttatcgctcaggtaggccatgagtcgatggggtttagcgccgtagttgaaaattttaactacacgccatctgcgctggtggcgacgttcggaaagaggatcacacagcagcaggctgatgcccttggcagaacatccggacatgcagctcgtcaggatgctattgccaatctggtgtatagcaaccggctgggtaacaaagcacccggtgatggctggaaatatcgtggtagaggattaattcaaatcactggcctccataattatcgcatctgtggcgcggcgctgaagttagatctggtgacttcacctgaacaactggaacaggaactacaggctgcgcgctcagctgcatggttctacacctctaaaggttgcatgatctacggtgccgatattaaccgtgttacgcgcatcattaacggcggtttgaacggtattgaggatcgtaaggtccgatacaacaaggcgcgggcggcgctgctggtatga

SEQ ID NO: 376266 - DNA, 345 bp, Salmonella enterica
atgcaaaacagcagatcgcactggagtcacagagaacccaggaagatatcaaagtggctgttgcggatgatgattgtgcttcacgtcctgtgcctgatgtcgctgctgaccggttgcggaagtacgcggacagtatacgtgcaggttccaacgatgccgttaccggcgaacctgctcgctgaaactccacagccagttatacccaatcctctgacttatggggatagtcttagtttgaatgtaagtctgctatcagcactggggctatgtaaccgtgataagtctgatcttcgtaggctaggagagcaaaagtacaatctacatttgaataataatattcattag

SEQ ID NO: 376267 - DNA, 555 bp, Salmonella enterica
atgaacgaaaattatattgcatatgagacacttgtagcaaaccgtgctgctgctgagtgggcttgttgggcaatgattgcatcttgggtgagtgctggagctactattgttactttgtttttggcgttcaaggcattatttacgtggcgggaacaagagaaaacaaaagtaaaaatagattttaggaatgcattaaagaaattaaagacagctctattatttatgcctgtcaatattgaccccgagcaactcaatgatgaacgagagcaagttattgctaaatggctatttaaagatgtagatcttattagccagcaaattgagttgggagaagagaatgttaaaagatttgatgagcttttgagtatttttgattgttgccaatcttcatggtttgcgacagagcacttatttgataatactgagttagaaaaagtttggcatgagttcgagtctaactttaataaatatataaatggtggtgagagtaaggatttacttatgaaaatgcttgataagctcatctcttctagatttgtatttgagtcaaggtaa

SEQ ID NO: 376268 - DNA, 351 bp, Salmonella enterica
atgccccctagaatcccaaaagcctgccgcgttcgtggttgccgccaaactaccactgatccgtcaggctattgtgaaagtcacaaaagcgaaggctggaagcaatacaagccaggacaatcccgtcatcagcgcggctacggttcgaagtgggacagtatccgcgcgcgtgtcctgaagcgtgacaaaggcctgtgtcagttatgtctgcgtgccggtgtggtgcgtgaggcgaaaaccgttgaccacattattcctaaagcgcatggcggcactgatgctgactgcaatctgcagagtctgtgctggccgtgtcataaggcgaagacggcccgtgaacggctgaagtaa

SEQ ID NO: 376269 - DNA, 495 bp, Salmonella enterica
atggctggaacggcggggcgttccgggcgtcgccccaagcctacggcgcgcaaggagctggccgggaaccccggaaagcgagccctgaataaagaagaaccagtattcacaccaataaatggggtttctcctccggactggtttaacgaagaagatatgcctctggcatcagttatgtgggaactgaccaccaaagaattgtgtggtcagggactgctgtgtgttacggatttggctgtactggagcgctggtgtgtcgcctacgagttctggcggagagcagtaaaaaatatcgcaaaagaaggtaacaccataactggcgctatgggggggaaaataaagaaccctgaacttactgccaagaaagaacaggaatcggagatgagttctactggttctatgctgggccttgaccccagtagtcgacagcgccttattggtctggccggacagaagaaaacatctaacccattcctgaagatgatcaactcatga

SEQ ID NO: 376270 - DNA, 1734 bp, Salmonella enterica
atgagccggaaatcatatcccaacgttaacgccgctaatcagtatgcccgcaacgttgtgcggggaaaaatcacggcatgtcagtatgtcattcaggcctgccagcgtcacattgatgatatggcggcggagaagagtaaaaggtttcggtaccgctttgataaagacatggctgagaaagctgcaaagtttattcagttacttccacatacaaaaggtgaatgggcgttcaaacgtatgccgattaccctggaaccgtggcaacttttcatcgtgtgctgtgcctttggctgggtacagaagggaacaaagcttcgtcgttttcgtgaggtctacacagagataccacgtaagaacgggaaatcggctatttcagctggtgtagctctctactgtttcacctgtgataacgaattcggtgcggaagtatactccggcgccacgactgaaaaacaggcgtgggaggtatttcgtcccgcgcgtctgatgtgtaagcgcacaccactactggtggaggcattcggtatagaggtgaatgcctcaaacctgaaccgtccggaggatggtgcccgcttcgagccgttgatcggcaaccccggggacggggcatcaccgcactgcgcaatagttgacgaataccacgaacaccctacggatgcgctctacacaacaatgcttacaggtatgggcgcgcgccgacagccgctgatgtgggcaataaccacggcgggctacaacatcgaggggccgtgttacgacaagcgacgcgaagtgattgagatgctgaacggatcggtgccgaacaacgaactttttggcgtgatttacacggttgatgaaggggatgactggacagatccaaaagtgctggagaaagcaaacccgaacattggggtgtcagtataccgtgacttccttctcagtcagcaacagcgtgctattaacaatgcccgccatgcgggtgtgttcaaaacgaagcatctcaatgtatgggttgccgcccgcacagcattctttaatctggtttcctggcaaaactgtgaggataagacgctgacgctggaactgtttgagggtcaaccctgcgtactggcgttcgatctggctcgtaagctggacatgaacagcatggcgaggttatttacccgtgaaatagacgggaaaacgcatttttacagcgtggcgccacgtttctgggtgccgtatgacacggtctacagtgttgagaaaaatgaggatcgccgtactgcggaacgttttcagaaatgggttgcaatgggctttttgacagtaactgatggtgcggaggtggattaccgctacatccttgaagaggccaaagctgcgaacaaactgaacccggtcagcgaatcccccattgatccatttggtgccaccgggctttcacatgatctagctgatgaaaacctgaatcccgtcactatcatccagaattacgccaacatgtccgatccgatgaaagaactggaagcggcgattgagtcggggcgctttcatcatgacggcaatcccatcatgacctggtgtatcggcaacgtggtcggcaaaaccattccgggtaacgatgacgtggtgaagcctattaaggagcaggcggaaaataaaatcgatggtgcagttgcactgattatggcggttggcagagccatgctgtacgagaaagaagacacgctgtctgaccacattgagtcctacgggatccgctcgctttaa

SEQ ID NO: 376271 - DNA, 183 bp, Salmonella enterica
atgatcatgctgattctcgcgcctctggtgggcgtgctgggtgcgcttttgctggcgtatggtgcctggctgatttatcccccggcgggttttgttgttgccggggcgctgtgcatgttctggtcgtggctggtggcgcgatatctcgaccgtacacagcagtctgtcggcggaggtaaatag

SEQ ID NO: 376272 - DNA, 1242 bp, Salmonella enterica
gtgttcttttcgggattatttcaacgaaaaagtgacgcgccggtgaccacgccagcagagctggcggatgctatcgggctgtcatacgacacctataccggaaagcagatcagcagtcagcgggccatgcgactgacggcggttttttcctgcgtcagagtgctggcagagtcggtcgggatgttgccctgcaacctgtatcacctgaacggcagcctgaaacagagagccactggcgaacgtctgcataagctgatctccacgcatcccaatggctatatgacgccgcaggagttctgggagctggtggtcacctgtctgtgcctgcggggcaacttttatgcctacaaagtgaaagcatttggcgaagtggctgaactgctgcccgtcgatcccggttgtgtggtgccgaagcttaacagtagctgggagccggtctatcaggtcacatttccggatggctccacggatgtactgagccaggaggatatctggcatgtgcgcacgctgacgctggacggactggtggggctgaatcccatcgcctatgcccgcgaggcaatatcgctggcggcagcgaccgaagagcacggggccagactgttcagcaatggcgcggtgacgtcgggtgtgttgcgtacagagcagacgctgtcggatcaggcttatgagcgcctgaagaaagattttgaggagcgtcacaccgggcttggtaatgctcaccgcccgatgatccttgagatggggctggactggaagtcgatggcgctgaacgccgaggacagccagttcctggaaacccgcaagtttcagcttgaagaaatctgtcgtctgttccgggtgccattgcacatggtgcagaacaccgatcgcgccaccttcaacaatattgaagagctggggctgggatttatcaactattcactggtgccgtatctgacccgcatcgaacagcggatcaacaccggactggtacgaaaaagtaagcagggcgtttattacgccaaatttaacgcgggggcgttactgcgtggggatatgaagtcccgttttgaagcctatgccaccgggatcaactgggggatttactctcccaatgactgccgcgacctggaagatatgaatccgcgtcccggtggtgatgtctatctcacaccgatgaacatgaccacgaaaccctccgatggcagtaaagctggtaagcagaaggataacgccaatgcagacgaaacaacgtcttga

SEQ ID NO: 376273 - DNA, 651 bp, Salmonella enterica
atgcagacgaaacaacgtcttgatgtaccgctgagtcttaaatctgtcagtgactccggtgagtttgaagggtatggctccgtctttggtgtaaaggacagccacgatgatgtggtggtgtccggggcgtttgccgcttccctgcgggcgtggagtgacagaaaagcgttgcctgcgctgctctggcagcaccgcatggatgagccagtcggtgtttataccgaaatgaaggaagacgatgtcggtctgttcgtcagggggcggttactcatcgatgacgatcccctggcaaaacgcgcacacgcacatatgaaggccggttcgttaaccggcctttctattgggtatgtactgaaagactgggaatacgaccggagcaaagaagtctttctgctgaaagagatcgacctctgggaagtcagtctggtgacattcccgtccaacgacgaggcgcgtatcagcgacgtcaagaacgcactggcccgcgggaaaattcccgaacagaaaaagattgaaagagtcctgcgtgatgtcggtctctcccgtacccaggccaaagcattcatggccgggggctatggcgcactgtccctgcgcgacgctgaggatgtgggctctgcactgaatgcactgaagaatctgaacttttaa

SEQ ID NO: 376274 - DNA, 1206 bp, Salmonella enterica
atggctgttgatatcaaagatgtggaacaggtcgcgcaggatctgcagcagaagtttgacgactttaaagcgaagaatgacaagcgcgttgatgcgattgagcaggaaaaaggcaagctggccgggcaggtggaaaccctgaacggaaaactcagcgaactggagagcctgaaaagcgatctcgaaaaagagttgcttgagctgaagcgtccggcgggtggagcgcaaaacaaggtggctacagaacataaagacgctttcgtcggctttctgcgtaaaggccgcgaagacggtctgcgcgatctggaacgtaaggcgttgcaggtgggcactgatgaagatggtggttatgccgtgccggaagagctggatcgtagcattctcagcctgctgaaagatgaggtggtgatgcgccaggaggccacggtgatcaccgtgggcggttcagactataaaaaactggtgaatctgggtggtacggcttccggatgggtgggcgaaactgacacgcgtccccagaccgctacttccaggctgggactgattgagcctttcatgggggaaatctacggcaacccgcaggccacccagaaaatgctggatgatgccttcttcaacgtggaggcatggatcaacagtgaactggcgaccgaatttgccgaacaggaggaaattgcctttaccactggtgacggcaccaagaagccgaaagggttcctggcctatgaatccaccgatgagtccgataaggcacgtgcgttcggtaaacttcagcatattgtatccggcgaagcgacgacggtgaccgcagacgccattatcaaactgatttacacgctgcgtaaggcacaccgcactggcgcgaagttcatgatgaacaacaacagcctgtttaccatccgtctgctgaaagacaccgagggtaactatctgtggcgtccggggctggaactggggcaaccgtcctctctggcgggttacggtatcgctgaaaacgagcagatgccggatatcgctgcagatgcgaaagccattgcatttggtaacttcaagcggggttacaccatcgtagaccgtatcggcacccgcattctgcgtgatccgtacaccaataaaccgtttgtcggtttttataccaccaagcgcaccggtggcatgctggtcgactcgcaggccatcaaactgctgaagattgctgcggcgtaa

SEQ ID NO: 376275 - DNA, 201 bp, Salmonella enterica
atgatcctgaaacaagatctgaaatggtcaccggacggtatgcgcgttgaggtcattcgggccggtgagtatgacgacggggcgcttcctgcccgggtgcaggagattgcacttcaggccgggttagcagatcgcggaaccagtgcaaaaagcagtaaagcgacaaaagagaaaaaagccacgaccagtaaagagggctga

SEQ ID NO: 376276 - DNA, 324 bp, Salmonella enterica
atgcttctgacaatggaagagattaaagcccaactccggctggatgaggatttcgatactgatgaccgccatctgcaactgctggcctgtgcggcgcaaaagcggacggaaacgtatctgaaccggaagctctatgcgccggatgaaaccattccggacagcgatcctgacggactgctcctgcaggatgatatccgtctggggatgttgatgcttatcagtcatttctacgaaaaccgatcttccgttacggaagtggaaaaactcgacatgccacagagctttggctggcttgtcggtccatacaggtactttccacaatga

SEQ ID NO: 376277 - DNA, 405 bp, Salmonella enterica
atgaaaattcgtcaggcgcagaccagcgcaacttacatattgcctgaccccggcgagctggataaacggatagcgattcgcctgcgtgtggatgagccgaatgatgattttggcgtgtccccctcgtatacggaggagatctgcacctgggcgaagatggcccagcccggagcggcggcctatcagggctccgtacagacggaaaaaatcgtgacgcactatttcacgatccgctggcgccggaatattaccgccgatcatgaagtgttctgcgacgggcaggtttaccgcatccggcgcatacgcgacctgaacagcaaacgtcgtttcctgttgctcgaatgcgaggaactgggcactgaacgggcagagggctatgcagaacaaagcgtttttacacgttga

SEQ ID NO: 376278 - DNA, 450 bp, Salmonella enterica
atgaataaaatattggttgctgcttgtgtgatggttttgtctttccctgtattcgcaaaaaaaacacctacaactgatttcgtcaatgaaattgaagcagcaataaactcaacaggagaggtctctacatctctggatattacttgtcctgctcaatcagcaagcgggcgtgttttggttactcatgccgattatacttatgggatgagcaagggggtgtttgtattcaaaaacacagacgatactcctgcagaaatgaaaagtattattccaatccatccaaacaacgacatcatgtcagatatcataagtggttgggattttggttttataattcgcggtggacaatttttcgtgaaagttatgaaaaatggtgaagtgaaagcaggaataaataaaaacggcacgtccggtgttacggaagtcaaatgtaaagtgacaaaaccgtaa

SEQ ID NO: 376279 - DNA, 234 bp, Salmonella enterica
atgaaatcaaaagataccctaaagtggttcccctctcaacttcctaaagttcgtattatcctgggtgatgcagtagtggaggtggcgaaacagggcaggcctatcaataccaggacattgcttgattatatcgaagggaatataaaggccaaggcatggctggataataaagaattattacaaacagcagtatcagttcttaaagaaaaccaggatgcgaatgggaagatataa

SEQ ID NO: 376280 - DNA, 414 bp, Salmonella enterica
atgaaaagcagcataacattgtcatctttacttgtactcacagttataataacaggatgctcgtcaggtaagagtaaagatgattatagccaggtggatggaatatacttctggggccaagatataagcgcatttcaaccatgccacacacgccagatatactggcttaacggagaaaaaaccacactgagaagcttaaaaaagcatcacagtacaaataaaaatgtctatgcatccctgatcgtgcataacgatggataccaggacaaagggtcttcaggcacttatgatgaaactcttatgcttgagaaaattattagtacagacaacagtaaaaaccacgctgattgtctgaactttataattcccagtaaaaaacacaaagttacatccaaaaatgaactttccagataa

SEQ ID NO: 376281 - DNA, 213 bp, Salmonella enterica
atgaacactttagacatatcatcatacccacctaacttactttcagatatagagattatttatggtaaagcgttactgcagctcatcctggagtctaaaaaaatcaacagcgagaatcttatctctcagttaaaacatgaacaaaaagagcagcaatggctcgaagataaagaaccattatctactgcgctgaaaatactggataaatcatga

SEQ ID NO: 376282 - DNA, 138 bp, Salmonella enterica
atgccctggcgcgatcatgttaaccctgacggggaagtggtctcgtgctgcgataatgttattatcactggataccaccgcctgtttgtccatccgctgtggatgttcattatggtgttcgatgtgcattccagatag

SEQ ID NO: 376283 - DNA, 1851 bp, Salmonella enterica
atgcaatcaactttagcaactgagaaattttttatatcagcgtacgagattggtattattgataatttcccagagataagagttcaggcggaagtaagtgccagagagaatagggtcaggcgttttggcggcgagccggaaatacttatatctgaaatatacgatgaaattttaaaaaagcatccgcagctttcaccagcgacagtaaaaaagataatcgatctggaaatacaaatggagaagattgttttatataaaaatgcgcgtggaagctgtttgtttgaaaaggctattagtgatggttgcaaagtcattttaattagtgacatgtaccttccatcagcaatattaaaggagttgttaacatcatgtggctatgatatcagtaacattccagtttattcatctggcgaagagcggtactctaaaaatagtggtaaattattttcaatagtcaagaaaaatgaaaatgtagatattgcatcgtggatgcatgttggcgacaatgttcatgctgatattctgaatgctaaaaaactcggcataaatactctccatgctgattggtcagagtataatcatgggatatctaatcattggaaagctaaagatattattggtgaatctatttgtaagactttattacttaaacaagtttctgctttccatcaaaatgatcctttaaacgagataggatttaaagtatttggtccattattattaggttatgtatcctggttagcgaatcagttaaagattcataaaattgataaagcgctttttttagcacgcgatgctcacttaatctataaaatttataatgaatacttttcagaagaacatgtaaaatgtgaatatttatatatatcccgcgcatcagcttatatggtggggatgactgattggccgatgcacaggatttggcatctttttggtggtaagaataagaaaagtattaaaaagatacttgctatcgcggggttagatgcgagtgagcatatttcagatatacatcatgttggttttcctgacgaggagtatattcctgtttcaggagaggaacataaggttcactggcttataaataaattatttccatatattttattaaaaaatactcagcacagggaagtttacgctgattactttaaaacggcctgtgaaggttataaaaatatagcacttatcgatgtaggatggatgggtaatattcaatcagtatttgctcgttctttaggtgcgcaatgggcagaaaaacaaatacatgggttttatttggcaacttttgctggcgccaatgataaccgatctatttataataagatgtttggttggctaaccaactatggccatcccaacgataagtgtgatcttttcttatcaggaggggtggaaataatggagttcgctatggctgacaatactgggtcaacaattggctataaaaaaacggataatggaataattcctgtacgtgaagatagcagtggttctgaaattgagtatttaaaaaaagcagcaagattgcaatcagggattatttctttttttgagtacgtcaaaccgctcatacaaaaaggaaattatgcagcacttagtagtgttgtattgtcagaacctttttttgaattgatagccagaccctcaagcgctcaactggacgccttatcttccctcacacattcagagtccgcgggatctaacgcagaaagaatcgtgctagccaagaaactgcctttaaaggataaactttttcccggagaaaattatatcaaagagttgaatgccagttattggaaagaaggctttaaaaggatcaacagaaaaaaattttgggcaaaatataactaa

SEQ ID NO: 376284 - DNA, 696 bp, Salmonella enterica
atgctgatgacgaggcggctgttgcgctggccgctgctgtacttgctgacgttgctgcatttgtctcagatatttttgctgcggctgccgatgcggctgccgccttttccgacgctgccgccgcagtggctgacgcacctgcatcaccggcactggaagccgcctgcgtttctgacgtcttcgcggcggtttcggatgctccggcgcgcgctgctgatgtctgcgccgccgtcgcgctggcggctgcggcagcagctgaatcgccggcggcagtacgggagacatctgcattcgcttcagatgttttcgctgcggctgccgatgcggctgccgccgttctggctgtgtcagccgacgccgcgctggctgatgcctccccggcttttgtggtcgccgtacctgcgctgctctccgcagatgctgcggatgaggctgcctgtgtggctgatgcttctgccgctccggctgcattcactgctgccgtggcgctttccgctgcctgacctgctgatgtctgcgcctgttcagatgcctgccctgcggcggtggcattccgcgatgcctccgatgcctggcgggcaacttcttccaccatcgcctcaaaacgtcgcagcgcctccgggcggacgtcgtcttccgtcatggcccccagaaaatcattcagggtgcccggttttgaatcatcgtagaccgtaa

SEQ ID NO: 376285 - DNA, 3363 bp, Salmonella enterica
atgggaaagggcggcggaaaagggcatacgccccgcgaggcaccggataaccttaaatccacgcagctgctgagcgtcatcgatgccatcagcgagggaccgatagaaggcccggtgaacggtctgcaaagtgttctggtaaaccagacgccggtggtggaccgcgacggtaacacgaatatccacggcgtgaaggtggtataccgcgtcggtgagcaggaacagaccccgctggagggatttgaatcgtccggcgccgagacggtgcttggtgtacaggtcaaatacgacaatccggtgaccagaaccatcacggctgcaaatattgaccgcctgcgttttacgttcggcgtgcagtcactggtggaggccaacagcaagggcgaccgcaatccgacatcggtcaggctgcaaatccatcttgagcgctatggtcagtgggtggtggaaaaagagattacgattaccgggaaaacaaccacacagtatctggcctcggtgatagtggataatctccctccccggccatttggtatccggatggtacgtgtgacggcagacagtaccactgaccagttacagaacaacacggtctggtcgtcgtataccgagattattgatgtccggcagcgctatcccaacaccgccgtaattggcctgcaggtggagtctgagcagttcggcagccagcaggtgacgcgaaattaccattttttcgggcggattattcatgtgccgtcgaattacgatccggtagcgcgaacctacagcggcatctgggacggcacgttcaagcctgcatacagcaataatccggcgtggtgtctctgggatgtgctgacacatccccgttatggcatgggacagcgaatcggcgcggcggacgtggacaggtgggcgctgtatgcaataggccagtactgcgaccagatggtccctgacggattcggcgggacagagccgcgtatgacctttaatgcgtatctggcacagcagcgtaaggcgtgggatgtgctgaccgacttctgctccgccatgcgttgtatgccggtgtggaacgggcagatgatgaccttcgtgcaggacaggccctcggatacagtctggacctatacccgcagcaatgtggtaatgccggatgagggcacaccgttccgttacagcttcagtgcgcggaaggaccgccataatgcggtagaggtgaactggatcgaccctgataatggctggcagacatccacggaactggtggaagacacggtcgccatcagtcactacggacgcaatctggtaaaaatggatgcgtttggctgtaccagtcgcgggcaggcgcaccgcgccgggctgtggctgataaaaacggagctgctggaaacccagacggttgattttagtgtgggtgcggaggggctgcgccacgttcccggtgatgtgattgaggtttgcgacgaggattatgccggcatcagcctgggcgggcggattctgtccgttgaccgcgcccgccgcattctgacccttgacagggagattaccctgccgtcgtccggcaccacgctgataagcctgatggatggcgaaggcttgccggtcagcgtggacgtgcagtctgttaccgacggtgtgcaggttcaggtcagccggataccggacggcgtggcggaatacagcgtctgggggctgaaactgccgtcgctgcgccagcgtctcttccggtgtgtggctgtccgggaaaacgacgacggaacgtatgccatcaccgccgtacagcatgtgccggaaaaagagtccatcgtggacaacggggcatcattcgatccgcaacccggaacgattcacggcaccgttcccccggcgatacagcatctgaccacagaaattctggcggaggagggacagtatcaggtactggcgcgctgggacacaccgcgagtcgttaagggcgcctcgttttctttgcgcctgaacgtggcggcggaagatggcagtgaccggctggtaagcagcgcaggaacgccggatacgcagtaccggttccgggggctgacgccggggcgctacaccctgtccgtcagggcggtgaacagccagggacaacagggagacccggccagcacacagttcagcatctccgcgccggcggcaccatcatttatcgaactcacccctggctatttccagattacagccacaccgcgtcaggcggtatacgacccgacggtgcagtatgagttctggttttcagacgcgcagattacggatatccatcaggtggaaaacgccgcacgatatctgggaacggcgctgtactggatagcggccagtgtgaatatcaggcccggcagggattactatttttatatccgggcggtaaatcaggtcggtaaatccgcattcgtggaggcgaccgggcaggccagcaacgatgccgcaggctatctggattttttcaaagggcagataactgaaagtcacctgggtaaggaactgctggagaaggtggaactgacggaggataacgccagcaaactgcagcagttttcgaaggagtggcaggatgctaacgataaatggaacgccatgtggggcgtcaaaatagagcagaccaaagacggcaaatattatgtggccggacttggactgagcatggaagacatgcctgacgggaagataagccagttcctggtggcggcggatcgcattgcttatattaacccggcaaacggaaacgagacgcccggattcgtcatgcagggcgaccagataatcatgaatgaggcgttcctgaaatatctgagcgcgccgaccattaccagtggcgggaatcctccggcattttccctgacgccggatggaaagctgactgcgaaaaatgcggatatcagcgggcatatcaacgctgtatctggctcgtttacgggagaaatcaatgccacctccggtaagttttctggcgtgatagaagcaagagagtttgtcggtgatatctgcggctcaaaagtcatgcagggcgtgagcatcagggagacgaacgacgaacgcagcacctcaacacggtataccgacagcgccacctatcagatagggaaaaccatcacggtgatggctaactgtgagcgtaacggtggctccggtgccatcaccgtcacgataaatattaacggccaggtgaaaacggcggaggttatgccgtataccgcagggattccggccatgtatcagaccgttgtcttttcggtctacaccacttcacctgtcgtggatatcagcgtttctctgagggttcgtgggcagtacaccacgtctgcttccgtctggccgctggtgatggtttcccggtcggggaacaacttcacaaactga

SEQ ID NO: 376286 - DNA, 453 bp, Salmonella enterica
atgtttgttggcctgttgctcgtctcgctaattgttgccggtcggctggcaaatcactaccgcaataacgctatcacttacaagtaccagcgtgatactgctactcacaacctgaagctggcgaacgagacaattaccgatatgacgaagcgccagcgtgacgttgccgccctcgatgcaaaatacacaaaggaactagctgatgcacaaaacaggaatactgatttgcagcgccgccttgctgctggtagccgggtgcgtgtcgaaggacgctgtacagtgccaaccacaaccacaaccaaaaccgccagtacccgccgcgtgggcaatgctgccaccgtcgaactctctccagttgctggacaaaacgttctcgatatccgcgccggaatcatcagcgatcaggaaaaactgaagtatttgcaggagtacatccggacgcagtgcaaataa

SEQ ID NO: 376287 - DNA, 3087 bp, Salmonella enterica
ttgagccagaaagtcggtgatatcgtcatcaacatggatgttgatacagctaaagttgccgccggtcttcagactgccagtaacgggctggggaagctggtggacagcagtgatctcgttgaaaaacgcatcaagcgatgtatggagtccagcgccagaagtgtggcggcatcggcaaaaagtatcagtgccgctatggcgcaatcacaggttgccacacgcacacagagtgacgctatggcacaactggcgcgtgaggcgaacgaggccagagaaagggctgtcgacctgaatcagaagttaagggcggaagctgcgcaggcagcggtggttgcacaggctcaggatgcagccgcagcggcattttaccgtcagattgacagtgtaaaacagttaagcggtggtctgcaggagttacagcgtatccaggcgcaggtacgacaggcgaaaggacgcggagatatttcacagggcgattatctggcgctggtgtctgaagctgctgcaaagacacgcgaacttaccgatgcggaggcgctggccacgcagaaaaaagcacagtttatacgtcgactgaaagagcagacggcggtacagggcctctcccgtactgagttgctgcgggtgaaggcggctgaactgggggttagcagtgccgccgatgtctatatccgcaaactggataccgcaacaaaatccactcatgcactaggactgaaatcagcaatggcgcgccgcgagataggcgtactgattggtgaactggcacggggaaattttggcgcccttcgcggttccggtatcacgctggccaaccgggccgggtggattgagcaactgatgtcgccgaagggcatgatgctcggcgggctggttggcggtgtggctgcggcggtttacggactgggtaaggcgtactatgagggggcgaaagaaagtgaggagttcaataaacagcttattctgaccggaagttacgccggaaaaaccacaggcaagcttaatgaaatggcgaagtcgctcgccggaaatggcgtcacgcagcacgacgcggcaggagtactgacccaggtggtcggtagcggagcgtttaccgggcaggcagtggcaatggtatcccgtaccgcggccagaatgcaggaaaacgtggggcagtcagtggatgaaaccatccgccagtttaaacggctgcaggatgatccggtgaacgcggcgaaagaactggacagggcactgcattttctgactgccacccagcttgaacaaatcagggtgctcggtgaacagggaagaacggctgatgctgcgaaaattgccatgtccgcgtattcggaagagatgaataaacgggcgggtgacgtacatgataatctgggctggatcgagaaggcatggaatgccgtgggtgatgcggcgaagtgggcgtgggatcggatgctggatatcgggcgggaagatacgctcgatgaaaaaatcgcgacactgcaggaaaaaatcgcgcgcgccagaaaaacgccatggacagtgtcttcctcccagactgaatatgatcagcagcaactgaacgaacttcaggaacagaaacgccagaaggacctgctggatgcgaaggcgcaggcagagcgtaattatcagaagactcagaagcgccggaacgagcagaacgccgcgctgaaccgggataatgaaactgaatccctgcggcatcaacgggaggtggcgcgcattaccgccatgcagtatgccgatgcagcggtacgcaatgccgcgctggagcgtgaaaacgaacgccataaaaaagcaatggcacggcagaaggaaaagccaaaggcttactacaacgacgaggccgggcgattgcttttgcagtacagccagcaacaggcgcagactgaagggctgattgccgccgcgaagctttccacgaccgaaaaaatgacggaagcgcataagcagcttttgtcatttcagcagcgcatcgctgatttgtccggtaaaaaactgacggcggatgaacaaagcgtactggcacataaggatgaaatagcgcttgcgctacagaagctggatatctcacaacaggatttgcaacaccagaatgcctttaatgaactgaagaaaaagacgctcacattaaccagccagctcgctgacgaagaatcccgcgtcaggcagcagcacgcactggcgctggccacaatgggtatgggcgatcagcaacgtggccggtacgaagagcatctgaaaattcaacagcactaccaggaacaactggagcagcttaagcgcgacagcaaggcaaaagggacatacggttctgacgaataccgtcaggcggagcaggaacttcaggccagtctcgatcgccgactggctgagtgggcggattataacgcgaaagtggatgctgcgcagggagactggacgcagggcgcgtcgcgggcgctggataactttctggcgcaggggggcaacgtggcaggcatgacggagaacgttttcacaaacgcatttaacggcatggcggacagtatcgcgaattttgccgtgaccggaaagggcagtttccggagcctgacggtctccatcctggctgacctggcaaaaatggaggcacgtattgcggcttctaaactgttgggttcagtactgggtatgttcgtctttggcgcatcagcaggcggaagtacaccatccggggcatacagttcagcggcgctgtcggtcattccaaatgcggacggcggcgtgtaccgctcagcaggactcagtcagtacagcggcagtattgttaacagaccgacgttctttgcatttgccagaggggcggcagtaatgggagaggccggtccggaggctatactgccgcttcgtcgcggtactgacggtaagctgggggttgtggcagcaggttccggagggatggcgatgtttgcaccgcagtatcatattgcaatcagcaacacggggccggaactgacgccgcaggcgctgaaggcggtttatgatctgggtaaaaaggcggcggctgatttcgtgcagcagcaggggcgtgacggcggcaggctgagcggggcatatcgatga

SEQ ID NO: 376288 - DNA, 618 bp, Salmonella enterica
atgcccctcccaccaaattttttatctcctgaagaccaggctgagtacgatgcttatatgtcaagattcagcgagataaatcactattatgattatcacactgtccccgtgattgactggttctttaaacaagcaaccgaggcgttgcatcacgaactatggataccggcctgtacgagcttcctgaacgggattgaaacatcactcatggttacgttgaagtcgctgatgctgaaaccaacagttaacgatcagcatgcagctcctgagctggtggacttggagggtatctccgtaatgagtaatgctttactgagaaaggccaagcaggaaggggtgccggtagaattactttcatttccagccgagcaggatatgttggttaaggtagcagccgggagaacacctgaagcagaaattgtcaggctgagaaacaacctatgccatggcaacattctggagtttatcatgtctgttgatatcggtacttcaggacccatacgtatttttacgcctgaatgctgtcgtgaactggcgcatgaactttcgtccatttccaggaattgggtggtaggtttgcacaagtactgggtcgacaacaatctgatttccccctga

SEQ ID NO: 376289 - DNA, 435 bp, Salmonella enterica
atgtctgttatccttgagcacattagcaacaaaccttacgaaatggcaccttttttcagtgatttactgagctgtggagtgatgagtccgtgcgccgggcatgaagataatgaattaaatttgcatgaatatgtagtccgtaaccgcccctcaaccttctttgtcagggcggcgggcctcagtatgatcaatgccggtatcaatgatggtgcaatactggttgtggatcggtctttaacggcacgacacggctctatcgtcgttgcgctggtggatggagagtttacggtaaagatcttacacacgtatcctgagctgcttttgatgccttctaatccagcctataagccgatacgtgtaaatcccgaatcccttgagatatggggcgtcgtcacctttgcactgaatcagtttagccatgtacatgcacgttga

SEQ ID NO: 376290 - DNA, 1260 bp, Salmonella enterica
atgtacatgcacgttgatattaacggggcctatgcggcatttgagtgtgcgatggatcccaagctgtcaaaaaagccgctcatcatagccagcaataacgattcgtccgtcattgcaatgaataaactggctaaaagcgttggtattaagcgtgggaccccaatttttaagtgcagggatttgattcagcaacaccggatcgaagtccggagctctaactttactttgtatgaagactactcaaatcgcttccatgaaacgctggaaagcttcgcgcctcaatcgagtcgatatagcatagatgaaaatttcatgttattgaaaaacatgaacaagataatagattatgaagattacggccggttgatcagaagtacacttcttcataatctgtcccttacctgtggtgtggggtgttcaagcaccaaaaccctggctaaattatgcacctatgcgagcaaacgatgggcagctacaggcggggttgtagttttgactgatcaggccaggatcaggaagctcctgggccttatcagtaccagagaaatatggggtattggtcaaaagatcagtgaacgcctgtcggctttcgggatcatcactgccggtgatttttataatagcgacgttcgctttttacgtaaaagctttggcgttgaaatcgagcgtacctggcgggaactgcatggcgaaccatgtttccggctgcatgaatcccctcctgtccggcaacagattatcgtttccagaagttttggtcagcgccttaatgagataggcaagctacatgaggcagtttcattttttaccgcccgggcggcagagcagctgcgcaaggatggctcgtggacccgtcaaatcacagtcttcattcagagcagcaattatgcgcaaggtgaaaaccgctacagcaattgtggtatcgagccgcttaccgctacacaggacacccgcgatctggttgatgcagccatgaccatcctgaaccgcatttacaaacccgggatagcgtatgcgaaagctggggtaatgctctccgctatgactgacggcacagagcaactcagcctgtttgatgagcgcccggccaggcctggcagtcaggcactgatgaaagttatggaccggttcaataaagaaaagcgcggagctctgtttttgctgggggaaggcattcaacaggattttcgtatgaaacaggccatgctatcaccgagatatacgacccgctgggatgaattactcgttgtaaaagcgtag

SEQ ID NO: 376291 - DNA, 810 bp, Salmonella enterica
atgtctaaagaattttatttaaaaccgatggccacgattttaatttctgcggtaattgctaccgctgcctcggcgttaatcgcggcaacttattttaaaccgaaggtgctcagtgaggaagaaattggcaaaattgccgctacttacctggtaaaaaatccccattatttagtggaagcaggtaaggcgctggaaaatcagaacgtaagtgcctcagtggaacgaataattccatatgcgccagctctgctggataccaaggagacgccaaacatcggcccggatgacgccgacgtcgcggtaatcgagttcttcgactatcagtgtatttactgcatgcgggttacacctgttgttgaatcggtaatgaatcagagcaaagatgtaaaattcttctttaaagaattcccgatttttgccggttcaaaacctgtatctgccatgggggccgctacgggtctgcacgtctatcagaatttcggtgctgaagcctatcgtaaataccacaacaacctgatggctgtggctcataccttcatgacctctcaacgcaaattcgaactcagcgactttaatactgtggtggataagtcagggtttaacagcacgttttctgacagggaaaaaaaccgatatgaaaacgtgatctccggcaacatgcagctgggcgaagcgcttgggatcaccggcacacccggcttcatcattatgaatatgaaaaagccgaatgcggcgactaccacatttatccccggggctatggacgcagcaactttgcagggcgcaatcgaaaaagctcgcggggcctaa

SEQ ID NO: 376292 - DNA, 612 bp, Salmonella enterica
atgattaggcagggctttatactcacaaccgcaatgcttttgagtggttgtggatatcatttcgcaaaccaggtagatgcgtacgatctaatgcctcgtcctgttacaaataaaaggtttcagatagtccctccggacgaaagtattcagtccagaatgttttcaggccgttttgctgatggattagcaaaaaaaggagtcattatttccactcaccagccagattatgtgctcaggttccgaatgagcagctcacaggagaacatgcagtatagcgagcagcttcttactggggtgacaggctacgttgtagataaaaagacaacgagaactgacaagcatggcgaatcgcatactgactatgactacaggccggtcgatggggtaataggcactgagacgatgtcgcagatgcactatatgcgacagctggatgtcgaggtatacccgtcagcgaaaggagcaaagcaggttctgaaagtgagtatgcaaagcaatgcacctgtgccgtcagacagcattgcttattcagcaatgatcgacgcctttactgataaatttgatgcgccgctgcgttccggaaattatgttgcagtgatcccctggaactga

SEQ ID NO: 376293 - DNA, 423 bp, Salmonella enterica
atgtcgatactcagtaacttcgtcatcagggcaacggggatacctgacaaaaagtatctccgggatcccgtaataaaacgttgttatgaacgtctgagtcgtagggtgcctgctctaatgacgggttggcttctgtgcattctgggttcagggtatgtcagtatggcactggaacagcctgatagcactgtgttactcagtctgctgctgttgtatgttatgtcaggcattttactgatgcagttccagtatatgtattcagagcgaagcataggctacaagttctacctggaagtgcttatgaatgcagccgccagtactcaacataaagaacagttacagtatctattcattaataagcccaattccatcacgatgggcgatctttaccgactttatgattttaatgggggagggcgatag

SEQ ID NO: 376294 - DNA, 393 bp, Salmonella enterica
atgaaatctactttactgagtacgttaatgctggttgctgtaggtgtacagcccgttttcgctgcacaatgtcagtacggagcctgtggaacggaaaacgatccaggaatcgtatttctgatgtcatcggtacaaatggatcaaggtgaacaactaaaggaactctctggtgttgcgaccacaggtgacaccatctctaaaaagatggaaagctacctgggaaataaaaagctcaaggtaaacaccgacagtacccgcaaggggccgggtaataccaccatcaggcctacagatgagctcgccccaacgaggcaactaaaagttatccggcccgaactggtaaaaaatcccgattcgcagctcgtggtagctttcaatgagcgcctggcctga

SEQ ID NO: 376295 - DNA, 750 bp, Salmonella enterica
atgaaaaaaattattaaggcatcggtattacttctttcattaagtaccgccttcacgatgaatgccgagccggttaatacaatggtactgccagatgcagcccgggataagctcaaagccattgggctttcaatcgagcacgtcgaaccctcgccagtaaaagatatttttacggtgatttccagggagggggtaagttacgtgagcaaagacggagattacatttttaccggaagcttattccacgtgaaaggtaaagatgtggtaaacaccactgagcaggccattttaatgggcgtccgggaattcgcatccaaaacaaaatccatcgactacaaatcaccaaacgaaaattaccggcttgctatctttaccgatataacctgtggatactgccaaaaactgcatcatgatctgaagtcttatcttgatgccggtatttcgattaagtttcttgcattcccacgtgcaggactgaactcggtagtagccgggaacatggccaaaatctggtgttcagcaaagccaaacgaagctctggatgcagcgatgaatccggtttcaactatcccggaaggacgtcctgatgaggcttgcttaaacattatcaaatcgcatttccaggtggcctcaacaatcccgctgcaaggtactcctaccatggtgacactaagcggcaaaccgcagttatttacggggtggctgagcccggaaaacctggtgacccaaatgggcgctgcgcaaaagtaa

SEQ ID NO: 376296 - DNA, 540 bp, Salmonella enterica
gtgtttacaccaccagcagatgatgtgaaacctattcccgttcctgatgagatttacactcagtgcattacggatgccgcccgcttcttcggaattgatgccgaactggtttttacgttgtttgacaatgaaggcggtaaggttggtactttcagcaggaatactaacggcacttatgatattggcccgatgcagatcaactcatccaatctgcctgaaataaaaaagcatttcccgactgtaacgtggcgggttctggcttacgatgcttgcgctagtttctgggttggaacatggtggctctacagaaaaattgttgatcgcaagggcaatgtgtttgaagggattgcagattacaacagcaaaaccccaaaggtacgtgcaaagtacatatttaacttcatggtaaagtacaatcgccggatccagcagcgtaacgggatgggtgagctttatcaatggacccaacaacctcctcgatacaatggccatatagctaaaaatgtcccggagcaaaacccgactcctgttgttaaataa

SEQ ID NO: 376297 - DNA, 1290 bp, Salmonella enterica
atggcaaacaaagtaaaagatattaaccatccatctattaatgatagagaacgtcgtgtcttggaagaactaggtatatgtaatggtgcacactttaataatttgcttaaaattgcccgctatcgtctcaatgctggttattcccatgctgaaactgtactttctttacgctgcacaggctcatacattgagcgtaccgtaatgcatgcccccaaaaatacccgtaaaaaactacgtgaacacctacaaaaatttgctctagagacagagcagaatagcgaaaccgtttattctaattacaatactcagctccgtgtaattcgagaaaaaaaacaaaaagaacatttgatggccaagcgtaaggagtacattcgcgttcggctagaatcttgtaaaacaaggggggagcggttgatggcgttcggtctaattgacactatcgatcccgaatatatacaggaactggaagaccatctggctaaggttagtcatcgtaagatgttggaggataatgaccgaaaggtaaaagaacgcaatagactgttgagtgaaatgaaaaaaaattcagcccgtctcaccgaacgaataatcctgtcggaaaaagaggaaccagatgaagaagcctctcttccaatactggtacgtagatatattcccggcggacgtgccgcagagttcgctatttatgcacgttcaaacgctacattacctccactagagatcattgagggttttctagggtatccagttggtggccgcgaaagatcgcaggaagatcagcctaaatctccaccggccgcgattatggtcgctatgaagactgatggtatagaagaaaaggagcttcagccgaatattcctgatgaaactactgtaccgggtaagcgtaagggtagtaagacaactgtcgagacacgaccagatcaggcctcatttgcagaagccgtccgcaacaactgttatgaccaatgtgtgattacaggctctagactgcgccagcgcactgaggctgctcatctgatggagcatcgtaacggaggagtagaccattatacaaatgggttgctcttacgccatgatatacacgatcttttcgacgcaaacatgattgccattcatccggtgacgttggaggttaacattctcgctgaagctttggcggtagatcatgatttagcggcatatcaaggagagtttattaagccgctgcgtaaacccatcaatactgaattcctaaagcaccgttggcaggtttttcagcaccggaaccaaactgagcagcaagcttaa

SEQ ID NO: 376298 - DNA, 3951 bp, Salmonella enterica
atggattacaacatatataccctgggtgatattgattttgtctggtcggcttttaccggtattgccctaatcttttctcaatatactggtgtaaaagagttcctgaccacggccgccgttgtagcaggtgtgagcctattctataaaacgtggctatggcttcaggctccgaccaaaaatgaattaccgtttttctcctggtttttggggttgatccttttcatgatggcaatggttcgagtggatgtaactattgaatctgtaaagtcgggagaggtcagaaacgtcgacggaattccaatttttattgctgcgatggccaccgtcaccactaacttaagccagggtttgctgaaggattataaaactgcgtttgatccgctttctccggtggacctgtctgcaacaactctggacgatgacatcaccctcggtccgatgatccgattcgtgaagtttttgcaatggggcggcgatagccagggctactgttctgcatttcctgaaccggccagcgggctagggccaatgaacgtatgtgctaccgttcagtctcttgcatacaactgcctgaaggctacccaaaactcaagcgcaaatattgccggtaaagaaactatttttaacgatattttctcagctaatctggcagatagcatggaccggattaatcaggcgatgaaaggcgcactgaagaatgcctctgccagtattgttggcgctaacggttcaaaatctggtacatgtgatgaggtctggtcaactgtgaaacaggttaccagtacagctgaagctcgccagactatttcccttataggacagacaaacggcatccttactccagacgaagcaaatggtgcacctaccggcgcaagctttactgatgttatggcgtcagcaaatggtatgtacggtaaggctattggttcgtatgacgccaccctgaacctgttcataatgaatgagctcagaaatggcgcaagcaaatataagaccccactcggtctggcttccgatatgcagttgtttgaggcttctctgaagcgaaccaacacaatggcttcacagggccagttgtggttacaactgtcgggagcagcaatcgcattccttgaaatgtttgcttatatggttgctccatttgctttgcttatgctgctggcgttaggtggtaatggtgttgcagctgcggcgaaatatttgcaacttatcctcttcgtgaatatgtggccgcttacggcagtaatggtcaacgcgtatgtgaagaaagtcgcgacggccgacttggatacctggagcaccctcaacagccagaataatgccgtcacgtggatgggactcccagggcttgcggaaacatacagttcatacctgtctgttgcttccgccctctatgctctgattccggtactcacattattcctgatgacacagtcgattcacccgatgatgaatgcggttaagggagtgacccccgatgcgccggtggatactggtcatgtaacgcccaaagtatgggatggccctaacagcggtaaatcttcatttggtgacgtgacacgaaccgccttaaccagtaccggtcagggatacagcgatggcggcgcagttgattcaagtaatttccgtcttggaatgtggaatgctggttcaagtatcgctaacagccaggggcaaggatcagctgtaacctcatcagttatgagtgcggcaagtaattcattccaggctggttacagtcagatgagcgaaattggaaggtcaggacagtcgagccagcagttctcaaccaacctgcaaacaatgaagcagatctcggataagattggtgcctctgtagcagaaggtattgcaacgaaacatggggtgagtgcgtctcagatggccagcattgcttcaaatgttattctcaacgctgggcttaatggaggtgttggaactggcaatggagccgggctgaaagcggctgtagcagggcaattgagtagcggtgcatctaagaccaatacaggcagtgactcgctttcaaatgacctttcaaaagcaatcacgaatcagcttagccaggattctgcgttaactgaccagttcagtaaagcggcgtctcaggtaagcagcgatcagatatccaatactaatgcgtttaaagaagcatcgtcgaaaatgaaccaggcgacacagacgatggcgcaaaatatttctacatcggtttcgactaacgcaagctccaatagtggaatgagccttgattctaaacaaagcattaacctggacaggttctccgattctattcgcaacaaaaacttcagtgatgatgatgtaaggaattttgctcgtaagaatgggctggatgagaatgcgtttatggagaaattcaactcctataacgataccttcaaggccagtaatcagcttggatcgcagcttcaacgtactgacgcgcttgtggctgcaacacgagatttcagtgagcaaaaaattgcgattgataccgcccggggagagacggccgaaagtaataaacaggatctccgtgaaacctccagcctgcttaaaagtctggtttccgacttcggtggtaatgcacagcagctgctacctatcaccaatcagctcgacagaatttcaggcgacgggtcaggaattaatactatcactcaggcacaggatagaactcctgacagcgtaaatacgtctggcgtgatgagtgcgtcacgcgtaggggaactgggtggaagtgtagattcgcaggctaaactcggtctttcctccaacgctcaggacgcgacacagcgtgtccctggaaaaagtgaagctggctttactccgtataaccttgataacgcgggcaaaggcgatattcagggaatacataacaacaacgtgggccgcacttattctgatgaagaaaggaatgtgcttaattctctcgaaacgaatggacctgtactgaataatcagggtgtagagaaagtcgtcaattcgggtcaggatgtcagaaatgcagaaggcacatttaacgatctggaaaaggttggaggtcgagttgttggtgatggaatggatcaacgagccactgctttgaacagtatgtatcagagcggtcaagttcgtggcttatctaataacactgataactactttagtcgtgttgccaacaacccgaacttaagccgggacgataagcgagctgaattggcacagcaagctgtctttacctatggtgccagcaccatggctaccggtgccgaaagagagcagctcaaagcggatacccagaagatccttaatgaactgggtaactataacgttaactggagtatgaatgacgttcagagcatccatagcagtttcaacactcataacagagctgatggttcacttgagtcagtcgtacgggcaaacctaggagagggtgggtcgggcggtggtctcgttggtaaccgcactcagaccgtcacagatcgcttggttggggaaaagatagaggccaacactgagcggggcgcgatttctggtgcgctactcgggggccagcaatttgtttcggatacgctaaccagcgttggggcgaaaccggtaaatgagatgcttacgggagcgggcatccttcaaacccagacatcgatagcaaatgatgcctctaaccctgcaaatatgcctgattctctccagggtaaagtccttaatcacatgcagatgtctgatggcgtcgcagctgtaagtgaccggtatcagagtattagcagcgacggcgtttcgacttatgcgaatgcagcgcagaactctgaaagggctatccggcagcaattgacggatgacccacgctttgggcctcagaaagcagatgaattcattcagtacatgaagtcagagctgagcaacacaaatgagccttaccagtcacgtgtcgataaagcggatcagtggcttaatgaaaataaaaggtag

SEQ ID NO: 376299 - DNA, 408 bp, Salmonella enterica
atgtccccggaattggtatcagacattgcaagagtggcgcatgaaaagctactttcaattttaacggagtgcggcatagagaagacggcaggcacttgcctttttgcaagctatcttgtgtgttatttagcaaaaactaaaggtctagatgctgttgtccgtgggggtaacggtgcagatgatggcggtatatttatagagtgtggtggctttggccattattggtgtgagttgaatttcgaagaagtgcaatattatattgacatcacttccgaacagtttgggtttcatccatacatagtgaaactcgccaacgatataacaggatggcctcgatatattcctggtgatcaggaaacggtcgatagtcatttagaacaattattacgcgacggctatacagaatag

SEQ ID NO: 376300 - DNA, 462 bp, Salmonella enterica
atgacaaattctcaatctgattttcctttgaacgatcaaaattttcaggcagatttgctgaaaatcaaaaaggttttcgccgaccttataacgcaggcatcagatggtaagatacccataaggtcttctcatgtacacggcttacaccatttcgaggagctctacatccgggcaagagcaggcatgtgttcggtcctgggatatccggtcatggttgtttcaactatctcagttaaagagcccggcacaggcatttttagagcgcttcttgcagaattgaaatgtattgcagatgaacaaaattacattttgaaaattgaaaatgtactgcctcccctattccgcaaataccttattcaagaaggttttgttttcccaggtgaaccttggatgtgtggttccggctattggtttaagaacccacaagtacttcatgaaaatattgagttattatctgtttaa

SEQ ID NO: 376301 - DNA, 231 bp, Salmonella enterica; identical to SEQ ID NO: 149399

SEQ ID NO: 376302 - DNA, 255 bp, Salmonella enterica; identical to SEQ ID NO: 31731

SEQ ID NO: 376303 - DNA, 408 bp, Salmonella enterica
atgaatgaaaactcagtaatcttaataagtttattttggttttttttgggatcgagtgttgtagctggttttatggatgcatcattatattgctggatttttgcagccataagcgcattgtttcttctttcggtgatacaaacaccaaaggagttaacggtatctattagtcatatgacaagcaaaacgctgatctcaaagacagatgatggatacacatttagcatttcaccttacggagacgggtaccgcttatcagtctcgcctgaaaatcgtcacaatggtacccaaagctttgacggctggttcccacgttttttttccgaaccacagtatgccaaatcatctttaactaaatttctcggtgagtccttagtatgggaagaagattcaagtaatgctctatga

SEQ ID NO: 376304 - DNA, 897 bp, Salmonella enterica
atgatgaaagagcctcatccgttacttcagttggtactaaacgattccggtcgtctaaccatgcctgtttattatagagatcaacagtattgcccgacttgccttacaaaggtgttgaagagtgaggatggaagtttggcgcacctcggggaaataaatcaaaatacatgtagaccttctatttcagtagttgtgacaaaagcaattattgaaatgttatgtgacggggaaaaaatatatgtaaatccaatacgacaccgaggccgggtgctggcaccctcagtaattttttctcccgacactcacactttcaaaccgtttataaatacagactatcagcctgtgggagcaaactggaaaagtgaaaagggatataaactcggtctgttttatctcaaagatcgagccaactctatcaataaagaggaatttgatttcattgccgttatagaccctgaggcaatgcagaaagaatttatttcggcctggtctgaggttgatgaaaaaaatccattggaaacgctgaagcagatcttacgatctaaaaacaactcttctttatgggtaaaatggcctggcaaaattgagcatgcgcaaaaaggaaattacaacgaaaattactggttcgattatcaatctgataatcaggaagtgaactgtacggtctctgttgtaggtatcgaaggtaacagttccggtgagacaatttatagattgcaaactttgctaaagcgtaagctcaatgaatatcaactggttcggtctttagggactattatgcttcttgataataccgggaatatgattccatcaaaccatccttattttgaagtcatctcaaaagcatgtataaatggagtgcgtgactttgttcgtcaaaacccgtgggtagtctga

SEQ ID NO: 376305 - DNA, 516 bp, Salmonella enterica
atgttttttttaacaaagttacttttgcccatcatgattgttgtattcccagtggcgtcctgggggaactcaacaacttttgaggcaaaggtggttaagattgttgacggtgacaccataactgcgttggatgctcaaaacacaaccatcaaaatacggatgtatggtatagacgctcctgaatctaaacaggcttttggccaaaaagcaaaacaggccttaaccacagctatagcaactaaaatcgttaccgtgatagaccatggtacggatatctatggccgtatgttaggtaccatctggttagatggatatgatatcaatgcctctatggtggacagtggatatgcgtgggtttatcggttcgaagataacgccattgtccctggctatatcaaatatgaatccgcagcacaaaaggaggcaaaagggttatgggcagacaccaaccctgtcccaccatggcagtggagacaggcaaacgaaaagcccagaaaggtgaaagagaagaaataa

SEQ ID NO: 376306 - DNA, 1428 bp, Salmonella enterica; identical to SEQ ID NO: 140634

SEQ ID NO: 376307 - DNA, 168 bp, Salmonella enterica
atgacgtatttcgaatcagctgaaggtgagacggtatctaaagaacgagcattacaagaactgtccaggcattgcgttcccgaaacagatttcgaagaattctttagcgacatgggcgtaaaggaacagtatgacgctcaggaagtgttgctctggttgggatattaa

SEQ ID NO: 376308 - DNA, 1320 bp, Salmonella enterica
atgagccaaaaattcgcagtgatgattgcttacgacgacgatccaaacgtcaaaaggtattcacctgactttcaaacgcaggatgagtttgctaaagggtggcagtcggctcttaaaaaggcacaccacacctcaggtcaaaaatcagtcatcacctgcggatgtcgtggaaaaggagaaaagcgactttatgttcgtgctttaccgaacggtgatgcctttattctcgtcaaagccgctaacacgggcattgagcatgatccttcctgtgtattcttctcccttgatgcccggcataccggcctgaaaggatatgcgagtggtgtggtccggattacaaccgaaggtgatatggctgtaaggctcggtatcggtatgacagagaaagatcctcctgaaaaatcagaagtgcctcccctgccccatgttcagcgaccagaaggaggtcaggcctcaatgaccctcctgggcttgcttagtcttttgtggacagagtctggtctgaatgtctggtacccgaaaatggcagggaaacgtaacgattcactggtacggtatcgtctgcttgaaaccgctaaacaaattcgtaccggcagagcctgcataggtgaccatttattcattggtgtacctgacccgaaacaacctgtcgctcagtcgcaaattcagcgtctttcatcacaggcgatgagtgataaacgtctcatgctcctgtcagttttacctcgctacgatgctgaaaagcatgagaagccacttaaatttttacccctgcggaattttggggggctaccgctgatttttttcaattcagaagtccattgggatagcgtaaagaaacgattttcatcggagtacgcagcatggaaatccggggcgaaaatagttgtctttgcgttgacgtcaccagctgcggtaaccggcagaggcccttctgtaagagctcatcaaattgtgctgatgcacgttagcgagaactggatacctctggactcctcctatgaggcggttgttgcagaaaagctggatgcagagcaccggcagtacgttaagcccatgcgttatgatgcgagtattagtgaggtgttccctgacttctacctgctcgacacaaaaagcgataagccgttcccgatggaagtatttggtatggccactcctgcttatctggcccgaaagcaactcaaaaaagattattacaaccgtgaatatgggccttatggatggtggcactgggatgcgaccacagcatctgaaactatggtgctgcctcattttccagaatcacgcaaacctctttcaactgacacacctgcttaa

SEQ ID NO: 376309 - DNA, 1206 bp, Salmonella enterica
atgatgattgaaaatgataaagaaaaaagcctgaacgatgctaccccgccagaggtgcagaatgacatccgcagcgaatccactgaaaaatcaaaggaaatgggtcgttcaaggtactcatctatcgcgatgatcgattacttcaatgcaatcgaacgtctgtgcaaagagaaagaaattaacccggaaaatatcgatctgagcttcaaagttcactggctcagaaacgctgttggcggctcgtttgcaaggtcacaggagatgttcgcggagtaccagaagtatgttaaagaggttcctgaagaggcccgttacctggatatacccgatgaggtaaaggttgcactcggcgatattatctcgtacatcacctggcactaccgtagaagctataccgcaatacagaatgatagtgttaaaaaagctgaagcacgtagcatgcagctggaggaggaggtaacgcagctgttacagcggcttgagcaaagcgctaccgatatggatgagctgaaacttgagaatcaggcactacagggtcgattagagatccgggacagtaccgtcaaggagttagaaacaaggctgaatgttgccgaagcagaactcgaaacctgccatcaccagttagatagcacacggcatgaattgagcctcgcacagcagtcaaatgactcactctcccagcaactggctgaacgtaaaacagagatcgctggtcaccttgaatatcaaaaaaagctgaacgaagagatcaacacgcagcgttctgataacgccggtctttccagacaatgcgaccagttaagtcagactgtgtcagatacaaaggcagagagggacaggtttgaacaggaattgattgctgcacagaacctttgtactgagctgaaaagtgcactgtccgggaaagagggtgacctggtggcggtgaatgccgagcttactgaactccataaactaaacgagtcgctgagcgccgacctgaataaagtaactttggtcagccagggctatgaagcggaagtggctgaacaaagcaatgaactcaaaacgctccaggccaaagtaatgaagctggaagctaccctggaggcggagaaaacaatctcagaatccctaaaaggcaccattgatacattaactggtgcaatggcagggggaggtactggaaagtcaaaacagccgcgtagcagaaaaacatcatga

SEQ ID NO: 376310 - DNA, 819 bp, Salmonella enterica
atgactcaaaaccagggttctgagccagtaccggcgagccggacagggcagctcatcagcgcccgggatatggccatgcagaaattcgaagaagggatgcggttaatctcggaagcgtcggaactgtgcggtctctctctcttcaccagcagaattatgcagcccaacgcatttggtcttccgtcgtcactggatcgcaccatcgaggaggggcgtaaggaaattgaccgtaaaacgtggaaaaggctctttgaagaaacaggtatggaccggtactggaaccataagcaaaaagaagcctttaacgaatcccttcgtacggatccgcccgtcgcttccctggagattgttaagggaacattacagcatgcactggctaacagacgagacacccttgcagaaggtttcgttgatgttctcaacaagcttgaccgaagtttcaaaagcaatgccaggcaatatacaatgccaaaaaagcttgttcttcgggggatttttcctggtgtgaacgtgctgaggtacaacggtttctcgcaggacaatcacttttgtttacgcgactttgagaatattgtatgcatctgttctgatactccaacacctgcaaccggcggtgggctgagtatggtcgacaggctgacggccatgagaaatacagaattcacaggcgaggtcagtgatgagaatggctggcggtgtcgcctgtttgagaatggaaacgttcatatttgcatcgacagtatctcgcttctgaatgctctgaacgatcttatcagcatatattttgcaaaccagcttccggccgcaggaaaaaaatga

SEQ ID NO: 376311 - DNA, 858 bp, Salmonella enterica; identical to SEQ ID NO: 146957

SEQ ID NO: 376312 - DNA, 276 bp, Salmonella enterica; identical to SEQ ID NO: 19894

SEQ ID NO: 376313 - DNA, 615 bp, Salmonella enterica; identical to SEQ ID NO: 100706

SEQ ID NO: 376314 - DNA, 1077 bp, Salmonella enterica; identical to SEQ ID NO: 23497

SEQ ID NO: 376315 - DNA, 705 bp, Salmonella enterica; identical to SEQ ID NO: 61560

SEQ ID NO: 376316 - DNA, 705 bp, Salmonella enterica; identical to SEQ ID NO: 61560

SEQ ID NO: 376317 - DNA, 519 bp, Salmonella enterica; identical to SEQ ID NO: 233743

SEQ ID NO: 376318 - DNA, 2967 bp, Salmonella enterica; identical to SEQ ID NO: 59353

SEQ ID NO: 376319 - DNA, 378 bp, Salmonella enterica; identical to SEQ ID NO: 16790

SEQ ID NO: 376320 - DNA, 660 bp, Salmonella enterica; identical to SEQ ID NO: 52324

SEQ ID NO: 376321 - DNA, 603 bp, Salmonella enterica
atggcgcacgaattacaactcatcaagcagtcatctggaattctgatccccgcaacgccggagaccagtgatattctgcaatcaaaaatcaaactcggcgccgtgctggtggctgagttccgtcaggtgaggaatcctgcattccatcgccgctttttcgcgttgcttaatcttgggtttgaatactgggaacctaccggcggcgccatttctgccaatgagcgcaaactggtaaacggttatgcaaagtttctcgctgcatatggcgggaatgaaagcgcattactggatgcggctgaacagtatctggaacagattgcaaaccgccgggtaacaaacgggattagcctgtgtaaatctttcgatgcctaccgcgcatgggtgacggttgaggctggccactatgacgccatccagttaccggacggcacccttcgcaaacatccccgcagcatcgctttttccagcatggatgaggtcgaatttcagcagttgtataaatccgcgcttgatgttctctggcgctggattttatcacgtacattccgtactcagcgcgaggccgagaacgccgccgcccagctcatgagctgggcggggtga

SEQ ID NO: 376322 - DNA, 234 bp, Salmonella enterica
atgagaattgaacttgttatcagccggacaaaacagcttccggaaggtgccgttcctgcacttgaaaaagaattaattacccgtctccagaatcagtatgaaaactgcaacttaaccatccgtcgaggcagtcaggatggtctgagtatcgtcggtgctgctgatggcgataaaaaacgtatacagagcatcctgcaggaaacgtgggaaagcgctgacgactggttttattaa

SEQ ID NO: 376323 - DNA, 633 bp, Salmonella enterica
atgaaatactctagagttgaacagtcaacaggaacgtcgatcgaccataatttgggctactttcttgatcctcagaagtatgttcccattactgaatttgttgatgaatcggccgcattaatcaaactcaatcttatacatgaaaactttctttcaatagtaatcgaaaatctccgtcgagaaggaaccgaaaagtttgtagatgttgacaaatactttatgcctaagattaaaaccgccgtcgcacttggtcttcctgtttcattggctaaatgcctcacggaaatgaacaatattcgtaataagtatgcccataaaatcgagtatataataaccgatgaagatgcggagcgtattgactccttgataatgagtgtccccgttgatgatattaaccatgcctcactaattgacagcaccctaataacatccatcactaatttgggagcaagttctatcgcctttatgaatgatattcctaaggactttcctgataatcggaggcgaatttgtaagttggttgctatggcgttttgcatctctaacttgggcgctttttggctgctaaatgagcttcatcggcaaggaaaactgaaaatggggagcacaaaaatggcgtttaagccctcctag

SEQ ID NO: 376324 - DNA, 699 bp, Salmonella enterica
atgaaagaacgtggaataactgatggtttaaccatgaatcagcttgcagaacgtaatgctgaacacgtaactaccatagcggcactggaagccagatgcgcggcgctggtagcggagaatgtggggctgaaataccaagagccagccggataccacgtcatcaaagagtgcggaaaggttggctgtagtgttgcaacgcttgaggaagctgagaaaacgcgagatttctggaataaaaagtggactatcagaccgtatttctactccgcccagccagcgtcagaacgcgaacgtattcgccgcgagcacgccgagtggtcagataagacgttcggcgatgtcggtccagtagggccgctgaaacatctctcaaaagaggcattggaaactgccgcagaacctggcgacctcagcgaattggctgatatgcaattcctgttatgggatgcgcagcgccgtgctggtattactgacaaacagattacccgggcgatggtggaaaagctggagataaacaagtcccgccagtggcctgagccgaaagatggtgagcctcgcttgcacatcaaaaaacacccagcgccggtagtgccggaggaaatcacggcggacggaattataggaatgcatgagtgcggatttgtggagggttggaacgcctgtcgcgctgccatgcttagcaaatggataacaaaataa

SEQ ID NO: 376325 - DNA, 243 bp, Salmonella enterica
atgaaagcaattgataaagccattaccagagcaggaaccgcaacccggcttgctgaactactggaagtaagcgcaatgaccatcagtcattggcggaatcgttatcaaggagtggttcctgccgatcgagtacttccaatttacagcgctactggtgttaccccacacgaactgcgccctgatctctacccaaacccaacagatggattaccaagccaagaggcatcagccaaacaaccatag

SEQ ID NO: 376326 - DNA, 396 bp, Salmonella enterica
atgaaagaaaaaactcatcagattaatcacccacaagtgcagaggctcaacgagatcctcgaacttaaaaagttgaccaagtcggacatggctcgcatttgcggggtcagtgctcagtcggtcaataactggtttgtgcgcggtacaattgggaaaagctcggcgataaaactggcagacgcgcttggggtgagtcttgagtgggttcttggccaagaggtcgacgagagggacggtttaaaggccgacgaacggagactgctcgaactatatcgccagcttccagatgacgaggaaaagcagaattttcttcgggtattatcgcttcgtctcaaggaactggatgccatgtacgagaagtacatgaagggaaggattcgaacgcgcgaagattaa

SEQ ID NO: 376327 - DNA, 840 bp, Salmonella enterica
atgccagcatcggtaattagctttattaatatgaaaggcggggtaggaaaaacaactctatgtgttggcattgctgagttcatggctaactatcttggtaaaagagttttagttattgatgttgatcctcaattcaatgcaactcaatcactcctaggtcattatggtcgtgtcgatgaatatcttgatcaacttcaaacaaataaaatcacaatacgtcgaattttcgaagttccaacatccattatggatacggctcaagccattagacctgttgatgttataactaaagtttctgataacctcgacgtcatcttaggtgatattaatataatctttgacacatctcaggagtctgtaagaatattcaaaatcaagaggttcatcgatgataacaacctccgtgaccaatatgattatattttcctagatagccctcctacaatatcaattttcactgatgcttcacttgttgcttcagatttttatgtcgttccggtaaaaattgatcactactccattttaggagcaactagtctggtcagtgtggtgcgaaatgtaagacacaatcataatccgaatattagacacttaggattcgtttacaccaatactgatgatgaattgacattaaaaacaagcaagataaaagataattttgaagaaaaattcagtgaattttacttctttgaacataagttatcatacgtacgagatttaatggttgggcagcagggtaacattccctcttgctatacaaagtcaagaagtgatataagcgcaatatcaacagaattcgcattaagagttgaccaactaatggtgagtgaaaatggataa

SEQ ID NO: 376328 - DNA, 387 bp, Salmonella enterica
atggataaagaacaatacaacactctattcaggtttgcccatggcggagtaacaaaagaatccgcgataggtctttttgtgaccatcttacttgataaagatttgttaaaatcaaatcatgatgtaaaagattttgttgaaagtgtcttttccatagccctattaccatacgttgttcgctcaagaacacttatttgcgcaaaaatatgcagatttttagtaagcagagaaagaaaagaaatcaataactatggtgttatggctcgttcatatttcgaaaatattttttctaaagaagaagacctgcaaggccataaaaaaagaaatacagcactttctaatatggatctgtgggtatctaggatgcttaagaaaggcgataaataa

SEQ ID NO: 376329 - DNA, 663 bp, Salmonella enterica
atgctttctaacgacccatacggcaacagagcagaaactgacaggtttcgccaagaggcaactaagtatctgagtgatgagtcagatataaataccttggtaagtgttttcaaacacgttagaatttatagcatgattattgaaatgaataccaatctatcacacaaatcacatgtgaagggtataatttatgattctttaaattccatcgttgcaatattaaataaaagagaacgatatttacatttaaatcttcgttctatgattgagcatatagcaagaatagctttgaataaaacttattctggtggtgatttcgatggaacggtacgacgacgagattttgattaccttaaatctaatagaagaaatgaaaattggaactatctgcacaatgtttatataaacgcttgtcattatgtgcatttttcaccgcaagcaaatattaacacgtcagcaacttttttgcagttgcttgtaaacgactgccattcatcgcaaaagaatcttattcgtaatctacatagattaacaagttccgtaatggaaacttacattacttattttcactatgaagttgcgagtacattttatagatccatggcagatctgaagtatctgctggggaatagtttatacaccaaatttaaagcgctgaactaa

SEQ ID NO: 376330 - DNA, 159 bp, Salmonella enterica
atgcttaaacaatgcggttactgccgcaaatccattgatgaaggcaaagaagtaaaaaacacccttctctatctcaacggctcgcaactggcgcgcaaagaaaaggaatattgttccaggcagtgtgctgaatacgaccagatggcgcacgaaagttaa

SEQ ID NO: 376331 - DNA, 2367 bp, Salmonella enterica
atgccctttcatattggaagcggatgtcttcccgccaccatcagtaatcgccgcatttatcgtattgcctggtctgataccccccctgaaatgagttcctgggaaaaaatgaaggaatttttttgctcaacgcaccagactgaagcgctggagtgcatctggacgatttgtcacccgccggccggaacgacgcgggaggatgtgatcaacagatttgaactgctcaggacgctcgcgtatgccggatgggaggaaagcattcattccggccagcacggggaaaattacttctgtattctggatgaagacagtcaggagatattgtcagtcacccttgatgatgccgggaactataccgtaaattgccaggggtacagtgaaacacatcgcctcaccctggacacagcacagggtgaggagggcacaggacacgcggaaggggcatccgggacattcaggacatccttcctccctgccacaacggctccacagacgccagcagagtatgatgctgtctggtcagcgtggagaagggctgcacccgcagaagagtcacgcggccgtgcagcagtggtacagaaaatgcgtgcctgcctgaataatggcaatgcagtgcttaacgtgggagaatcaggtcttaccaccttgccagactgtttacccgcgcatattaccacactggttattcctgataataatctgaccagcctgccggcgctgccgccagaactgcggacgctggaggtctctggtaaccagctgactagcctgccggtgctgccgccaggactactggaactgtcgatctttagtaacccgctgacccacctgccggcgctgccgtcaggactatgtaagctgtggatctttggtaatcaactgaccagcctgccggtgttgccgccagggctacaggagctgtcggtatctgataaccaactggccagcctgccggcgctgccgtcagaattatgtaagctgtgggcctataataaccagctgaccagcctgccgatgttgccgtcagggctacaggagctgtcggtatctgataaccaactggccagcctgccgacgctgccgtcagaattatataagctgtgggcctataataatcggctgaccagcctgccggcgttgccgtcaggactgaaggagctgattgtatctggtaaccggctgaccagtctgccggtgctgccgtcagaactgaaggagctgatggtatctggtaaccggctgaccagcctgccgatgctgccgtcaggactactgtcgctgtcggtctatcgtaaccagctgacccgcctgccggaaagtctcattcatctgtcttcagagacaaccgtaaatctggaagggaacccactgtctgaacgtactttgcaggcgctgcgggagatcaccagcgcgcctggctattcaggccccataatacgattcgatatggcgggagcctccgccccccgggaaactcgggcactgcacctggcggccgctgactggctggtgcctgcccgggagggggaaccggctcctgcagacagatggcatatgttcggacaggaagataacgccgacgcattcagcctcttcctggacagactgagtgagacggaaaacttcataaaggacgcggggtttaaggcacagatatcgtcctggctggcacaactggctgaagatgaggcgttaagagcaaacacctttgctatggcaacagaggcaacctcaagctgcgaggaccgggtcacattttttttgcaccagatgaagaacgtacagctggtacataatgcagaaaaagggcaatacgataacgatctcgcggcgctggttgccacggggcgtgagatgttccgtctgggaaaactggaacagattgcccgggaaaaggtcagaacgctggctctcgttgatgaaattgaggtctggctggcgtatcagaataagctgaagaaatcactcgggctgaccagcgtgacgtcagaaatgcgtttctttgacgtatccggcgtgacggttacagaccttcaggacgcggagcttcaggtgaaagccgctgaaaaaagcgagttcagggagtggatactgcagtgggggccgttacacagagtgctggagcgcaaagcgccggaacgcgttaacgcgcttcgtgaaaagcaaatatcggattatgaggaaacgtaccggatgctgtctgacacagagctgagaccgtctgggctggtcggtaataccgatgcagagcgcactatcggagcaagagcgatggagagcgcgaaaaagacatttttggatggcctgcgacctcttgtggaggagatgctggggagctatctgaacgttcagtggcgtcgtaactga

SEQ ID NO: 376332 - DNA, 390 bp, Salmonella enterica; identical to SEQ ID NO: 22296

SEQ ID NO: 376333 - DNA, 441 bp, Salmonella enterica; identical to SEQ ID NO: 22297

SEQ ID NO: 376334 - DNA, 150 bp, Salmonella enterica; identical to SEQ ID NO: 193044

SEQ ID NO: 376335 - DNA, 543 bp, Salmonella enterica
ttgaatcgaactaatattttttttggtgaatcgcattctgactggttgcctgtcagaggcggagaatctggtgattttgtttttcgacgtggtgacgggcatgccttcgcgaaaatcgcacctgcttcccgccgcggtgagctcgctggagagcgtgaccgcctcatttggctcaaaggtcgaggtgtggcttgccccgaggtcatcaactggcaggaggaacaggagggtgcatgcttggtgataacggcaattccgggagtaccggcggctgatctgtctggagcggatttgctcaaagcgtggccgtcaatggggcagcaacttggcgctgttcacagcctatcggttgatcaatgtccgtttgagcgcaggctgtcgcgaatgttcggacgcgccgttgatgtggtgtcccgcaatgccgtcaatcccgacttcttaccggacgaggacaagagtacgccgcagctcgatcttttggctcgtgtcgaacgagagctaccggtgcggctcgaccaagagcgcaccgttaacccaggatga

SEQ ID NO: 376336 - DNA, 483 bp, Salmonella enterica
atgagaaccttgaaagtatcattgatagctgcgaaagcgaaaaacggcgtgattggttgcggtccagacataccctggtccgcgaaaggggagcagctactttttaaagcattgacctacaatcagtggcttctggtgggtcgcaagacgtttgaatctatgggcgcactccccaataggaaatacgcggtcgttacccgctcaggttggacatcaaatgatgacaatgtagttgtatttcagtcaatcgaagaggccatggacaggctagctgaattcaccggtcacgttatagtgtctggtggcggagaaatttaccgagaaacattacccatggcctctacgctccacttatcgacgatcgacatcgagccagagggggatgttttcttcccgagtattccaaataccttcgaagttgtttttgagcaacactttacttcaaacattaactattgctatcaaatttggaaaaagggttaa

SEQ ID NO: 376337 - DNA, 5523 bp, Salmonella enterica
gtgaccccgcctgacgatagcggcgatgacgatgtaaccccgcccgacgatagcggcgatgacgatgtgaccccgcctgacgatagcggcgatgacgatgtaaccccgcccgacgatagcggcgatgacgatgtgaccccgcctgacgatagcggcgatgacgatgtaaccccgcccgacgatagcggcgatgacgatgtgaccccgcctgacgatagcggcgatgacgatgtaaccccgcccgacgatagcggcgatgacgatgtgaccccgcctgacgatagcggcgatgacgatgtaaccccgcccgacgatagcggcgatgacgatgtgaccccgcccgatgatagcggcgatgacgatgtaaccccgcccgatgatagcggcgatgacgacgacacgcccccagatgactctgttattaccttcagcaacggcgtcaccatcgataaaggcaaagacaccctgaccttcgacagcttcaaactggataacggcagcgttcttgagggtgccgtgtggaattattcagaacaggacaaccagtggcagctcaccaccgcggacggtaaaacgctgaacgtcaccggctgggacgtgaccgacgccaatgccgccgtgattgaaggcacccaggaaaacggtctctactggaagtacgacagccggggctatctgattattgccgacgataacaccaccgttatcagcggcgatgaccaggcgcataattccgatcgcggcatggatatcagcggccaggatcgcaccggcgtgattatttccggcgatagaaccgtcaacacgctcaccggggactccagtgtgaccgacggtgccaccggcatggttatctccggtgacggcaccaccaacaccatttcgggccactccacggtggacaacgccaccggcgcgctgatttccggcaacggcaccaccaccaatttcgccggtgacattgccgtgagcggcggcggcaccgccatcatcatcgacggcgacaacgccacgattaagaataccggtacctctgacatcagcggcgcaggctccaccggcaccgtcattgacggcaataacgcccgcgtcaacaatgacggtgatatgaccatcaccgacggcggcaccggcggccacattaccggcgacaacgtggttatcgataacgccgggagcactaccgtcagcggcgcagacgccacggcgctgtatatcgaaggcgacaacgcgctcgttatcaacgaaggtaatcaaactatctctggcggcgccgtcggtacgcgcattgacggcgacgacgcccataccaccaataccggtgatatcgcggtggatggcgcgggctctgccgccgtgattatcaacggcgacaacggcagcctgacccaggcgggcgatctgctggtcaccgacggcgcgatgggcatcatcacctatggcaccggaaatgaagcaaaaaataccggcaacgccaccgtacgtgatgcggactcggtgggttttgtggttgcaggcgaaaaaaacaccttcaaaaacaaaggggatattgacgtcagccttaacggcaccggcgcgctggtgagcggcgatatgtcgcaggttacgctggatggcgatattaacgttgtctcagtccaggacagcgaaggcgtgtttagctcagcgacaggggtgagcgtgagcggcgacagcaacgccgttgatatcaccggcaacgtaaatatcagcgccgactacgggcaggatgatctggctgccggggctcccccgttaaccggcgttgtcgtcggcggtaacggcaataccgttacccttaatggcgcgctgaatattgatgacaacgatctgtccgccaccggcggacaatacctggacgttgttggcctgagcgtaacaggtgatgataacgacgttgagattgacggcggtattaatatcacccacagcgaggatccacttgatggaacctctgcagacattaccggcatcagcgtcagcggtaacagtaccgttacgctaaacggtcattctaccattgataccaacacggtagtgggggggcacgttgtactggcgcgggtcaacaacggcggctccctgattctgggtgatgactcagttgttgacgttaatgtcagttatatacccacaggctattacacctacaacgcgttgctgatggctgatggcgaaggcacatcaattgaaaataaaggcgatattacaagccatggcgtgtattccgtcattcgcgcagataacggctcggaagtcagcaacagcggagatattctggtctacgcgaccagtagcaacagtagtgaggatcgtgcagccatcacaagggctagtggcgagggatcggctgttcataacaaagccggcggcgatatcaccctcatttctgatcagacgccgcagggcagtggcggtattgaagtatacccattgaaatggtacacccacaccttttacgccatgatggcttcggattatggcgatgtcgttaacgatgagggcgccacgatccatttgcagggggcaggtgtatatggcgttaccgccagccgaggtaaagcactaaacgaaggcaatatctatctggatggccttgtcccgacgctggacgatgaaaataacatcaccagcaccagctactggcagccatcatcgctctatctcaccagctcaggaatggtggcgggttccaccgatgccgatggcgacgccaccgccatcaacaccggcaacattaccgtcaacaacgccgggttcggcatgatggcgcttaatggcggcaccgccattaaccagggcgtgatcaccctgaccgccgatgacggcgtgaccggtcaggcagacgagctggtcgggatggcggcgctcaacggcggcgtcgtcatcaacgacaccagcggcgtgattaacatcgacgccgattacggccaggcgtttctgagcgacagttccagctacatcatcaataacggctctatcaaccttaacggcagcccgatggatgatactgattcacacatgggcggcacgccaacggacaaaatctggattcagtctctgcccggcagcggcgacagcgacaccaggacctccgacacaggtttcttcaccgccggtacgctggccaactacggtactgaaaccctgaacggcgatgtggacgttaacgggggctggctgtacaacgaagcgggcgcctcgctcaccgtcaacggcaccgtgacgattaacggcggggctaacgcgctggctaactacgggacgctggacgcggacgctatttccacctggcacagcctctttaatgaagcggacggcagcatcaccaccgatctgttaacccttaatggcgacgtcactttttacaataacggcgatttcaccggctccatagcgggcaccagctaccagcaggaaatcgtcaatactggcgatatgacggtggcggaagatggcaaatcgctggtcagcggcagcttctatttctataacgaagaggacgctacgcttaccaacagcggcagcgcggtggaaggcggcgagaacaccatcatcaatctgacgcgcgccaacgattcgctgacccaggtgaacagcggcaccatcaccgccactaacggttacagcgccatcaccacggtcaacggcagcaatgaccccaaatggatctggaacaccgcaaccggcgtgattaacggtattaacccggatgcgccgctaatcaatttgggccgcggctataacttcggcaaccagggcactatcaacgtgcagggcgataacgccgtggcgattagcggcggcaccagcagttatgtcattaacctggtcaatagcggcaccatcaacgtcggtaccgagcagggcaaggaggacggcaccaacggcaccgggcttatcggcatcaagggcaacggtaatgccaccaccataaacaacaccgcagacggcgtgatcaacgtttacgcggatgactcgtatgcgtttggcggcaagaccaaagccatcatcaacaacggcgaaatcaacctgctgtgcgacagcggctgcgacatctacgcgccgggtactacgggcacgcagaacgaccataacgggacagcggacatcgtcatcccggatgcgactaccgccccgaccgagggcagcatcccgacgccgccagcggatcccaacgcgccgcagcagctctccaactatattgttggcaccaacgccgacggtagctccggtacgctgaaagccaataacctggtgattggcgacaacgtgaaggtggataccggctttaccagcggtacggcggataccaccgtggtggtggataacgccttcaccggcagcaatatccagggcgcggacaacatcacttccaccagcgtggtgtggaacgcccagggtagccaggatgccgacggcaacgttgacgtcaccatgaccaaaaacgcctatgccgatgtggcgaccgacagctcggtaagcgacgtggcgcaggcgctggacgccggttacaccaacaacgagctgtacaccagccttaatgtggggactaccgccgagctgaacagcgcactcaagcaggtgagcggtgctcaagccaccacggtattccgtgaagcgcgtgtactcagcaaccgctttaccatgctggccgacgccgcgccgcaaattaaagatggtctggcgttcaacgtggtggcgaaaggcgacccacgtgcggagctgggcaacgacacccagtacgacatgctggcattacgccagacgttggatctcaccgccagccagaatctgacgctggagtacggtattgcgcgtctggatggcgacggttcgaaaactgcgggcgataacggcctgacaggcggctacagccagttctttggcctgaagcacagcatggcgtttgatgaaggtctggcgtggaacaacagcctacgctatgacgtgcataacctcgacagcagccgttctgttgcctatggcgatgtcaacaaaattgccgattccgacatgcgtcagcagtaccttgagtttcgcagtgaaggggcgaaaactttcaccatgatgggcgatgcgctgaaagtcacgccgtatgccggggtgaaattccgtcacaccatggaagatggctacaaagagcgcagcgccggagattttaacctgtcgatgaactctggcaacgaaacggcggtagactctattgtcggcctgaagctggattacgccgggaaagacggctggagcgccaccgctaccctggaaggtggcccgaacctgagctacagcaagagccagcgtacagcgtcattacagggtgcggcgggtcaatcgttcggcgtggatgacggtcaaaaaggcggcggcgttaatggtctggcaaccatcggcgtgaaatacagcagcaatgataccgcgctacatctggatgcctaccagtggaaggaagacggtatcagcgataaaggctttatgcttaacgttaagaaaacatttcgttaa

SEQ ID NO: 376338 - DNA, 861 bp, Salmonella enterica; identical to SEQ ID NO: 25304

SEQ ID NO: 376339 - DNA, 558 bp, Salmonella enterica; identical to SEQ ID NO: 25303

SEQ ID NO: 376340 - DNA, 3006 bp, Salmonella enterica; identical to SEQ ID NO: 152274

SEQ ID NO: 376341 - DNA, 144 bp, Salmonella enterica
atggagaacaagcagggtttggtaattaccgaagttacaagcttgattactcagaaaaattttatcagaccatccattaagaaaacgcccaccgaagcgggcgtgccctgtccggtccaaccgaccaaagcgaaccggacctaa

SEQ ID NO: 376342 - DNA, 219 bp, Salmonella enterica
gtgataaagatactcaccttcacctatgtactgagcaagaacgcggtgacggagaggcatagttgcgacaacagtcagctcgggggctggggctgttgcctgggcagggctgttgctttcgttaccaaaattttcggtgtggtcttccagcacttcgcctgtttcggtatcaacaccatcgacgatatgctggcgcgccgcggcggcggcttcagatga

SEQ ID NO: 376343 - DNA, 303 bp, Salmonella enterica
atgttcgtaatcagggttacggtcagtcttattgccaccgccagcgttggcgccgctttcagtgcgttgaatagccgatacacggttgcctttcgcccactccttaacgagcaaaccgcgatcgatatgctccgtctcgaaccatgttttaaggaactggataacagtcgccagttcaggagtttttccatcgacagggaatatttttttaacggcattcactattttgtgaatgtcatgttcaatggctttcttgaacgcttcaacattctcggcggcaagcagcaggttctggacatatga

SEQ ID NO: 376344 - DNA, 1185 bp, Salmonella enterica
atgtactttaacgcgcgtcacgtagagaagactatcgtcaaagagcgctctccagtgcttgatatgggcaacctggtacatgttctggctctacagccggaaaacctcgaagcggagttcagcgtagagccggagatccctgagggtgctttcaccaccaccgccaccctgcgcgagttcatcgacgcgcacaacgccagcctgccagcgctgctgagtgctgacgatatcaaagcgctgctggaagagtacaacgccaccctgccgtcgcagatgccgcttggagcttcggtagatgaaacctatgcatcgtatgagcagcttcccgaagaattccagcgcattgaaaacggcaccaaacatacagccacggcgatgaaagcctgcatcaaagagtacaacgccaccctgcccgcgccggttaaaaccagcggcagccgtgacgcgctgctggagcaactggcaataatcaaccctgacctggtcgctcaggaagcgcaaaaatcgtcgccgttgaaagtctctggcacgaaggccgatctgattcaggccgtgaaatcagtcaacccggcagtggtattcgccgacgaattgctggatgcgtggcgggagaacaccgaagggaaagtgctggtcacccgccaacagctcagcaccgcgctgaacattcagaaagccctgctggagcacccgaccgccggcaaattgctgactcacccaagccgcgctgtcgaggttagctattttgggattgatgaggaaaccgggttggaagttcgggtacgccctgaccttgagctcgatatgggcggcctgcgcattggcgccgacctgaaaactatcagcatgtggaacatcaagcaggaaggcctgcgtgcgaagttgcaccgggaaatcatcgatcgggactatcacctgagcgcggccatgtactgcgaaactgcggcgctggaccagtttttctggattttcgtcaacaaagacgagaactaccactgggtcgccatcattgaggcgtctaccgagttgctggaacttggcatgctggaataccgcaaaacaatgcgagagatagcaaacggcttcgacactggtgaatggtcagcgcctatcacagaagactacaccgacgaactgaacgattttgatgtgcgccgccttgaagcgttgcgcgtacaggcataa

SEQ ID NO: 376345 - DNA, 1110 bp, Salmonella enterica
atggaaaacacaaatattgttaccactgagcagcaggcaccaaacaccatttctgccagtaacgcaatttttaacgttcaggcactgggtcagttaacagctttcgctaacctgatggcagactcacaggtgacggtaccggcacaccttgcagggaaaccagccgactgtatggctatcgtcatgcaggctatgcaatggggcatgaacccttacgctgtggctcagaaaacacacctggttaacggtgttcttggttacgaggcacaactggtcaacgcagtaatcgcaagctccagtgccattcatggccgttttcattaccgctatgggggtgactgggagcgctgcaccaggacacaggaaatcacacgcgataaaaacggtaaaaatgggaagtacaccgtcactgagcgcgttcgtggctggacagatgaggacgagatcggcctgttcgttcaggttggtgccattctgcgaggtgaatctgaaatcacctggggagaacctctttacctctccggcgttgttacccgcaattctccgctatgggtttcaaaccctaaacagcaaattgcctatctgggcgttaaatattgggctcgcctgtactgcccggaagtgatcctcggcgtgtacagccctgatgaggttgagcaacgagaagaacgcgagattaaccctgctccagtccagcgcatgagcgtacaggaaatcaccagcgaggttagcaccaggaccagcgcgcaggagtcggcagctaacgttgatgctgttgccgacgatcttcgcgaacgcattgatacagcaagttccgttgatcaggcaaaagcaatccgtgcggatatcgaatcacagaaagcgttgctgggtactgcgctgttcaccgaattaaaaaacaaagcagtgaagcgctattaccaggtcaatgcacagaacaaagtcgaggcagtgatcaactcaattccaaaccctggcgaaccggaagccgcagagatgtttgctaaagctgaaagcacgcttggcgctgctaaacgccatcttggcgacgaactgcacgataagtaccgcgtcaccctggacgatatgaaaccggaatacatcggctaa

SEQ ID NO: 376346 - DNA, 240 bp, Salmonella enterica
atgcgcctaataaatcgcagtaagcaatcgccattgggccgtcgcgcatgtgatgttgcactggcggcgcatcatgaaaagttcggcgattacggcagacaaaagcacgttaccaattacaccgttgtagtggatggcgtaaaggtgcctgttgaagtagttaaccgggccaccagctacgtagccaccgcaatgatcggcgtccggaaacttagaaatctgccagcacaggcaaactga

SEQ ID NO: 376347 - DNA, 411 bp, Salmonella enterica
atgaacaaaaatcttcatcccattttcgccaagcgtatccagcaagttctggatgagaacggctggtctatggctgacctctcacggcgcgtaatgctttctcacacatctgtgagaaagtgggcctctggcacgtctgtagccagcggagagcgcttgaaaaggttatcggcggtgaccggaaggcctgaatattggttcttcatggagccaggggatgaaagtgaaggcgaaagggctgaacctaaacccagagtccttgatgaaaaagaagaaacattgctttctcttttcaatcaactcccggaagcagagaaactgcgtgttatcctccatacaaaagcagtcctccaagagatggatctgctgaagaacaacgtttttgatctaattaacgacctcaaaaaatag

SEQ ID NO: 376348 - DNA, 240 bp, Salmonella enterica
atggacaaccaattaaaaatcaaaatcagtaaccacatgactcaaatgagcatcggcgaacattttggtatctcgtctcaagctgtaggcaagtggctgagaaaaggagtaattcctccccgtcgcatcctgccgttatgtgaaattcttgaatggaaagtcactcctcacgagattgacccagcagcatacccaaacccaaccgatggcttaccaagccaagaggcatcagccaaataa

SEQ ID NO: 376349 - DNA, 348 bp, Salmonella enterica
atggcccgacctaaaacacaaagcgaacggatgattattcttgagcggattatcggtctggtgaaagagcaggggcgcatcacgacgaacgacgtcgttgcgatttttggcgtgcaccgaaccacggcggagaaatatctgcgtatcgcgctggagcgaggcggcttcattcgtcatggccgctgcggcattttccgagaccagcgtgcggtgattgattatgacctcaggcgatacagcagtagtcaggtaacgggattttcagcgctgccggtgctggagaaaagcccggtaatgcaggtttatggagcatccaaaatgagcatcaacaaggggggagcccaatga

SEQ ID NO: 376350 - DNA, 270 bp, Salmonella enterica
atgtatcagcgaatgatttttgaagaaggaaaagagccaaggttgtattcaagccaacatgactccaagtttatcccaataagtaataacaatggaaaagttcaaaaggttcctgttatggagctcaaggataccagaggagatgttttttatgcttacaactatgcttattctggtaaaaaaccatcaaatgacgaaatctataaggctattgatgagctaaagccaatcggtgaaaaattcgaaatgtctaagactataagcgattag

SEQ ID NO: 376351 - DNA, 366 bp, Salmonella enterica
atgcgtgatattcagatggttcttgagcgttggggggcatgggcggcgagtgatagctcaggagtggactattcgcctatagctgctgggtttaaagggcttcttccctatacctgcaagacacgtgtggcttgttctgataatgacgcattaattgttgaggggtgtcttgctcgtttaaagcaaaaaaggcctgatgagcattcgcttcttgtggcacattatttatacagaatatccaagcgtaagattgcaaaggtgcgtgggaaggatgagaaattggtacgtatagaaatacagttagccgaaggatttattgatggctgcctttcaatgctggatctaacattagatatggacgtttaa

SEQ ID NO: 376352 - DNA, 1332 bp, Salmonella enterica
atgttagaaacactatcattcactgaacgtgacgagttccaacgaagaaacatcgctgaaaatatcatcaaattgctaaaaccagaggcagacatttcaccactggtaatagacggtgcatgggggacagggaaatcagaatttagtatcaaactgaagaatctcattatcgagcaagaaactgagtctaaagttgtctatgttgatgcctttaaaggggatcatgcagaatctccattacttctaataacatcagctattgcgagcattttgccggaggaggaaaaacaaaacttcattaagagatctcttcctgcaattcgatttggtttaaaaactgtactaaaagctggtgcaggttggtttttacgacaggaggctagtgaagttgccgaagaattccaagatgcgatgaagaaagcaagcaatgcagcaatagatgggactattgaaaatatacttgaagaccacatggaatcagagaaaaacataaactctctaaaatcttgcattgaagatatatcaaacaagcaaaagatagtgataattattgatgaattagaccgatgtaagccaagtttttcaacaaatatcattgaaacaataaaacacatctttgatatcaataacgtattttttattttagttacaaacactgaacaactaaaagcatctataaatcatatttatggttatagcattaactcacaaaagtatcttgacaagtttataaaatataccattactcttccagacacatgcttaataaatgggcataacgtatgtaaaacctcggttatatattgggatcaccttgtaggtgaaactacattactaaataaaatcaacagcttagttggtagctttatttgtgatttaattcaacgaaccaacttatccttacgtgaaacacaaaccttttcacgcaatcttaacattttccgactgttaaacgacaatgagtgcaaaagcaatgatccttttataaatatgatcgttgtcgtagctgtcttcatacattgttttggtgacaaggaaaaactaaaacaagaaattaccgctgaatctatatcttatttagcagacctgcttaacataaaagaaataccttattcttatgagagaagatcgcaaatccctgaaatatcaattatattcttcggaataattaaagacagcattactcttaatgagcgatttgcccctaaaagtgatgaggaacttaaaaagttcacaaatgtttatactgattatgaacacctaaaattttggagcactactcccagagagttaatgataaaatatattaatcaaatgtcattcatccagtaa

SEQ ID NO: 376353 - DNA, 330 bp, Salmonella enterica
atgcctcataacccaaatacctggcctgatttacttgaattgttacagagctggtggcgtggagacacaccgctgggcgcagtcattatgtcgattgttatggctggtttgcgcatcgcctattttggcagtggtggcggctggaagcgaaaaatgctcgagattttgctctgtggcgctctgacactgacctttgcatctgctcttgagtatgtcggatggatgagccgcaacgaagcacgcgcgtttgaggacatgaatccgaaagacggccttgatgaaatgctggtcagcgtcaacgcctcccggccagccaaaaccacaatctag

SEQ ID NO: 376354 - DNA, 189 bp, Salmonella enterica
atgaaagaaggcttctactggatacagcacaacggcagggttcaggttgcttactacacccacggcgtaaccgaggacctggaaactggtcagactattattggtgtctggcatctgacgcagggcgatgacatttgtcacaacggagaggctgagattctggcgggaccgttagaacctccaatttaa

SEQ ID NO: 376355 - DNA, 564 bp, Salmonella enterica
atgaccactcaaatctctgtcgaaactctttccccgattacccataaccaaattcccgttattactaccgaacttttggcgcacttatacggcacaaaaatcaaaaacatttctgataactttctgaacaacaccacgcgattcgttgtaggaaagcatttttttaaaattgaaaaaaacgaattacgcgagttcaagaacagacccgaaacaatcgggttagttggtaaaaatgcccgttccctaatcctctggacagaacgcggcgctgcccgccacgccaagatgctcgaaacagatcaggcttgggaggtgttcgaaaaactggaggattgctatttcagtcagacactaccatcgccaacacgccaggttcagcctgccgtcgacatgcttaacatcgaccttctgattaagatccgcgatggtaacgtcaaagacattcggcaggttggtccagacatgttcgttggaaaagtagagcagatattgagcggattacgcgatagcggctggatagtcattaaaagggatttgcttgctgagaagctggcgacgtggtga

SEQ ID NO: 376356 - DNA, 219 bp, Salmonella enterica
atggggttctattacgtttttcaatacaagccgaaagggatgtcgtcgggtaagcatttaaatgtttccgaggagttttcggaccggaatgaggcaaagagagcgaagtccaggcacatgattaatgatccagattgtgtcttctcgggaatcgtgcaggctgattcgccggcagcggtacttcaagaagtacaggctgaatctcttaataggctttaa

SEQ ID NO: 376357 - DNA, 1956 bp, Salmonella enterica
  misc_feature (1854)..(1863): n is a, c, g, or t
atgaaaaggcttaatgaacaagttaacgttcccggccgtaagtatacagtcacagaaaatcatttctcatcagtcacacaaagtgacgacgaatctgagcatcgttacttcaaacaactttccgttgtaaagtttcctgaatacgtcaatttcggttgtatgtatgagttagtagttaactggatgcatggacgtaagacaattttcagcccatttatgatcactcagactgttcagtttgccgatccgctcaagttgtcaaaagaaaacgtccgctacaaagcaatcactaataaacaggcaagtataccttcagttgtcacattctgccctcgcctgcgggatatggataatgactacatggccgtaactcgcgagcttgaggatggcgcaaagcttttaagagggtatcttactttcactgttatgggtagtaatgccaattctgtgcagacagcagctaacgatctcaaatccttttacctcgaaagccgggtcaaagtagcagatgattcctttatcgttttcccgtcatttatgtcatgtctgccaatgtgcaatgacccaaagacaattttcgaccttgaccgatccgaagtagtgagcaacaccggagcggctcatatgacgccgatctttgggccctggaaaggtaatacagatagaccagtactgagtttagtttctcgtgaaggtcaactcatgggacttgatattttcaagacttctgcaagctataacatggttattggtgcaacgtcaggtgcaggcaagtcattctggacagcatatctaatcaataactatcttggagctggaccgcgatctaataacctcgttcattatcgctcaacatttaagcattttttagaaaacgaatacccagatgatgatcctgatggtgctcaagtttttgtagtggacgtggggcgttcttaccaggggattgcggaacaatatacaaacagtcaatttattgatttcggtaaaacccctgacttcaccctaaatccctttgccttcctaactgacatcactgttaacgacgatgtatttaacgaagcacctgaatttaccggtgaatcaacttcaaacgatgcagaaaaagacaaagttgctcagaccataatggttctgaatcagctaaaaattatggcttcagagaaaggccttatcgatgattatcaacaatcagtgatgcttcagcttattgcagaagagtaccaggaatccagaaaatcaggtcggaccggttcaataaccggctttgctctgcgttgcaagaagcatgaagacaaacgtataaaggatattggggagcaactcggagcatggtgcgaaggtggaatttatgggcaccggtttaccgatacgttgcctccaatcaacttcgacagcagatttattgttttggaactggaggagctaaaaggcaccccccaccttcagacagttgttttaatgtctatcattcaggctgctcagcatgcaatgttcatcaaaaaagatgggcgtcgtcgcttgttcatcctagatgaagcttgggagtacattcgtcctgataattcatcaggtgccggaaatcaatcaaaccaattcttctcttccttcctcgaagcggcatggcgtaggttcaggaaaacaaactgcgctggcatctgtatcacacagtcgtttgaagattattttacttcttctgttggccgggccctgactgctaactcgccttggaagataatcatgaaacaagaaaaagaaagcattgaagcaatgaaggctaataaatatttttctacttcagatgcagaatatgaacgaatgaaaaatattcgtacagtcaaaaaggtgttttcnnnnnnnnnngttttcagagatgttagtcaggttcgaaaacttccaagagatctgtcggttatacgtagaccggaaaatggagctttgttttactacggatag

SEQ ID NO: 376358 - DNA, 153 bp, Salmonella enterica
atggaagtgaggctaaactcgctgttactgtttctgaaggcccctcccgaatgggggaaacagcgagtgcattacatctgttcaattccctcatcaaagagcattcaaaaatcttctgttcgtgaaaaaaaacggaaatttcctccggtatag

SEQ ID NO: 376359 - DNA, 765 bp, Salmonella enterica
atgtcagaatctgataatttaactcgtagcttactcggtaaacttttccgcactgagatttcgcttattcgtagttaccgtgcatttttaatgttattgcctgtgcatggatcttctgcatatcaaactgggactcctcttctccagcgtcgcctatttgggaaaggatttagtacagccgctgatttagcttttgaagtggaaacacgtccaggtagttttttggttccgcgtacactcggaaaggaaattacatgggagaggtttcgtgaatatgatacaaatgatattgactatggtatttacgatgccggtgaaaaagtgacttttctgaatggtacagtggatatctataatcccaagaagattcatgagttgcgttctaaatgtgttgatatacagaatgactactttatgcaggtgttctttatctcaatgctcgcaccagagtttgtaagtgttttctttggtttaaaaccaactacagctgatgctattaaagacattggttattcatcgttaaaaacaattaacgatgtcgttcttttcccacgtacaattgctttctcacaagggcatattgaagagagtgtttcacttaaaacgaaagtttttgcctgggcttatgaattgtctgctgacatccggttaggaaaagttagtgatgatttgatggaactattacgttatgacactatgttcaccagtcaccgtcaggatgtgttcaacactttaacaaataaagttatgttaaaggattattaa

SEQ ID NO: 376360 - DNA, 231 bp, Salmonella enterica
atgaacattatcaacatctttttgaggaagaagatgaagagcatgagatcattgattataccgatttcacacagcttagtgtttctcggccagaagtcggtagttgtgcaacaagctcttcggtccataatgaaaagcttctccccgagccgtcagaattaccagaacttaaccgagaacagaacgctgatccccagggtacgattgaacgctctatggatgtttctgtag

SEQ ID NO: 376361 - DNA, 174 bp, Salmonella enterica; identical to SEQ ID NO: 146456

SEQ ID NO: 376362 - DNA, 411 bp, Salmonella enterica
  misc_feature (288)..(297): n is a, c, g, or t
atgcacatcattatcgtaaatggtgaggtataccttaacgagaacgcattccttgattttgttctcaatgatttcgaattacataaatataacttccctcagggagaggctggtaagacggtattggtagaatccctagttcaacgtggttacgtcgagccctatgatgatgagcgtgtcgttcactacttcattccgggtatctattcggaaaacgaaatatcaaacatctttagaaatgggatagggaaactagaattctataaccttcttaagctaaggtggatnnnnnnnnnnctgactcagtgccgggtctttttagcgttaatgccaataaagactttatttacattgacgagcaaaaaacagttactgaatacagaagaccagtgcccggtcgggacgctataa

SEQ ID NO: 376363 - DNA, 825 bp, Salmonella enterica
atgattaaattaattctttcagcacccgtgccagcaatggccgtggcttttgaacattcttttcagaataccgaaaatgtggaaattatccccggaccgtttgaaaccataccggaatttgactgcatggtcagtgcggccaacagctttggtcttatggatggtggtgtggatgctgctattacggcatatttcgggccgcaattacaggaacgggtacagcaacatatcctccgtgaatatctgggagaacagcccgtcggcaccgcctttgttattgaaacgggtaacagtaaatatccgtggctggttcacgccccgacgatgcgcgttccgctgataatcgacggcaccgacgcggtttataatgcaacacgtgcagcgttattagcgatatttcagcacaataaaagcgccggggaagacaggaaaattaaatcggtagtattccctgcgatgggggccgggtgtggtcaggtatccccgggcagtgtcgcccggcaaatgaagctggcgtgggatggttttattaactgcaccacggaaattaactggcaatacgccagcgcccgccagaatgctgtattcagtacaacggcatactgtccgtcaaaggcgctttgtccgaacgccagaacggaatatatcggttttggtgattacagaacgtattgcaaaaaatcaggtaacacctgcatcagtccccgtcatcaggttgatgatatttatattggtgcgcatagccatgctgttttccttagccccaattctcatggaaagcacctgaaacctgaatatttatccggagtaaaaaatgacgtttaa

SEQ ID NO: 376364 - DNA, 786 bp, Salmonella enterica
atggcgtctgggaactacacgtatgagttcaacatgaaagaggtaccagaaggcagttataacgtggtgattaatgcccaagatacattcaacaataccggtaacctcccttatcaaacagttgtcgttgataatacagcaccatctgtaagtattagctacgaaggaaaaccgatcagcaaaaacgtaacagtatatgggctggagaacgtccgtatacagctcaccgatgctctaactaaaccatccttaagccgtatgactcttcgcggtggccctgtttctgatgcggtggaattgtcttgggtgaatctgggaaacaacctgtatgcacctaattatcccaagatctttccgtctcttaatgaaggcgaaacatacactctcacagttcaggccaaagatgagatgaacaacgttaaagaaagctcagtcgaatttaactaccttccaaacaatctcgtcaggctagagaatctgaaaaccttagctgtcaatgcttctctcaaaacatctgacaatactgctctggctgttctgtatgccagccagctgcgtaaaaaggatggttcaatcgctacagggcttcaggacgcagtgcttactgtccgtaaggacgctgcattcggcgtgactgtaaatggcgtttctgcgatgccaggtgaaagcaaagagcttcaactggatttggggctcggggacagccgtagctttcctattttccctgctgtatccggccttactggcagatctgagttcatgattaacattgaagaattaaaataa

SEQ ID NO: 376365 - DNA, 231 bp, Salmonella enterica
atgacggctaatcaggcgtatcagcagttagcaaagctgggtgttgttgaacatcgtgagcgttacagtcgctccgcgattaacggcattaaaaaattctggtcgctgacggcaaaaggctgcatgttcggcaaaaacatcaccagcccggcaaaccctcgcgagacgcagccgcatttcttcgagtccaaattccctgagctgctgaagctgctcgataccgttcattga

SEQ ID NO: 376366 - DNA, 555 bp, Salmonella enterica
atgaaagatatctttactaagtcaggtttatttttctttttccagagtacttgccagttttgccacgaagaaagccaaatacttcaatttatgcagaactattattcggtagatattcttccaatcagtatggatggaaggccattgcataatggtctttttcaggattttaacatccccaatgcacaaattattgatcaatttaaaattcgagaggtacctacaattttcctggtttcaaaggatgggacatcagctcagcgcattagtgaaggcatgatctccgctgatgaattaaagaacactattatacttgctgcgaagggcatgaatctgatcgatgacgcttcgttccagtcaactctagatattaaaaggcaatataccatcggtgatgatggcgttattaccgttaataaatccgaaatggaatcagacccattcctacttcaaaaaataatggaccaaaaactcgaaggctatgacatgcctacggccgatccggtcaattatctcaatgctggcggcagttttggaggcacttatgcgcagtaa

SEQ ID NO: 376367 - DNA, 276 bp, Salmonella enterica
atgaatgaactaaaatccaaaaacgagaacagtaccaaaagcaactttcccccggttgataatcagttttgcttttaccatgttgatttcagcatagaacgactactttctacggccgaggatctccagcttgagtacatcttccagaaacctggaagtgaagtaagaaaggatttggttgagcgattcgaacgtggagagcgctttgttacagcttcacactgtgacaatttctgtgaaatccttggttgtcaaggccatcaggaaaatgcataa

SEQ ID NO: 376368 - DNA, 831 bp, Salmonella enterica
atgccgcctgtttttcctgctcattggcacgtttcgcaacctgttctcattgcggacaccttttccagcctcgtttggaaagtttcattgccagacgggactcctgcaatcgtcaagggattgaaacctatagaagacattgctgatgaactgcgcggggccgactatctggtatggcgcaatgggaggggagcagtccggttgctcggtcgtgagaacaatctgatgttgctcgaatatgccggggagcgaatgctctctcacatcgttgccgagcacggcgactaccaggcgaccgaaattgcagcggaactaatggcgaagctgtatgccgcatctgaggaacccctgccttctgcccttctcccgatccgggatcgctttgcagctttgtttcagcgggcgcgcgatgatcaaaacgcaggttgtcaaactgactacgtccacgcggcgattatagccgatcaaatgatgagcaatgcctcggaactgcgtgggctacatggcgatctgcatcatgaaaacatcatgttctccagtcgcggctggctggtgatagatcccgtcggtctggtcggtgaagtgggctttggcgccgccaatatgttctacgatccggctgacagagacgacctttgtctcgatcctagacgcattgcacagatggcggacgcattctctcgtgcgctggacgtcgatccgcgtcgcctgctcgaccaggcgtacgcttatgggtgcctttccgcagcttggaacgcggatggagaagaggagcaacgcgatctagctatcgcggccgcgatcaagcaggtgcgacagacgtcatactag

SEQ ID NO: 376369 - DNA, 228 bp, Salmonella enterica
atgagaattacttttgcaccttataccgatgataacgatgcgcttaatcttcccggctacgtttatgtcaacgtaaaaccgcaaacatggattgctggcaagaattcgacctcaaacccagctcgcatagttcctttagaagtacaggatgcggcccgggaaaatatgcagcagcaacaaaaagcaactaaagctgtctcttcgaacggcattgttagacaactgtaa

SEQ ID NO: 376370 - DNA, 651 bp, Salmonella enterica
gtggccgtattcgcctttcagaatgcccgccgtttctttggcaatggttttgtagcgctcgccggtcaggacgttgagcaccgcctgggtgccgacaatctgcgaggttggggtcaccagcgggataaagccgaggtcctcgcgcacgcgggggatttccgccagcacctggtcgagtttgtccgccgcgttctgctgcttcagctggctttcgaggttggtgagcattccgcccggtacctgggccaccagaatacggctgtcgtagcccttcagctggccttcaaaggcgtgatactttttgcgcacctcgcggaagtacgcggcgatattttccagcttcaggatatccagcccggtgtcgtgttccgtgccggcaagcgttgccaccagcgcttcggtggccgggtggccgtaggtggcgctcatggaggaaatcgccgtgtccacgccgtcgacgcccgcctcgatagccttcagcagggccatctccgccatcccggtggtggcgtgacagtgcaggtgcaggcgcacctcaaaacgttttttgatttcgctgaccagctcatacgccgccatcggtgtgagaatgccggacatatccttgatggcaatcgagtcaacgccggtttccagcagttgctccgttaa

SEQ ID NO: 376371 - DNA, 561 bp, Salmonella enterica
gtgaaaaccgtggcggccagcctgcgtcggcaggggctgcgggcgaaagcctcgcgccggttccgtccggtcagttaccgcaaacatggtctgccagtctcagagaatctgctgaagcaggacttttacgccagcggcccgaatcagaagtgggtgggtgacatcacgtatcttcgcactggtgaaggctggctttatctggccgtggttatcgatctgtggtcgcggtcagtcattggctggtcgatgtcttcgcggatgacagcacagcttgcctgcgatgcgttacagatggcgctgtggcggcgtaaatgtccggaaaatgtcatcgtgcatacagacagaggcggtcagtactgttcaacggattatcagagcttactgaaacgccataatctgcggggaagtatgagcgccagaggttgttgttacgacaatgcctgtgcggaaagcttcttccatacgctgaaggtggaatgtatccacggagaggactttgtcagccgggaaataatgcggacagcagtgtttaattatagtgagtgtgattacaatcggtag

SEQ ID NO: 376372 - DNA, 201 bp, Salmonella enterica
atggtccaagacatctatgacattgggcatcagaaggactatgtgtttgatatgagatcaaaaaaatatcagaagcatcacaactccaatggcattcaaagaaatgcctttgttttgttagtacaccaaacaacccaaaattcatgcagttatatcaaagactcattcgcaaaaggactcagccagaaagcatttgcttaa

SEQ ID NO: 376373 - DNA, 207 bp, Salmonella enterica
atgctgaaaaataagttatttatcagtgctatgcttagtgcttcttttactactggtcttacatctcggcttaatgtgcaaaaaagtaacttttcaaacgaactcctgactattcatctgtatgcctttctggctcaagcgtacatgctagcccattcattaaatgccgtggagcaagatggtttcgtgcgcactctattcacgtga

SEQ ID NO: 376374 - DNA, 612 bp, Salmonella enterica
atggctaaattaccgcgccgtaagtgcgcaaacaaagaatgccgccagtggtttcacccgatacgcgaggggcagatcgtttgctcgtaccagtgcgccagcgccgtcggcaaagaacagaccagaaaagctcgcgaagccgcgcaacgtaaggcgcaatcccttcagcgcgccgctgagaaaaaagaacgcgccgcctggcgccagcggaaagccgcggttaagccgctgaaacactggattgacttgacgcagcgcgccgtaaatgacatttgccgtgaaaccgaactggcagaaggactcggttgcatctcctgtggaacgaagacggcattcgcatggcatgcaggccattacaggagtacggccgccgccgggcatctgcgcttcactcgcttcaacatccatcttcagtgtgatgtctacaacgtctacaaatcagggaacatcgaagcatatcgtgccgcgctggttgagcgttacggggaggcggcggtgctggcactcgagaacaataacaccccgcaccgctggacggtcgaggagctgaaggaaatcaggctcgcggctctggcggatctgcgtgcgctaaaaaagctggaggccgcatga

SEQ ID NO: 376375 - DNA, 390 bp, Salmonella enterica
atggaacttgttaagaaattttatgcagatcgggacaagtatcggatagatattgttttagttccctcacccggtgagccaaaagaagagcttagaaggctctggtgtagtaaagaaaaaggaaaaataaacaacctcgatattcttcgttggctaatgggaagcaaatccgacattgaaaaaagattgctctctcaaaaagaagcagaagaatgtccggcggaacctttggtagcgtcattgatgctcgcaggaatttataaattgcagggtgtaccttcagttgtcagacaggatggtttggctggtaatggcattccaaaagatttcgactactggttgaaccaaagcgttgaacctctcttaaaaaatccatttgagacaaattaa

SEQ ID NO: 376376 - DNA, 447 bp, Salmonella enterica; identical to SEQ ID NO: 105515

SEQ ID NO: 376377 - DNA, 177 bp, Salmonella enterica
atgagcaaccaacccaccagcctgccagaagaagatattgagtttgttatggatacctttcagaggagcatgggtaaatccaagcctgtcagggatactcaactagagggtgagaaaccgcaaagtaaagagtccgcaaactcaactgaaaaccccggttatgaagaattctattaa

SEQ ID NO: 376378 - DNA, 204 bp, Salmonella enterica
atgatgaatccgagaccgagaccgataccgataccgaatcagaagataaatcgcttgagtcgactgatagtcgtgaggatgattctgaggacgatagtgaaggtcaggcagatacttccgataactctgatcttgctcaagagggatgttctgagccttcagaacttgctgaagataacgagggaaataaaaccactgctgtaa

SEQ ID NO: 376379 - DNA, 159 bp, Salmonella enterica
atggccatgcaatcgccgcccctactggatgcgaatccggaggtgggtttagtgtggtgtaaagcattgcccattcggaccactcagcatcggcggtatctcgatggctgcgaatatatgcgggcgctggcgcaccatttgtcccgctccagccaatga

SEQ ID NO: 376380 - DNA, 345 bp, Salmonella enterica; identical to SEQ ID NO: 146470

SEQ ID NO: 376381 - DNA, 369 bp, Salmonella enterica
atggtagaaagccacttcattcagtctgaggttatgggaataaaacccgtaatttttaatattgatgagcttcttgtttctatatccccaatttcctctcttaagttcgattgggagtgggccccagttgatacaatactcattgaagttatcattccacctgtagagtcagaccttgtaagtgcagaaaatgacttcctccgtgattctggtatcggccatatccagtgcgagcctggcggagcatcaatacgacgtacagttaccttcgttggtggaataaccgctgataacttactgtatcagttgaggcttatgtgcgtaagtgcgttaaaacttttaggagaggaactgggggatgaagtctaa

SEQ ID NO: 376382 - DNA, 273 bp, Salmonella enterica
atgaatgtttacgattacttcaataaacaatcacagccttcgtacaagattgcagtgcttgacatgcctgaattacgtaaggaatttttcaagcatcacggaggccgtactgctgacaatgatagaactcaattcgaagaatatttcagaacattaatgaagatctaccgtgaccgtggctatttaattattgatgcaacgcttgccgttactgtaccggatagtgttgaaatcgtcacttatatggaacttgaagatagctctgaagcataa

SEQ ID NO: 376383 - DNA, 225 bp, Salmonella enterica
ttgttggatgcctttcttggcagtgatgaggatagcgaagattatcacgatgctttggctaaagagattgaaggtattgcatcaaaagtatccgatgacgtgaaagccgaattcggtgcttctgaatgggatatccctgatctccttatcgatttgaatgtttacaatgaggctctcaaactctgcattcattccgtcatcgaagcgtgtaaacccttcagatga

SEQ ID NO: 376384 - DNA, 285 bp, Salmonella enterica
atgttcgcctttactgagtggtatgccggcggcttcaataacagtacagacctcttcctggactgcatcccacatatcactgttgagatccgttgcgcggcggcccgtggcgggatcaccattcgtaaatccgtttttcccctgaccaaatttatctttttgcgcagtgggcgtatcaattctgtgcattctcttttccttccggataagcaaaaacaacaaccgtatgtgacggacaaagcttatcaatcacacattcagcaacagtatcgccccacgttctga

SEQ ID NO: 376385 - DNA, 129 bp, Salmonella enterica
atgctggctttcctggtaagacaagttggaactcagaagtcgattgtactgtctctcacctatcttgccaaagttgccagtcgcttgtttgccttagctttagattttatgcttatggaggcggtttga

SEQ ID NO: 376386 - DNA, 318 bp, Salmonella enterica
ttggctttggcaaggataaaatcactcccattgatactaccaccactccaagaacaacacgaaatcgtccgccgcgtcgaacaactcttcgcctacgccgacaccattgaaaagcaggtcaacaacgccctgacccgcgtcaacagcctcacccagtcgatcctggcgaaggccttccgcggcgagctgaccgcccagtggcgtgcggaaaaccctgaacttatcagcggtgaaaacagcgccgccgccctgctggaaaaaattaaggccgaacgcgccgccagcggcggtaaaaaaacctcgcgtaaaaaagcctga

SEQ ID NO: 376387 - DNA, 1305 bp, Salmonella enterica
atgggcttctggcagtgcaaactccgttatcgtacgcaggaagagctgctggaggtcgcccgcgaatataagcgccgcaatctgcctatctcagtgatcgtaatcgacttctttcactggccgaatcagggtgactggatgttcgatgcgcgcgactggcccgatcctgatgccatgattgccgagctgaaatcgctgggaattgagctgatggtctccgtctggccgacggtggataaccgtaccgaaagctatcgggagatgcgcgaaaacggctggctggtacaaacggaacgtggcttgccgatcaatatggatttcctcggcaataccacttactttgatgcgactcatccgggcgcgcgcgactacgtctggggcaaagccaaacgcaactattacgataaaggcgtgaagttattctggttagatgaagccgaacctgagttcagcgtttacgactacgacaactatcgctaccatgccgggccggtactggaagtgggcaatatctacccacgtatgtacgctaaaaccttttttgacggcatgaaagccgatggcgaagaccaggttatcaacctgctacgctgcgcctgggccggcagtcagaagtacggcgctctggtctggtcaggggatattcactcctcgtttagatcgctgcgcaaccagtttgctgccggactcaatatgggaatcgcggggataccgtggtggacgacggatatcggcggttttcatggtggcaatattcacgacccgaaattccatgaattgctgattcgctggttccagtggggcgtctttagcccggtgatgcgtctgcacggcaaccgcgatccgcagattttacccgcacaaccgtatcgggatggtatcgcccagtgccctacaggtgcgccgaacgaggtctggagctacggtgaggaagtatgcgaggtactgacaggttgcctggcgttgcgagaaaaactcaagccctatatcaaagcgctgatggaggaaacccataagcacaatacgccagtgatgcgccccctgttctttgaattccccgaacaggaaacaagttggacaatcaccgaccagtattgttttggtcctgacctgctgatcgcccccgtcatgcatgaaggtatgcgcgaacgtgatgtctggctaccagaaggggaaacatggacggatcttgcgaccggtgaaagctattcaggagggcagacgctgcagtacgctacgccactgaacagaattccggtgtttatccgcgaaggtgggcagtaccgtagcctgctgaacttgtag

SEQ ID NO: 376388 - DNA, 450 bp, Salmonella enterica
gtggcggtggttggcgtaccgggggcgttattttttagccatctgtcagataaattccgtaacagtaaagttaaggttattctcggtctggaaattgtggcggcagcaatgttggcgtttacggttttgtccccgaataccacgatgctgatggtcagcctgacgctatacggcttgctggggaaaatggcggtagacccgatcctgatctcctttgtatctgaacaggcttcggcaaaaagtctgggaagagctttcagcctttttaacttctttggcatgagttcagcggttgtcgccccaacgttgaccggatttatttcggatgtaacggggtcgaaagagatcagttttgtgatttcagcatgtttagtggtcaccggaacgctgatctttgctgtcgtcactttatataaaaagaaagcaacgcaacgtattgcttcagcttaa

SEQ ID NO: 376389 - DNA, 1455 bp, Salmonella enterica
atggaacatcaaagagagctataccagcagcgcggttatagcgaagacttattacctaagacagaaacccaacgaaactggaaggcatttaactatttcaccttatggatgggatctgtacataacgtgccaaattacgttatggtcggcggtttttttatactggggctatcaacatttaatatcatgttggccattattatcagcgcattatttattgcggcggcgatggtaatgaatggcgcggcaggcagcaaatatggcgttccttttgctatgatattgcgaggttcttacggtgtccgcggcgcgctattccctggattattgcgagggggaatcgcggcaattatgtggttcggcttacagtgttacgcgggatcgctggcatttcttattttgattgggaagatctggccaggatttctgacattaggcggagatttcaagctgctgggtctttcactgccaggactaattacttttctaattttttggattattaacgttggcatcggttttggcggtggtaaagtattaaataaatttaccgctatcctcaatccatgtatttacattgtctttggcggcatggctatttgggcaatatcgctggtcggcattggcccgattctggactatctgccttcaggcgtgcaaaaagcagagcacagcggctttctgttcctggtggtgattaacgccgtagtcgccgtctgggctgcgccagcggtaagcgcgtccgatttcacgcaaaacgcgcattcatttcgcgctcaggcattgggacaaacattggggcttatcgtagcgtatatattattcgccgtagccagcgtgtgcattattgccggagccagtattcattatggtatggatacctggaacgtgctggatattgtgcagcgctgggacagcttgtttgcttcattctttgcggtgctggtgattctgatgacgacaatttcaaccaacgccaccggtaatattatacctgcggggtatcaaattgcggcgcttgccccgacaaagcttaactataaaaatggcgtaatgattgccagtattatcagtctactgatttgcccatggaaattaatggagaatcaggacagtatttatctgttcctcgatattatcggcggtatgcttggcccggtaatcggcgtaatgttagctcattattttgtggtaatgcgtggaaaaattaatcttgatgagctgtacaccgccagcggtgattacaaatattatgataatggatttaacctgactgcattttcagtcaccctagtcgcagtcattctgtcattaggcggcaagtttataccatttatggagcctttatcccgcgtgtcctggtttgtaggcgtaatagttgcgttcgttgcttatgcgctattgaagaaacgcacgggttttgaaaatacaggagagaaaaaactcgcaggttaa

SEQ ID NO: 376390 - DNA, 1362 bp, Salmonella enterica
atgtcttttgatttaattattaagaacggtactgtcatcttagaaaacgaagcgagagttatcgatatcgccgtccagggcggaaaaatcgccgcgattggcgagaacctgggggaagcgaaaaatgtgctggatgcgacgggattgatcgtttcgccgggcatggttgacgcgcatacccacatttctgaaccgggccgtacccactgggaaggctatgaaaccggtacgcgcgcggcggcgaaaggcggtattaccacgatgattgagatgccgctcaatcagctgccggcgacggtcgatcgtgagacgattgaactcaagtttgacgcggcaaaaggtaaattgaccatcgacgccgcgcagttgggcggtttggtctcttataacctggatcggctgcatgagctggacgaagtgggcgttgtcggcttcaagtgctttgtcgccacctgcggcgatcgtggcatcgataatgattttcgcgacgttaatgactggcagttttacaaaggcgcgcaaaaactgggagagatggaccagacggtactggtacattgcgaaaatgctctgatttgcgatgagctgggcgaagaagctaaacgcgaaggtcgcgtaacggcgcatgattatgtcgcctcacgtccggtatttactgaagtggaagccattcgtcgcgtgctgtatctggcgaaagcggcaggttgccgtctgcacgtttgtcatatcagcagcccggagggggtagaggaagtaacgcgtgcgcgtcaggaaggccaggatgtcacctgtgaatcgtgcccgcactattttgtcctcgataccgatcagttcgaagagattggcaccctggcaaaatgttctccgccaattcgcgaccaggaaaaccagaaagggatgtgggaaaaactgtttaacggcgaaatcgactgcctggtatccgaccactctccatgccctccggaaatgaaagcaggcaatatcatgcaagcatggggcggaattgccggactgcaaaactgcatggacgtcatgtttgatgaagcggtgcaaaaacgcggtatgtcgttgccgatgtttggcaaattaatggcgaccaacgccgccgatatttttggtctgaaacataaaggacgtattgcccccggcaaagatgctgacctggtctttattcagcctgacagcagctatgttctgaaaaatgaagatctggaatatcgccataaagtcagtccgtatgttggccgtactattggcgcgcgtattaccaaaacgattttgcgcggcgatgttatttatgacatcgagcatggcttccctgtgccgccaaaaggtcagtttatccttaaacatcagcagtaa

SEQ ID NO: 376391 - DNA, 348 bp, Salmonella enterica
atgaattattgttcaatagatactccttatactcggattactgagcacaaatatttttctccgtgggagagacatgaagcttcaatatgttatcaagaatatagtcgggaatgtgaagctggtgatataccctactatcctgttcgcagggcagataaaatggatttactgaataaatatctgtcgcgggctaaaaaagaaaaaaatattactttcattggtcgtcttggcacttatcgttatctcgatatggacatcacgatagctgaagcattacagacggcggacgtatacttaacgtcgctatatgaacaaaaagaaatgccagcttttacagttaccgtttga

SEQ ID NO: 376392 - DNA, 1932 bp, Salmonella enterica
atgatgcctgaatacggccacgcgctgctgtgcctggcgctcggcgtggcgctgctgctgtccgtttacccgctgtggggcgtggcgcgcggtgacgcgcggatgatggcgtcggccggggtgttcgcctggctgctgtttatctgcgtggcgggcgcgtttttcgtgctggtgcacgcctttgtggttaacgacttcaccgtggcctatgtcgccggcaactcgaacacgcagctgccggtgtggtaccgggtggccgccacctggggggcgcacgagggctcgctgctgctgtgggtgctgctgatgagcggctggaccctggcggtggcggtgttcagccggcaggtgccggcggatatcgtcgcccgggtgctggcggtgatggggatggtctgcgccggttttctggcgttcatcctgttcacctccggcccgttcgcccgcacgctgccggcctttccggtggaggggcgcgacctgaacccgctgctgcaggacccggggctgattttccacccgccgctgctgtacatgggctatgtcggcttctcggtggccttcgccttcgccatcgccgcgctgctgagcgggcgtctggacagcgcgttcacccgttttgcccgcccgtggacgctggcggcgtgggtgttcctgacgctgggcatcgtgctcggctcggcgtgggcctactacgagctgggctggggcggctggtggttctgggacccggtggagaacgcctcctttatgccgtggctggcgggcaccgccctgctgcactcgctggcggtcaccgaacagcgcgccggctttaaggcgtggacgctgctgctgtccatctgcgccttctcgctgtgcctgctgggcaccttcctggtgcgctccggggtgctggtgtcggtgcacgccttcgcctccgacccggcgcgcgggatgtttatcctcgcctttatggtgctggtcaccggcggctcgctgctgctgttcgccgtgcgcgggcacagggtgcgttcgcgggtgaacaacgcgctgtggtcgcgcgagtcgctgctgctcggcaacaacgtcctgctgatggccgccatgctggtggtgctgctgggcaccctgctgccgctggtgcacaaacagctggggctgggcagcatttcggtgggggagccgttctttaacaccatgttcacctggctgatggtcccctttgccctgctgctgggggtggggccgctggtgcgctggggccgggaccggccgcgtaacatcaggacgctgctgctcaccgccctggtctccaccctggtgctgtcggtacttttgccatggctgctggaagataaaatcatcgccatgacggcggtggggatggcgatggcctgctggattgcggtgctggcggtggccgaagccgtacagcgcgtgtcccgcggcacgaaaacctctctcagctactggggaatggtggcggcgcacctcgggctggcggtgacgattaccggcatcgccttcagccagaattacagcgtggagcgtgacgtgcggatgcgggcgggcgacagcgtgaccattcacgactaccgcttcaccttccgggaggtgcgggacatcaccgggcccaactaccgcggcggggtggccctcatcggggtgacgcgccacggcgagccggaggcggtgctgcacgcggagaaacggctctacaacaccagccggatggtgatgaccgaggcggcgattgacggcgggctgacccgcgacctgtacgccgcgctcggggaggagctggacaacggcgcgtgggccgtgcgcctgtactacaaaccgtttgtccgctggatatgggccgggggactgctgatggcgctgggcgggctgctgtgcctggcggacccgcgctaccgccgccgtaaaccattgccggaggccggatga

SEQ ID NO: 376393 - DNA, 165 bp, Salmonella enterica
atgggcggcgtcagtttatgggatcttacggttgcatatccggtcacctcacatctgacagttcgtggtaaaatagccaacctgttcgacaaagattacgagacagtttatggctaccaaactgcaggacgagaatacaccttgtctggcagctacaccttctga

SEQ ID NO: 376394 - DNA, 141 bp, Salmonella enterica
atgcctgctcgttcattatgccaaaaatcctttaaaaatatactggagcctttgcacctttaccgccgtcaatctctgattgaggctaccagtgtagtgattaacggtgcatctcttacacttattcagtattgggcgtga

SEQ ID NO: 376395 - DNA, 276 bp, Salmonella enterica
atgactaagcaaattgttctaaccagcgatgctgtcccctatcaggaattcgctcggctcattggaaaatcggagcgagctgtaaaggggatgattgaaaaagggaaattacctattgttgaaatgacagacccgcaatccacctctggtcgagctggagaatattggatttatcttcctgcttggaacaacggaatgaaattagcgtatgagagccgcccgaaggaaattagggatgggtggttaatgtggctgggtttgggagaaccacgatga

SEQ ID NO: 376396 - DNA, 336 bp, Salmonella enterica
atgaaaactaaatacgcgactctcatacgcagcctgttgcaaaattatcacgctcaggctaaagccattgataaagaaacgttctctgttcatagcgatggtttgcagttaatggaattaaacattcagcttgcaaaatgtcttgaaggtataacctctactgctcgttttaataatgacagtgaagattttgaggaacttcataaaatcacgcttatggtgttcggcggaaacatcccaaccgaaagcaatatttcaggtcttatgtctctggcgactaacgcattaaaaataaataacttccatctaaaacctgttgcagcttcccaacgttaa

SEQ ID NO: 376397 - DNA, 990 bp, Salmonella enterica
atggttgatattcctaaaatgagcgaaacaatagataaagctttggatgcggtaaaattagttacaactgaaccggtagtgaaagctgttaatcaacggttatcaaatccattttttctatgcttcatatcctcctggattctctgtaactgggaccgcactctattactcttattctcgttcagtctggacatagaacaacgtattgaaaaaataaaggcgttaccatcaaatagtgtcttttttggaattagcatccctcatactcatacgttttggtatccatttgttgcctcaattatatttgtagttggcactccttttatctcatatgttgttgatgtaatacaaaatggagtgcttacgaaaaagagtacaaatgatagtaagaggaaacagagtgctcttgatttaaaaatagacgaaataaataaaaatgtcgagtatgaatatgcagacgcaaaagcgaggttaaatgctgaaaaggcaaataaagctatcgaatatgatacgaacgcgcttgaagataaatataataacgctcaggtaaagctcagggatattaatgaattaataaaggaaaaggggaaagaggttcagtcagttaccaattcttattataatgctatggactcaatttcgaaggtgaggacggaattggaattaaaagaaaaagaattgatggatttgaatgccaaaattatagcgaatcaaaataaattagacgatattaatcaggaaatatctaagaatacactgccttttgccaggccgactttaggttctctggggtttcaggggcttcagggacttgatttaaattctgcgaaatcaacctggcctggtgagaatttagctaaactcaattggggactaaatggggcaaattggcccggtctgattcctaccagtcttcaaactgttaatgatgtagcctcaggccttattcctgtaaatcatcctaataatgatggaaataaaagcaaataa

SEQ ID NO: 376398 - DNA, 276 bp, Salmonella enterica
atgcgggtaatgaaggtttactgtccggtatgtgaggcaagggctgttatcaaaaaaacagccagaaaacacaaggagctgtctgatttatattgcgcctgtactgatgttgaatgcggtcacacttttgtgatgaatatgacgttctcacataccatcagccccagcgccaaatccagcgatgcgttgatcgccactatctgtaacagccttgatatgcagcaaaaacagctgatgctcaagtttttaagtcaggatgctaccgcagcagcatag

SEQ ID NO: 376399 - DNA, 1458 bp, Salmonella enterica
gtgaaatttaatagtaatgacaggatatttatatcaatctttcttggattggcgattatatatacatttcctttattgacacatcaatcatttttcgttgatgacttgggtaggtctttatatggcgggttgggttggtcaggcaatggtcgcccactttccgactttattttctatatcattaattttggaaccccaattatagatgcttctccgctacctttaatgctagggatagttattttagcattggcactatcctgcgtcagggaaaagctgtttggagatgactacatcacagcatctctttgttttatgatgattttggcaaacccattctttattgaaaatctatcatatagatatgattcattaacaatgtgcatgagtgtggcaatatctattatctcatcgtatgtcgcttatcaatacaagcctataaatatcataatatcatccattttaaccattgcattccttagtctttatcaggctgcgctgaatacttacgcaatattcttgttggcctttataatttcagatgtggttaagaaaaactcaatttcaaatatcacaaaaaatacagcatcttctgtcgctggtttaataataggatatttttcctattcttactttattgcaaaaagacttgtaacaggttcttacaatatcgaacatagtaagattatagagataaactcaagtttatttgaagggataatttctaacgtcttatcattttatagaatgtttagcacgatcttgaatggcgataattacttaatctactactcgctattctttgcgctaatcatttctttgatagtcatagttttaaaagtaatcaaaagagatgaaaataagaaaacaaagttcttgctagtagttttaattttattagcatcaatgtttttcatcattggaccaatgatttttctaaaatcaccaatatacgcaccgagggtattgattggtatgggtggctttatgtttttttgttgcctatgcgtattctatgcttttgaagataagcagttaatatcaagaatatatttttcttttattcttttaatatcaacaatattttcttatggtgcttgcaatgccataaatgcacagtttcagcttgaggaaagcattgtaaatagaatatctcaagacatagattatcttggatttggaagagacaagaaaaatataaaattcattggcacagaaccgtatgcatcaataaatgaaaacatagtaataaagcatcctttaatgagagagttaataccacgcattattaacaataattggatgtggtcagaggtgttaatgcaaagaaatgtgttctccagaaattacagactatatgacaaagaggtgaaacttgaaaatgggtggaaaaaatctggtaataacgtatacgatattggtgttgtaggggaaaccatagttgttaggtttaactag

SEQ ID NO: 376400 - DNA, 2004 bp, Salmonella enterica
atgacagatatcactgccaacgtagttgtttctaaccctcgtccaatctttactgaatcccgttcgtttaaagctgttgctaatgggaaaatttacattggtcagattgataccgatccggttaatcctgccaatcagatacccgtatacattgaaaatgaggatggctctcacgtccagattgctcagccgctaattatcaacgcagccggtaaaatcgtatacaacggccaactggtgaaaattgtcaccgttcagggtcatagcatggctatctatgatgccaatggttctcaggtcgactatattgctaacgtattgaagtacgatccagatcaatattcaatagaagctgataaaaaatttaagtattcagtaaaattatcagattatccaacattgcaggatgcagcatctgctgcggttgatggccttcttatcgatgttgattatcatttttataatggagagaaagttgattttggtggtaaggttctgactatagaatgtaaagctaagtttataggagatggaaatcttatttttacgaaattaggcaaaggttcccgcattgccggggtttttatggaaagcactacaacaccatgggttatcaagccttggacggatgacaatcagtggctaacggatgccgcagcggtcgttgccactttaaaacaatcgaaaaccgatgggtatcagccaaccgtaagcgattacgttaaattcccaggaatagaaacgttactcccacctaatgcaaaagggcaaaatataacgtctacgttagaaattagagaatgtataggggtcgaagttcatcgggctagcggtctaatggctggttttttgtttagagggtgtcacttctgcaagatggtagacgccaataatccaagcggaggtaaagatggcattataaccttcgaaaaccttagcggcgattggggtaagggtaactatgtcattggcggacgaaccagctatggatcagtaagtagcgcccaatttttacgtaataatggtggctttgaacgtgatggtggagttattgggtttacttcatatcgcgctggggagagtggtgttaaaacttggcaaggtactgtgggctcgacaacctctcgcaactataatctgcaattccgcgactcggtcgttatttaccccgtatgggacggattcgatttaggtgctgacactgacatgaatccggagttggacaggcctggggactaccctataacccaatacccactgcatcagttacccctaaatcacctgattgataatcttctggttcgcggggcgttaggtgtaggttttggtatggatggtaagggcatgtatgtgtctaatattaccgtagaagattgcgctggctctggcgcgtacctactcacccatgaatcagtatttaccaatatagccataattgacaccaatactaaggatttccaggctaatcagatttatatatctggggcttgccgtgtgaacggtttacgtttaattgggatccgctcaaccgatgggcagggtctaaccatagacgcccctaactctaccgtaagcggtatcaccgggatggtagacccctctagaattaatgttgctaatttggcagaagaagggttaggtaatatccgcgctaatagtttcagctatgatagcgcagcgattaaactgcggattcataagttatcaaagaccttagatagcggagcattgtactcccacattaacggggagcccggttctggctcagcgtggactcaacttactgctatttcaggtaacacacctgacgctgtatcattaaaagttaaccacaaagattgcaggggggcagagataccatttgtccctgacatcgcgtcagatgattttataaaggattcctcatgttttttgccatattgggaaaataattctacttctttaaaggctttagtgaaaaaacccaatggagaattagttagattaaccttagcaacactttag

SEQ ID NO: 376401 - DNA, 249 bp, Salmonella enterica
atgggaagagatgacccgcaatttaacctcaggctaccctacgagctgaaagaaaaggttaagcagagggcaaaggcaaacggaaggtcactaaatgcagagctagtgcagatagtggctgattcacttgaaaagcctacgcctgtaatcggatacagggatgatgctgaacgcgaagcagacatcgtatccagagaaattcaagaattagtattcgaaaagttgaaagatttctatcgaaaaaaatag

SEQ ID NO: 376402 - DNA, 1932 bp, Salmonella enterica
atgaaagttacagccaacggtaagacattcacattcccagaaggaacaagcactgaagatattggatcggctatcgatgagtattttgctggacagtctgcacagcaggaacagcagggcacatctacgaccccagaaagccagccacagcaacaaagtggcttcatttctaaccttggcaatgctgctgcagaaactgggcgtggattgctacaggctggcgttaatctggcaaatatcccggcatcaatggctgatgctgtcgccagcgctggggcatgggctggtcagaagcttggcattggtgacggaacttatcagccagcgcctcgcgtcacgacacaaggacttgagcagggctttggcttgcaacaaggtgcgcttactccacagacgacagaaggtaaaatcttctctgaagcactgccatatttgactcctgttggggtcgagagaattgcagcgcaggcaccatctattgccggtcgagttgctcagggtgcatcacgcttgctggcggagaacgctgttggttcattggctgcaaacagtgagcgtgataatccagaagcactggcaacagacttaggaactggtgttgcattaggcggggcaatcaataagttaggtagagccgctggagctgcttatcgtggtattcgcgggacgatcgcaccagaagcgcagcaggctattcagttcgctaatgctgcagatgttcctttgcatacaactgacgttttgcagccaaattcccgcgtcgggcgcatggcacaaaccacagctgaaaacatcccatttgccgggacaagcactatgcgagctaatcagcaagaagctcgcagtcagttggtagatgagtttgcatcgcgatttggtgaatacgatccgtcgattgtagttggtagtctgaaagcaaaaacgtcaggaataaagcgcgcagcggggaataggctggaacaagtgcaaaacgcaatggcaggcgtaaacattcagccgtcaaaggcaattcagcagattgatactgaaatagccagtttgcagaaacttggaaaggttgcggataacgatacgatttctaagcttcaggcctatcgcgatgagcttacccgcaatgctggcgcaagcggtccagtggcaatggatttgcagcagttgagcggactgagaagccagtttaggcaggatgttaaaggagagagaacggtcttgccaaaccgatctgacgcagctattcagcgcatttacaacgcaatgactagtgatatcgatagcgccatcggacagaatcttggtaatgacacactgcgtcgctataagcaagctaacgccatctacgctgacgaagcaaataagctacagaatacgcgccttaagaacgtgatcatgaaaggagacctgacccctgaagtggtcaacaacatgctattcagcaagaacaaatcagaagttcagaatctgtaccggtcagtcggtcaggtggggcgcgctcagatgcgcaacggcataatcggaaaggccatggagaaatcaggaggctcacctgaccagttcctgagacaggttaacctgatgtctaaccagaccggtatagcattcaaaggccgtgatgctgcgtatctgaaggggattaagaattatcttgaggcaaccaagcgtgccggtcaggcaggagtaacaacgcctacaggtcagcaaactataccgttcatcctaggtattggaacagtaactaaccctgcactggtaggtgttggtggcgggtatggtttgctggcaagaatgtatgagagtgaaccagcacgtaatgcaatgcttcgcctggctaatactccacgtggttctaccgcattcgagaaagcgttagccgaagttgagcgggctgttaactctgttgctcaaggcgctaaatcagatgcattaagcgaatag

SEQ ID NO: 376403 - DNA, 702 bp, Salmonella enterica
atggcagacccgtcacttaataatcctgtcattattcaggccgctcgtcttgatgcctcaatcctcccccgcaacgtcttcagccagtcttatctgctctacgtaatcgcgcagggggctgacgttggcgctattgctggaaaggcaaacgaagcagggcaaggtgcctatgacgcgcaggtaaagaacgatgagcaggatgttgagcttgcagaccacgaagcgaaaattcagcagttacgcatcgacgtagacgaccatgaaatccgtattactgcaaataccaatgcaattgcgacgctggatgtcagactaaccacggctgaaggcgaaatagtcaccttacaggctgatgtcagtgctcttgatggtagagtggcgacggttgaaggaaatatttctgcattgctggctgattacgtatcgaaaacagccaccgcaacacaatcgctggcgtcacctctcaacgtgacaacgtcctattcagttggcggtaccaaagttatcggtgctcgacagaccggatggacagcagcaacaggcgctgcgcttctcggtgcattcaacgctaaccaggcatacacggtcagtgccacatatacacagtctgaggtatcagctatggctaccggattgcagcaggcgcgacagcgtataaaagctctcgaagatgcaatacgaactcatggattgatcaactga

SEQ ID NO: 376404 - DNA, 501 bp, Salmonella enterica
atgcagataaagactaaaggcgatctggtcagggcagcactgcgtaagcttggcgtggcatcagatgcaactctcactgatgttgagccacagtctatgcaggatgccgtagatgacctcgaagcgatgatggccgagtggtatcaggacggaaagggcatcatcaccggctatgtattctcagatgatgataatcctcccgctgaaggtgacgaccacggtcttcgctctagtgcagtcagcgcggtattccacaatctggcttgccggattgccccagattatgcgcttgaggccacagcgaaaattatcgctacggctaaatacgggaaggaacttctctacaagcagaccgccatcgccagagctaaacgagcgccttacccgtcacgtatgccaactggcagtggaaacagtttcgccaatctgaacgaatggcattatttccccggagagcagaatgccgattcaacaactccccatgatgaagggaatgggtaa

SEQ ID NO: 376405 - DNA, 210 bp, Salmonella enterica
atgaaaatagcaatctataagccaggtggaagcgtcatggtatggggcgtaatggctcagatgaaggtcatcgactccagcgaacttcccgaatatgtcaaagatggctggtttaaccatccttcaaagttgctgtcctcggaatcaggcgatgccaagccgcgcaaaggacgtaagcccaaggcggtaagcgatgcagataaagactaa

SEQ ID NO: 376406 - DNA, 1293 bp, Salmonella enterica
atggctttgaacgaaggtcaaattgttacactggcggtggatgagattattgaaaccatctccgcaatcactccaatggcgcagaaagccaagaaatacaccccgccagctgcttctatgcagcgctccagcaataccatctggatgcctgtagagcaggagtcccccactcaggagggttgggatttaactgataaagcgacagggttactggagcttaacgtcgcggtaaacatgggagagccggataacgacttcttccagttacgcgcagatgacctgcgagacgagactgcgtatcgtcaccgaatccagtccgcagcccgcaaactggctaacaacgttgagctgaaagtcgcaaacatggccgccgagatggggtcattggttatcacttcgccggacgctatcggcacgaacaccgcagacgcatggaactttgtggccgatgcagaagaaatcatgttctcccgcgaacttaaccgcgacatggggacatcgtacttcttcaacccacaggactacaaaaaggcgggttatgacctgactaagcgtgatatcttcgggcgcatccctgaagaagcataccgcgatggcactatccagcgtcaggttgctggcttcgatgatgtcctgcgctctccgaaacttcctgtgctgaccaaatccaccgcaactggcatcactgtatccggtgcgcagtccttcaagcctgtcgcatggcaactggataacgatggcaacaaagttaacgttgataaccgttttgctaccgtcaccctgtctgcaactaccggcctgaaacgcggcgacaaaatttcgtttgctggcgtgaagttccttggtcagatggctaagaacgtactggcgcaggacgcgactttctccgtagttcgcgttgttgatagtactcacgttgaaatcacgccgaagcctgtagcactggatgatgtttctctttctcctgagcaacgggcatacgccaacgttaacacctcgctggctgatgcgatggcggtgaacatcctgaacgttaaggatgctcgcaccaacgtgttctgggctgatgacgccatccgtattgtgtctcagcctattccggccaaccacgaactgtttgcaggtatgaaaactacctcattcagcatcccggatgtcggccttaacggtatcttcgctacgcagggtgatatttccaccctgtccggcctgtgccgtattgcactgtggtatggcgtgaacgcgacacgtccggaagcaatcggtgttggcctgcctggtcagactgcgtaa

SEQ ID NO: 376407 - DNA, 2175 bp, Salmonella enterica
atggccgacgaaaacagactcaattccattctgtgtaagtttgacgcagactggatggcgagcgatgaagccagaagggaggccaagaatgatctcttcttctcccgcgtatctcagtgggatgactggctatcacaatacacaaccctacaatatcgcgggcagttcgatgtggtacgtcctgtggtgcgaaaactcgtttctgagatgcgtcagaaccctgttgatgttctgtatcgtccaaaggatggagcaagtcctgacgccgctgatgtgcttatgggtatgtatcgtacagacatgcggcacaacacggcaaaaatcgcggtcaatgtcgctgttcgtgagcagattgaatctggcgtaggtgcgtggcgtctggtcactgactacgaagatcaaagtccaacgagcaacaatcaggttatccgtcgagagcctatccatagtgcctgctcccatgttatctgggacagtaacagcaagctgatggacaagtccgatgcccgtcactgcacagttatccactcaatgagccagaatggctgggaggatttcgcagaaaaatacgacctcgatgctgatgatattccatcattccagaaccccaacgattgggtatttccatggctgacgcaggacacaattcagatcgctgagttttacgaagtggtcgagaagaaagagacggcgtttatctaccaagacccggttacgggtgagccggtaagctactttaagcgcgatattaaagacgtcatcgacgacctggctgatagtggatttatcaaaattgcagagcgccagattaagcgacgccgggtatacaaatcgattatcacctgcaccgctgtactgaaagacaaacagctcattgctggcgaacatatccccattgttccggtattcggcgagtggggcttcgttgaagataaagaagtgtatgagggtgtcgtccgcctgacaaaagacggtcagcgtctgcgcaacatgattatgtcgttcaacgccgacatcgtggcccgcactccgaagaagaagccgttcttctggcctgaacagattgcaggctttgagcatatgtatgacggtaacgacgattacccgtattacctgctcaatcgcacggatgagaacaacggagaaatgccaactcagccgctggcatactatgaaaatccggaagtcccacaggccaatgcctatatgctggaagctgcaaccagtgcagtaaaagaggttgcaactctaggtgttgatgcagaggcggtaaacggtggacaggtagcctacgacactgttaaccagctaaacatgcgtgctgaccttgagacatacgtgtttcaggataatctggctaccgctatgcgccgtgacggtgagatttaccagtcgatagttaatgacatctacgatgttcctcgcaacgtgacaatcacccttgaggatggcagcgaaaaagatgttcagctaatggctgaggttgttgaccttgccactggtgaacggcaggtactgaacgatatcagggggcgctatgagtgctacacggatgttggaccatcattccagtccatgaagcagcaaaaccgctcagaaattcttgagttgctcggcaagacgccgcagggaacgccagaatatcaactgctgttgcttcagtacttcacactgcttgatggcaaaggcgttgagatgatgcgcgattatgccaataagcagcttattcagatgggcgttaagaagccagaaacgcctgaagagcagcaatggttagtagaggcgcaacaagccaaacaaggtcaacaagacccggcaatggttcaggctcagggcgtactcctgcaggggcaggctgaactggctaaagctcagaaccagacgctgtccctgcaaatcgatgcagctaaagtcgaagcgcagaaccagcttaacgctgccagaatcgcagaaatcttcaacaacatggacctcagtaaacaatctgagtttagagagttccttaaaaccgttgcttcattccagcaggaccgcagcgaagatgctcgcgcaaatgctgagttactccttaaaggcgatgaacagacgcacaagcagcgaatggacattgccaacatcctgcaatcgcagagacaaaatcaaccttccggcagtgtagccgagacacctcaataa

SEQ ID NO: 376408 - DNA, 405 bp, Salmonella enterica
atggcaaatccaaatttcacgccatcgtggcctctctacaaagatgctgacggtgcatatgtgtctgctcttccgattaaagctatcaaatacgctaatgacggaagtgcaagcgcagaattcgatggtccgtatgctgaccagtacatgtcagcgcaaacagtggccgtattcaagccggaggtcggtggatatctgttacgaagccagtacggcgagctgctctatatgagcaagacagcatttgaagctaagtacacttccgcaagcggttcagtaacgaatgcagatacggcggataagttgtcaacggcccgtactatcacactaaccggcgctgtcacaggttcaacgtcatttgatggttcggctaacgtgactatcgcaactacccaaggaagctaa

SEQ ID NO: 376409 - DNA, 243 bp, Salmonella enterica
atggcagagattacagcattgacagaattacagcagatgaacctcgatatcctccgtttagtacaaagcgataccgcagcagcagagaaagcgatcgcattcgttgctggaagtaagctgaacttcgaactgttcaaagaccaactggttttggcgcagggtgaaggaacggcattagctcgcgcagaaaaggctattcgtgaggcaaaagaagcgttagacctgttcactgccggagtataa

SEQ ID NO: 376410 - DNA, 687 bp, Salmonella enterica
atgcaattagttgaaatcaagaagctcgacttggtcactaactccgctgtaatcgctactggcgtcaaaaaggatcacaagcctgtgattcagctcatcaggaagtacaaaagcgacctcgaagagttcggaagggtggaatttgaaatgcgaccctttcaaacggatgggggcatgcagaagcaggaaatagcactgttaaacgaacagcaaaccacgctgttgatcacatacatgcgaaacaatgaagttgtgcgtgaattcaaaaagcgcctggtagctgaattcttcactatgcgtagcgcgctggcgaaaaagaaaatggatcgcaactctgcacgcctggagtacaaacccatgaccgacgccatcaaacatgagcgagaggctcagggtaagcagatcgccccgcatcacttcagcaacgaagctgacctgattaaccgactggcgctgggaatgacggcggccaagttccgcgtgcatcacgaaatcgggaagaaagagccgatccgcgattacctgacgccggaacaaattcactgcatcaccgagctacagcgcgccaacacggtattcatcagcatggggtgggacttcgaacaacgcaaagaggtgctgcgcggcatgttcgagcgtaatcatcgtcagccgcttatcgaagaacagcaccgcctggcggcctaa

SEQ ID NO: 376411 - DNA, 468 bp, Salmonella enterica
atgagcagagtaaccgcgattatctccgctctggttatctgcatcatcgtctgcctgtcatgggctgttaatcattaccgtgataatgcaatcgcctacaaagagcagcgcgataaaaaagtcagtgaactgaagcaggcgaccgccaccattactgacatgcagcagcgccagcgtgatgctgatgcactcgatgctaaatacacgaaggagttagctgatgcgaaagctgaaaatgatgctcttcggcgcaagcttgataatggtggcagggtgctcgtcaaaggaaaatgccctgtgccatcctcagccgaaacctccagcgcctccggcatgggcaatgatgccaccgtcgaactctctccagttgctggacgaaacgttctcggtatccgggacggaattatccgcgaccaaacagcactgagaacgcttcaggaatacatcgtgacgcaatgcctgaaataa

SEQ ID NO: 376412 - DNA, 204 bp, Salmonella enterica
atgacacacactatcaaaaccattccagacatgctcatagagacatatggaaaccagacagaagtcgctcggcgcttatcgtgccaccgcaacacagtcaggcgttatctgtacgacaaagaagccaggcatcacgccatcgttaacggcgttttaatgattcatcagggcgggagaggtatttatgaccgtaaccagcattaa

SEQ ID NO: 376413 - DNA, 570 bp, Salmonella enterica
atgagcgaatgcattatctggaaaggttgtgtgaagaatggatatggatggagaacatggagaagacaaacaacaacggcgcataggattgaatactgcattgcaaaaggtatcgctctggcagatatcgaaggaatgattatcaggcatcaatgtgacaaccccttatgtatcaatcctgatcaccttgtcgtcggaactcaacagcaaaacgttaatgacatgtatgagcggcatagggagtgtagaaaaatacccttagaaatcatttcagcgattaaaaatgagtacgttaaagggtcttcaactcacggttctcctgcgcttgcaaagaaatatggggttagccagccacatgtaagccagatcattaatgggacggcgctgtcaggctcctctatatcggattatgtctcggcattcggagacagaaaaatgatatctgaatgggcgaaagacgagagatgcacagtcacagccaaaaccattctaaggcgaattctttcaggcattccgcctgaacaagctatttcctccaaaagaagaccagatatccgggaggccgcatga

SEQ ID NO: 376414 - DNA, 291 bp, Salmonella enterica
atggctaacctacgcaaagaagcgcgcggcagagaatgccaggtacgtatttacggcgtatgcaatggcaaccctgaaactacagttctggcacattaccggatggctggaatttgcggaactggaatgaagcctgacgacctgatcggcgcatgggcttgtagcgcgtgtcacgatgaaatcgaccgacgcacccataatctcgacaacaaagacgccagactttaccacctcgaaggcgtgatcaggacgcaggcgatactgctgaaggaggggaagattaagtcatga

SEQ ID NO: 376415 - DNA, 270 bp, Salmonella enterica
atgagtgatttatctgagcttatttccttcaaaaaagacagagaagaaatgcggactgaatctgtctattacgttcaacaccggaataaacgctcggtgcttgatcaggagctggttattaccggagacctgtcattcagaacatataaggccagcatggaaatgaaggatttccctaaatgtggttctgaaagagaagccgcgttaaagctggctgagtggatgcagagaatggctgctgcaattgagaattactggagtgaaccataa

SEQ ID NO: 376416 - DNA, 177 bp, Salmonella enterica
atgcttagtccatcccaataccttcaataccagaaagaaagcgtcgagcgggctttaacgtgcgctaattgcggtcagaagctgcatgtgctggaagttcacgtatgtgagcactgctgcgcagaactgatgagcgatccgaatagctcaatgtacgaggaagaagacgatgagtga

SEQ ID NO: 376417 - DNA, 342 bp, Salmonella enterica
atggattattcacagttaagtgattttgaaattaaccgaatggtaggagacataatttttaaaggcctttgggcatgtaagccggaaacgtcagggaataacaccaacaaatggtattacggaaacgctgatacaacttttgagccattaaaccatttacctgactactgcaatgatccgagtgcctcatggccgattattgagaaacacaggatttctatcttagaccagttaactgaatggtgtgtggatgcaaacggcgtaagcccaatatttgataccagacctctccgcgccgccatgattgtctttctcatgatgcaggacgccaataatgcttag

SEQ ID NO: 376418 - DNA, 438 bp, Salmonella enterica
atgaaaaaactaacctttgaaattcgatctccggcacatcagcaaaacgctattcacgcggtacagcaaattcttccagacccaaccaaaccaatcgtagtaaccattcaggaacgcaaccgtagcttagaccaaaaccgaaagctttgggcttgccttggtgacgtctcgcgtcaggttgaatggcatggtcgctggctggatgcagaaagctggaagtgtgtgtttaccgcagcattaaagcagcaggatgttgtccctaaccttgccgggaatggctttgtagtaataggccagtcaaccagcaggatgcgtgtaagcgaatttgcggagctattagagcttatacaggcattcggtacagagcgcggcgttaagtggtcagacgaagcccggttagcactggaatggaaagcgaggtttggagacgccgcatga

SEQ ID NO: 376419 - DNA, 207 bp, Salmonella enterica
atgtgtgtatatcacctgaaacaatgctacggatgcggaatgcctcttcggtttaatggattccagggtattcctgatgtgcctatgtgtagttcttgtcgggataaaggaattaagccgagatacgtttatgtttattccgccaacaagatattgccgaagtatgaatacagcacggaaataatgaggtcaaaaacaaatatctaa

SEQ ID NO: 376420 - DNA, 198 bp, Salmonella enterica
atgagtacagtagagcagttattgaatgcagacatgaaagaagcagcagccagaaaaaagcagtatatgagctcaagcaatcttcccctacttgaaaaagtggcagcttatccccgaccgaaaaaatcgcctcgcgaccgtgtacttcgcagaatactaagcatgaagcttgatgctatctttgttaattttatgtga

SEQ ID NO: 376421 - DNA, 1377 bp, Salmonella enterica
atgagacaggatatcgaagcgagcgttatcggtggcctgctgattggtggattaacaccaaccgccagtgacgttctggcaacgctggagcctgaagcattctcaattccgctttaccggaaagcttttgaagttattcgaaagcaggccagaaacaggaacctgattgatggactgatggtggccgaggagtgcggggatgaatatgcaacggcggtgatgatgactgcgcggtcatgccccagcgctgcaaacctgaaaggttatgccggaatggttgcagacagttatcaacggcgtcaggttttacagctactggatgagatgcgagagccaatcagtaacggcacgctggatgcttcaggtagagcgatggacgatcttgttaagcgtctttcagccatcaggaagccacgtgacgaggttaaacctgtgcgactgggggaaattatcaatgattacaccgacacgcttgacaggcgtctgaggaacggagaagagtccgataccctgaagaccggaatcgaagagcttgacgctatcaccggagggatgaacgcagaagaccttgtgattattgctgctcgtccaggtatgggtaaaaccgaactggcgctgaagatagccgaaggcgtggcaagtcgtgttattcctggttctggcgtccggcgcggtgtgttgattttctcgatggaaatgagcgccattcaggttgttgagagagggattgccggcgcaggaatgatgtcggtcagtgtgctgcgtaacccgtcacgtatggacgatgaaggatgggcgagagttgcaagcgggatgaagttgctggcagatctggatgtgtgggtagttgacgcatcgcgtttatctgtcgaagaaatcaggtccatttccgaacgccacaagcaggagcatcctaatctgtcactgattatggctgactatctcgggctaattgagaaaccaaaagcggaacgtaatgacctcgccatagcacatatctccggtagcctgaaagcgatggcgaaagacctgaaaactccagttatctcattaagccagctctcccgcgatgttgagaagcggccaaacaagcgcccgacaaacgcagatttgcgtgattcaggaagcattgaacaggacgcagactcaatcatcatgctctatcgggaagcggtatatgacgagaacagtagcgccgcgccatttgctgaaatcatcgtgacgaaaaaccgttttggctcgcttggtacggtttaccagcggttctgcaacggacactttgttgcatgtgaccaggacgaagccagacagatttgcacggcatcaaatgcacctgctggacgcagaaagcgatatgcacaaggggctgacgtatga

SEQ ID NO: 376422 - DNA, 291 bp, Salmonella enterica
atggagctcacaaatcacagcaaaaagatacgcgaggtggaaacagagcttcgcgcccggctcgtatcaatgggccagacaaattttgcaaagatggcgggatggtctgattcaaaagtaagccgtctgaacattcaggatatggcggtgacgttcgttcttctggagaaggtgtgggagacgagtttaatcagggaagtggcaaggcaagcagtggaagctgtgatgccgagaaataaaaaacgcccggcggcaaccgagcgttctgaccaaatacagatggatttctaa

SEQ ID NO: 376423 - DNA, 210 bp, Salmonella enterica
atgaataatattcgcaattttcgcgagcgcttcggtttaacgcaggaagatcttgcgaaagtactcggttgtacgcgtggtgcagtttgtcattacgagacaggcagaaggggaatggacatcaatctttgtcgcgcttttatcaatgcgttcaaagaatacggttacgaactaaccatagacgatctttttccaccaaaggctgcgtaa

SEQ ID NO: 376424 - DNA, 654 bp, Salmonella enterica
atgaactggtatgacatagcgaagcaaaggattgatcagcttggattgaatcaggataaagttgctgaacaccttggtgtaaccaaaggtgctgttagtcattggcttaacggaagaaggaacccatcaatacaagaaattggagcaatttttcaatatcttggagttacagacgtgaggttcaacgctgacggaacctttagcgttggagaatcaacagaacaaaagcctgttaaacctcaatttgaatacccattcttctctcacgttcaggctggaatgtttacaccagaatttcgcacattcaccgagagagatgcagaatgctggattagtacgaccaaaaaagccagtgattcatctttttggcttgaagttgaaggccactcaatgacggctccagcgggatcacgaccaagctttcctgaaggaatgctgattcttgtagacccagaagttcctgtagacccaggcgatttttgcattgcaaggttatgtggtgatgagttcacttttaagaagctcatcaaagacagcggacaagtattcctacaaccgctaaaccctcagttcccaataatgccatgtaacgaacaatgcagggttgtaggtaaggttgtagccagccaatggcctgatgagatattcgggtga

SEQ ID NO: 376425 - DNA, 1143 bp, Salmonella enterica
  misc_feature (1026)..(1035): n is a, c, g, or t
atgcggcctttttacaaaaaaaatgcaagcactcaagatagaatatatgcttgcttattaatttatatacttgatattatgcaagcacatttcacaacaaagagtgcttgcataatgtctgataaagaaagcaaagaaccaacgggaaagtccaaaggtggtgtggcaagggctaatgctctttctgcagaagaaaggtcggctattgcaagaaaagccgcagcagctaggtggggtggcgatggtgaggtggaaattgccaaaagatctggcgacattgtcattggagacttaaagatacaatgtgccgtgcttgaggatgggacgagggttctgtcagagagagctatcactaaagccttcggcgggaagcgtggaggctcccactggaagagaatgaaagagaatccagatggcgcctatcttcctgttttcttgtcagctaaaaacattaagccattcattaataatgaattatcagaaggcctatcccggcgccgtcttttcaaaataaataaaggagcggcgccagcttacggcattgaagcatctttgctcccaaagatatgcaatgtttatttgaagatgagagatcagggtgatgcccttcagtcatctcagatacctatttctgttcaggcagacattatcatgcgcggtcttgcagaggttggtattgtagcgctggtagacgaagctactgggcatatcgatgaaaagagacaagatgaatatcgaattctctttcaagagttcatcaaagagcaggtcagagaatatgagaaggaatttccgaagcagttcacggatggcctttatcgactttacggacttacgcagaaaaaagcaggtcggcaccctcagtttttcggtaagtttacgaggaagtatatctacgaaccattagcatcaagtaaaggcgccatccttgagatgctagatgaaaaaaaccctgtcgtttatgcgaatggcggtagaagatataagatgtttcagttcctaaccgatagcatcggagttccgatnnnnnnnnnngttggcatcctttcaagctcaagaaataaagctgagtttgacagagcattcaaaagagcctttccatcgcccgggactcaatttgagttgctagatgaagatgagtaa

SEQ ID NO: 376426 - DNA, 204 bp, Salmonella enterica
gtgaaaagtgaggatgagttctttgcggagcttcacccgcaggtggttgaggttctcggtactgcgctgatgcaggtactggtagagcagcgcgaaccttcgcgtgaagctttgatagaaatgattcaggtactgtggcaggaagaggatgtggacttggctgtagaactggctattgatgttctgacgctgccgaaagagtag

SEQ ID NO: 376427 - DNA, 384 bp, Salmonella enterica
atgacacgcagaacacagttcaaaggcacttcacgtgctcgtcgtcgtgagcgtttaaaggcaaaggcattagctaatggcgttctggctcgcgaagaggcaataacttcagaagtattgcaccgccccacccttagccgggcccagattcaggccaaaggaaaacacgaaacgccaaaacgcattgaagacgcaaaatcacttcagttcatggcgaaagatgcattctggcaactggaagaatacagacgcaatctggagcgggcagccattgtgtacgcaaatgagtttggacataagccaccagaaaccggtgtatgtttgccagacgtagcactttacgcggctggtcatcgtaagagcaaacaaataacagcgaggtaa

SEQ ID NO: 376428 - DNA, 579 bp, Salmonella enterica
atgaacaactcatggtggcaggaactaatgcattttttcctgcaaggaatgacacttaaacagttgattcatatgctcatcatcctgattttactgattgtcgttatgccggtaagcgtgaaagaatgggtaaacctgcataatccagaaatccttcctcagtactggatgtattacatcctgctgttctgtgttagctatgtgctgaatggtgttgttaattctgtttatcatgccgtgaatgaaagaattgaggcatcaactgctcagcagcgtaaggccagagaagaaaaagtcgtccgggatctgtttgattcgttaactcctggcgaaagagcgtatttggctttcgccgtagccgccaataatcagctaaagacggaaaaaggaagccctgaatcaatttctttgctcgaaaaaggacttatcactcgcttgccttctgttattggatatcctgatattgaccgttttgttatcccggaaaagtattttaatgagtgctacatgagatttgccgggaagtcagacattcttatgaatgaacttattgcacaggacgaacagctcaaaaaataa

SEQ ID NO: 376429 - DNA, 366 bp, Salmonella enterica
atggaagaacaagcaaacaagattctcgtagaactactgcaaaaagccagcaatggaatagacgcggctgtttcatttagccaggcacagattcctgatgtcatccatcagcttttgatgtggcacgccgtatcatcagctggaattcaggctatctgtgtattggtgattatagcgtgtgtttatctgatgatttttgcatggaataaaggagatgatgcagatattgttcttttatcactacttgtcacatcaggaatagcgattacttctattgttgttttcttcaattatttcgactggctgaaaatttggcttgctccaaaactttaccttatcgaatatgcagcatcattggttaagtaa

SEQ ID NO: 376430 - DNA, 171 bp, Salmonella enterica
atgcagcagttcgctattgcaggggcggcatcggttcgccctttcaacccgattttatcggtacagcattcacgaaaaaacattttaaccggagcagactttaaacaaccaagaatgaaaagtttgctcgaaaagctttgggatattttgaaacaacaaggccgtccatga

SEQ ID NO: 376431 - DNA, 183 bp, Salmonella enterica
atgagttttacagataactggtcagacgaaactttcattcgcctgatgaacgaaatgcttagtcagcacaaagaacaggagaaaggtaatgataccagtggatttagcaaggacaccggagttgagcaggttaaaacgtcagtatcacctggcagaagcaatatactggcgcaagtcaggtaa

SEQ ID NO: 376432 - DNA, 285 bp, Salmonella enterica
atgagaaggttaaatataactccagcggagatggaatcagtttgcggccgcatggtagcttgccgtgcagcagaacatctgggcctaaacataaatcagttttattacatagcaaaaaaactgtcattaaaaacggcattcgttaagccaagatggagcgaaaacgaagacaaaaaaatgcaggcgcttatctcatcaggctatacacaaagaaatgtagcaaaaattctcggacgaagtgaagagtcggtaaaaagcaggctatcacgtttacgaaagaaataa

SEQ ID NO: 376433 - DNA, 288 bp, Salmonella enterica
atgaagctaaacatcgacctcggtaaatacgttattaccggaaccaagcacgaccttattctaaacgagaagaggaaagttaccgatgaaaaaagcaaaaatttcggcaatgaagttcttgtacgttgcggttactacagcaagtttgagcatctggttaaagagttatgccatcgcgaaattctggcgtcagaagcacaatcatttcaggagctacagaagcatattgaaagtcttggtctgacattaagcaaggctgttaatagctttgtaggggagaatgcctga

SEQ ID NO: 376434 - DNA, 189 bp, Salmonella enterica
atgaaaatgggtgaacatatggaaccagttattgagctgcttgaagaattgaacggtaacgatgcagacgcgaagttaaaacttcttgcgctggttatatctgaatacatgcttaatgcggatgtcaccggttttgaagtttctgccggaagaatgaaagtggccgttgatatcagcgttgaggactaa

SEQ ID NO: 376435 - DNA, 669 bp, Salmonella enterica
atgaccactattaccaaagaacgtattgaattgttcgttaaatcaccgcttgaaaacgggcttacccgtggcgaacaaatggagctggcgcgtatcgcgttggtatcgcttaccgctgagcctgtagcgtggatgtgtgaagacgaagaagggcgagaatataacagcagcaatgagttttcctgcggtcgctttggagttccgctctacgcctccccgccagcgccggtagtgccggaagatatcagtggcatcattgagcgtttccagtaccaggcagaccatctaagtgactggcgccacatcgatgagcattcttgcaaggtcaacaggcgcgacctaatgacagcgctggaatttatggattcctgccgcgccgccatgcttcagggaaaattccgcgatttatcacaaccagtagacccgcaggttgcagattacgagaaaactatgcttcaggctggcaactctccggtaactccgggtggttggataagctgtagtgagcgaatgcctgctcaagatgattgggttttaatttattcaaagtacggcgagtatttggcaggacaggtgcaaggggaatacgtggagttgaacgatggcactctatcgtggttaggggctgccttgcactggatgccactaccagaaccgccgcagcaataa

SEQ ID NO: 376436 - DNA, 351 bp, Salmonella enterica
atgtctgatttagcaatgaaggtattgaggtggcaaacgaaaggccacgttggaataagtagcgcaactatggcttctattgctcttgggctggaaaagaacttctaccacggacggtttgacgcaccaagagaccctgccgatttgcgaagatgcatgatgctcgtagatgaaatacctgaaattaaagatagctttccgctcatagcgaaaaaggtaaagcggttttctccgattttacgtgagtgggattcacttattgctctgcttaagcttgagcttaagaggccagataagcgagcaccaaaaacatataaatggatagaagagcttctttctgaccaggagtaa

SEQ ID NO: 376437 - DNA, 231 bp, Salmonella enterica
atggcacaaattagctctgaagtaaacgttactactcctctttcaaactatcaggaaatcttaaaaaaagccgtagatgagggaaaggcagcagccgccgttctgttttcctctcgtctggataagctggccacccatgcgaccaccgaggggcttaatgctgctgaaataattgaactgttgcgcgaagaatcggtgatttttggtaagggcggtgccgcatggcagtaa

SEQ ID NO: 376438 - DNA, 462 bp, Salmonella enterica
atgagtaaccagccagcaactgacctgatatttcaggccacctactgctattacctcgaagtgatgaccgaaacattcaaccggcgcactgataacctgatgaattttttgcttatccttactggaggacttactagcgtcggcgttcagttcggctggctgtgcggtattctcgctgttattttttctgcctaccgggtggcatataaacccgccgataaagcagcctgcgcagatgcccaaaaaaagcgatactcccggttgcttagtgatatccatgcagcaagtgatgctgaaatcgccagacgtctggatgaactcgaagaattcgacagtaacgccccgacttccctctacaaccccgcaagaaacagagcatctatcgagcttcgccgcgacattgaaccactgacgaagtttgaaaaactcatggccttgctggcgggtggtattcctaagtaa

SEQ ID NO: 376439 - DNA, 582 bp, Salmonella enterica
atggcgagatttagactagacccagaatcggatagcgccccggtacttgatcgggtgcttgaggcttacggctttacgcaaaaattacaacttgccgaacatcttggaattgcttccagctcaatgtctgcgcgttataaacgcggtgggctacctgctgacataatgctcaaatgcatggctgaaacaggcgtaacacttgaatggctggcaacaggtcaaggtagaaaatttgaggatgaagaagtggatatcctcaaaatgccgcggcgtaaaatcgttgacggtctgatgtatgacgctgggatgtacatgctggataaagtctcttttttacccggagtccctttgccaacctctcccgtatgtgtggtggaaggtaataatcagttcatcgttgatacctcattcatagaagtttatgacgatcagtggcttgtagaaattgagggtaaaatgagtatccgtacccttacgcgtattccgattaagaaagttagagttagtggcgttggtatggcttttgattgtggtatcgacgacataaccgtgattgggcgcgtagttctgacgattaaataa

SEQ ID NO: 376440 - DNA, 1800 bp, Salmonella enterica
atgaataaaaccaatttggaaatttacttagattattatataggattagatgctccggggtttgctgttttggttactggggaatggggttcaggaaaaactttccaagttatgaatgcaataccatctaatttacaatgccatgttagtttattcgggatcgttgattctcaagaagtatatagtacagttttctctaaaatgtttcccggaaagaattttgccaagaaacttatagaaatgacaaaagatatatctggtgaaatagatggattaacatttggggctggttcattagctggaaacatccttagcccgctaataaaacttacagtagaccggaacaaaataataatctttgatgaccttgaacgctgtccaatgtcaaacaaagaaatatttggtgtcataaatcaatacattgaacaccaccaatgcaaggtggtcatattagcgcatgacaaagaagcacataacgagttcatcaaaaccaaagaaaaaataattggccatactatacagctcgagcctcaaattgatgatgcagcatcttgttttttcaaaaaaaactacagattaaacaattttaaagaaataaaaccaataattattggtgcctttaaaaaaacaaattgcaaatcactaaggatattaaaatatgtgattaatgattgcaataggttgcttgaatgtcttgaaccgatacacataaaaaacacagcagccatgatgacactatttaactttttttgcattgttaacattgagcataggatgggaaatataactgcagaggatatagcagaaattcctgaaaaatatatccaatatgcaattattatgaatgctgaacaaaaaaaaggaaaagaatttgatgaacacacaagaaatagattggcgttttataaaaaatacaatgaattagatttaagaagcaacattatcgattatgaacttacagcaaacatcgtcaaaactggtgactacccaagaaatgaaatcacaaaatctttaagtgtatcaaaatacttcattcagaaatttgacaatccaccatggctaacaataataaattttgacaatcaagaaaacaatattatcagagccgccattgatgaaatgtttgataaatttagaatgttggcaataacagacattggggatatactacatagtttctgtttgtcgtatcttctttcagaaaacggtgaaatcagaaaaaattatgatgaactactcgaatttcaaaagaattatatcgatagacttttggaaaatgacttacttctgccggaaccattaactccagaaccgtttagccatgacatataccaacgttcacattcacatacgtactgggttaatgaatcttataaaagttattttcgtgacattatcgaacacattataaaaagcagaaagatagctaaacaaaaaaaatatccactctatgcaaaagaaattattgaagcattagatactaacttagataattttaaaaaattattaattggaacccatacagaagcaggattatattctaatttggatattatgaatgcgattgacccagatgatttcataattcactggcttactctccctgttgaattttggggcaaagttcaatcaattttaaatgctcgttatactggagttgctcgcaatgtacttgttaatgaaaagcaatggttgcaaaaggtcactcttaaccttctttttgaagcgagattacatgagggtttagacaggatcaggatagaaaggcttgtcccctatcacgctctaaagtctttatga

SEQ ID NO: 376441 - DNA, 570 bp, Salmonella enterica
  misc_feature (541)..(550): n is a, c, g, or t
atgaatagaagacaaagcgatcatctcatgatgataattatttctttgacgatcttaattattatccttacctactttatagaaattaattcagtggttcatggtcagggcgttatcactactaaagataatgctcagttaatatctctttctaaaggagggacgatacaagatatttatgtagccgagggtgatactgtaaaaaaaggagaactccttgcaaaggtcgttaaccttgatctgcaaaaagaatatcaaaggtatagaactcaaaaagggtatctggataaagatgttaacgaaatatctttcattcttgataaagaaaatgagagtgggttgattaccctggatggcacccgttctttaagcaataaagaggtaaaagcgaatattgaattagtgcatagtcagataagagctaaagagttaaaaaaaacctctcttgattctgagattagcggattacaagagaagctgagttcgaaagaaaaagaactcgcattgcttgccgaagaaataaatattctttccccactgnnnnnnnnnnctggtaaaaaaaggaattag

SEQ ID NO: 376442 - DNA, 1353 bp, Salmonella enterica
atgattgcgaattcaggggagagggaagaattggaacaatttgaggtcagaactattagtgagctggaagctgtaattgcacagtttggtgacaatgtattatttcgaggtcaaaattctctctatggtaagcaggaggtgccatccgtacttgcttcttttgatcgcgatgaatgtaacaagtcaacgatgataaagtggattagctatgctgcaagtgtgcttgagggagtaattggtagccatgcaaacgatctggaatatgtacaggcactgttacaacactatggatggagatcattctatgttgactgtaccactaaccctgcagttgccgcttggtttgcgagtcataaatgttcactgtcaataaaaccatctccaccgccaaagatagacatgtgcgaagactgtaatgaaaaccccatatggctgataaaaaaagcggtaaggtattattatgaagatggagatggatatctctacattctagataaatcactagcatctcgtcttggtttggttgatctttctgatattgaaattaagggtttccgacccagaatgcaggcccaagatgcttggttactagggccgctatatggagagccagttccagaaaattgctttattgcacagataaaagctagtcggtcacttttaaaacaatatgccgtattgaatgcaatcactgatacaaattccttattcccgtcagttacggaggatcctatcctcaaggagttattagacttaccttggcgggaagttgaacaattaagggattcaaatatagatattcctgtattcaagcggtcacttgaattacctgaatatcatgatagttatgtgaaaaacgtttctcctagtattgctttctatcgtggtgggaaaatagctgagctatttgactctattgaaacgatgagaggcgaattaacaggcggcgttacaataagttcacccagcataattctctttggtacagataatgacaattctccattgcgcttgccaaagatagagcggcttcttaaaggaaaaaattacgtcgcttttgagatagatgaactaataaaacatgtcaataaagactttcaggccgtgtatcagaagggaattggaatcatatgccatgagactgacctgattgaagtatgtgaattagttgtcgttcacccagggatgtatatgcagaacgcaggttttcgtcctggatggttctaccgaaaaaatagcgatggtgtatgggtgcgagaaccatgtgagaatgaatgcggatgcgggaacgacatgatccatgaaaagcacatttcagcgcttcgaattgccgagtattgcctccgtccataa

SEQ ID NO: 376443 - DNA, 444 bp, Salmonella enterica
atgcgggcttttttgtacccattcccagaccgtatcagacgcattttcagcgtcgttaatatctgcccccgttcatccattacctcatttgtttcagtggcacagcaagccgctgcggctgtctgttggcgacgaaataacggcggaagtgacgaaaacggcgctacaccgcacccgcctgcggttttcgtgttgaaaatgatttcagtttttccggtggtacaaaacacatcgccagaccgcgccagcgctggggctttggcagtagttcgccaactgaaatgtgtgaaacagatttcgaagatttcagtttttgtgcgattgccggctgtggatgaaaaatatcggagcctgattacatgcgggaacaacagcgattacgtgactttttacgtaacggtcgcagcgagatcaggtcagtgcgtggaagtgtccaggccttaa

SEQ ID NO: 376444 - DNA, 351 bp, Salmonella enterica; identical to SEQ ID NO: 376268

SEQ ID NO: 376445 - DNA, 495 bp, Salmonella enterica
atggctggaacggcggggcgttccgggcgtcgccccaagccaacggcgcgcaaggcgctggccggaaaccccggcaagcgagccctgaacaaagatgaacctgtttttacgcccatcaaaggtgttgagccaccggagtggttcgctgaagaagatctccctctcgccacgatcatgtggcaactgacaaccaaagaactctgcggtcagggcctgctgtgcgtgactgacctggcggtacttgagcggtggtgcgtggcctatgagttctggcgacgtgccgtgaaaaatattgccatacagggcaacaccatcaccggtgcaatgggcggcatggtcaaaaatccggagctgaccgccaaaaaagaacaggagtccgagatgagcagcacgggtgcaatgctcggactcgaccccagcagccgccagcgtctgattggcctggcggggcagaagaaagccactaacccgtttctgaaaatcatcgagtcatga

SEQ ID NO: 376446 - DNA, 201 bp, Salmonella enterica
atgatcctgaaacaagatctcaaatggtcgccagacggtctgcgtgttgaaatcattcgtgccggtgaacacgacgacaggatactcccggcccgggcgcaggagattgcgcttcagaccgggttagcagagtgcgaaaccagtgcaaaaagcaataaagcggtgaaagagaaaaaatccacgaccagtcaagagggctga

SEQ ID NO: 376447 - DNA, 138 bp, Salmonella enterica; identical to SEQ ID NO: 376282

SEQ ID NO: 376448 - DNA, 834 bp, Salmonella enterica
atggaaaagagtcttttagttattgtccgacataaacctgggcgtactcgtctattaatgcgggccttgcaatccattaatgaccagacgttcaaaaaaataaatatcatcattttctgcatggaggaagaattgaaatgtcacaatgtggatgatttttatctgaaagaactgtcaaatatatatagtgttatctacgacgaaagctgtatctttaatgctattaagatgtctgaatctaattatttatgctttatggatgatgacgattcttgggcccctgaatatgtgtcaaggctactcagtgttttggcgaatatacagtcaacgtattcatctgtaaatgcaatagcatgccatacaaataaagttgctgagattgcggaaaataatagaataattataaattcaacgcaaccatggaaccactatttaaatgctggccctgttagttttgatgttatttattacaggaattctattccactttcctcgtgtttattcgataaaaattctgttatcgatatgattgaaagtcataaattatcctctcctgcatttttctggcctttttttattcattaccttgcagaaaatgatgtttggatcttacctgaagcactggcattttatcatttcagagaaaatgatgactttgaatttggcaattataccgtaattaacaatgagttatttgatatagaatgcaaaattgcagaaaataaaatgatgagaagtattgatgactcatcattgctcaatgtgttactttcaaatattgctaacaatagtctttttcataaaatttcttatattgaaaataagattaaataa

SEQ ID NO: 376449 - DNA, 1545 bp, Salmonella enterica
ttgaaaaaattaaagattaattatctgttcatcggcatattgacgctgctgctggcagcagccctttggccctcaatcccctggttcggtaaaaccgaaaaccatatcgccgcgattcaagcccggggggtactgcgcgtcagtacgatcgactcgccattaacctattccgttatcaacggtaaaaaatatggtctggactatgaactggcgcagcagttcgccaactatctcagcgtgaagctgaaagtgacggtgcgccagaatatcagccagttgtttgacgatctggataacggcaatgccgacctgctcgcggctgggctggtctacgacagcgcacgcgttaaaaactatcagcccggccccatgtattattcagtttcgcaacagctcgtctaccgggtcggacaatatcgcccacgttcgctggcgaccgttaacgagaatcagcttaccattgcgccagggcacgtcgtggtcaatgatttacagcgtttaaaagagacaaagtttcccgacctgagctggaaagtggatgataaaaaaggctcgacgacgctgctggaagaggtcatcagcggcaaactggattacaccattgccgattcagtggcgatcagtctgtttcagcgcgttcatcccgagctggccgtggcgctggatgtcacggatgaacagcccgtgacctggtttagccgactggacgacgataatacgctctccgccgcgctgctcgattttttcaattcgatcaatgaagacggttctctggcgcggatcgaagagaaatatctgggacatggcgatgatttcgactacgttgatacccgctctttcctgcgagcggtagataacgtcctgccggagctggaaccgttatttaaaaaatatgccaaagagatagactggcgcctgctggcggcgatttcttatcaggaatcacactgggacccgctggcgacctcgccaaccggcgtgcgcggcctgatgatgctgactaaaaataccgcccaaagtctggggctgaccgaccgtaccgatgcggagcaaagcatcagcggcggcgctcgctatcttgaagatatgatggctaaagttcccgaaaccgttccggaagacgagcgtatctggtttgctttagccgcctacaatatgggttatgcgcacatgctcgatgccagatcgttgacggtaaaaaccaaaggcaatccggatagctggaccgatgtgaagcagcgtttgcctctgttaagccaaaaaccgtattacagtaagctaacctacggttacgcgcgtggacatgaggcttatgcttatgtggaaaatatccgtaaataccagataagtttggtggggtatttgcaggaaaaagaaaagcaggaagcggaagctatgaaactggcgcaggattacccggcggtgtcgccggaggagctgaataaagcccccttccccttcctgtcgtttttatcgcagtcatcaggctacctgacgcattcgccgtctttactgtttacgccgcagaagaaagaagaaaaatag

SEQ ID NO: 376450 - DNA, 648 bp, Salmonella enterica; identical to SEQ ID NO: 375750

SEQ ID NO: 376451 - DNA, 540 bp, Salmonella enterica; identical to SEQ ID NO: 19206

SEQ ID NO: 376452 - DNA, 543 bp, Salmonella enterica; identical to SEQ ID NO: 376335

SEQ ID NO: 376453 - DNA, 234 bp, Salmonella enterica
atgagaattgaacttgttatcagccgggcaaaacagcttccggaaggtgccgttcctgcgcttgaaaaagaattaattacccgtctccagaatcagtatgaaaactgcaacttaaccatccgtcgaggcagtcaggatggtctgagtatcgtcggtgctgctgatggcgataaaaaacgtatacagagcattctgcaggaaacgtgggaaagcgctgacgactggttttattaa

SEQ ID NO: 376454 - DNA, 144 bp, Salmonella enterica; identical to SEQ ID NO: 376341

SEQ ID NO: 376455 - DNA, 2886 bp, Salmonella enterica
atgagtggaactaatcctgtatttttagtccgcaaagcaaagaaatcatcaggccagaaagacgctgtactctggtgcagtgatgattttgaagcggcaaatgcaacactggattatcttctgattaaatccggtgcgaagctgaaagattatttcaaagctgtcgctactaatttccctgtcgttaacgagctgccgccggaaggcgaactgagcctcactttctgcgattactatcaactcgctaaagacaatatgacctggacgcaaatccccggcgtcaccctgccatcatctgaagccgccgccgcggcgcgccagcatatcgtcgatggtgttgataccgaaacaggcgaagtgctggaagaccacaccgaaaattttggtaacgaaagcaacagccctgcccaggcaacagccccagcccccgagctgactgttgtcgcaactatgcctctccgtcaccgcgttcttgctcagtacataggtgaaggtgagtatctttatcacgtcgacgcctcccagaaaaaagaaattctgcgtctcgaaatggacaccgataattcatatgtccagaacctgctgcttgccgccgagaatgttgaagcgttcaagaaagccattgaacatgacattcacaaaatagtgaatgccgttaaaaaaatattccctgtcgatggaaaaactcctgaactggcgactgttatccagttccttaaaacatggttcgagacggagcatatcgatcgcggtttgctcgttaaggagtgggcgaaaggcaaccgtgtatcggctattcaacgcactgaaagcggcgccaacgctggcggtggcaataagactgaccgtaaccctgattacgaacatactctcgatactctggacgtagagattgcaatggccactttgcctatggactttaatatctatgagctacctggcagcgtttaccgtcgcgcaaaagaaatcgtaaagaaaaaggaaagtccgttcaaagaatggtccgcagcacttcgcgcaacgcccggtatcctggattattcccgcgccgctattttcgcgctgatccgaagcgcgcaccctgagttttatcactaccccggacgccttcaggggtatatcaacgccaacttaacggagactgatcacgagaaccccaccgaggaagctctcacggctgcccgacacactccggaaaaagacgcggtagaagaagccaaccgacagcttgccgccgcgcgcggtgaatatgtggaaggcatcagcgacccgaacgacccaaaatgggtgaaaaccgggacaagccagccgaccaccgaacctgaactggttaaaaatgttggcaacggtattttcgacgtgtccgctttaatgcagaactcatcaactcatggcacagaaacgaatccggagaccaccagcaatgtgcaggttcaaaaagctgacagtgatgaaaaacaggctggtgatgcggtgcaggcaggcgaagacgatctgggtactggtaaagaagcagttaccgtagagaaccagaatcaggctgaggcgcaacaaaacgtaccggaatcgcaacaagaagagccagaagcagcctggccggaatacttcgagccgggccgctatgaaggtgtaccaaacgaggtttaccacgccgccaacgggatcagctcaactcaggtgaaagatgctcgcgtgtcgctgatgtactttaacgcgcgtcacgtagagaagactatcgtcaaagagcgctctccagtgcttgatatgggcaacctggtacatgctctggctctacagccggaaaacctcgaagcggagttcagcgtagagccggagatccctgagggtgctttcaccaccaccgccaccctgcgcgagttcatcgacgcgcacaacgccagcctgccagcgctgctgagtgctgacgatatcaaagcgctgctggaagagtacaacgccaccctgccgtcgcagatgccgcttggagcttcggtagatgaaacctatgcatcgtatgagcagcttcccgaagaattccagcgcattgaaaacggcaccaaacatacagccacggcgatgaaagcctgcatcaaagagtacaacgtcaccctgcccgcgccggttaaaaccagcggcagccgtgacgcgctgctggagcaactggcaataatcaaccctgacctggtcgctcaggaagcgcaaaaatcgtcgccgttgaaagtctctggcacgaaggccgatctgattcaggccgtgaaatcagtcaacccggcagtggtattcgccgacgaattgctggatgcgtggcgggagaacaccgaagggaaagtgctggtcacccgccaacagctcagcaccgcgctgaacattcagaaagccctgctggagcacccgaccgccggcaaattgctgactcacccaagccgcgctgtcgaggttagctattttgggattgatgaggaaaccgggttggaagttcgggtacgccctgaccttgagctcgatatgggcggcctgcgcattggcgccgacctgaaaactatcagcatgtggaacatcaagcaggaaggcctgcgtgcgaagttgcaccgggaaatcatcgatcgggactatcacctgagcgcggccatgtactgcgaaactgcggcgctggaccagtttttctggattttcgtcaacaaagacgagaactaccactgggtcgccatcattgaggcgtctaccgagttgctggaacttggcatgctggaataccgcaaaacaatgcgagagatagcaaacggcttcgacactggtgaatggtcagcgcctatcacagaagactacaccgacgaactgaacgattttgatgtgcgccgccttgaagcgttgcgcgtacaggcataa

SEQ ID NO: 376456 - DNA, 1110 bp, Salmonella enterica
atggaaaacacaaatattgttaccactgagcagcaggcaccaaacaccatttctgccagtaacgcaatttttaacgttcaggcactgggtcagttaacagctttcgctaacctgatggcagactcacaggtgacggtaccggcacaccttgcagggaaaccagccgactgtatggctatcgtcatgcaggctatgcaatggggcatgaacccttacgctgtggctcagaaaacacacctggttaacggtgttcttggttacgaggcacaactggtcaacgcagtaatcgcaagctccagtgccattcatggccgttttcattaccgctatgggggtgactgggagcgctgcaccaggacacaggaaatcacacgcgataaaaacggtaaaaatgggaagtacaccgtcactgagcgcgttcgtggctggacggatgaggacgagatcggcctgttcgttcaggttggtgccattctgcgaggtgaatctgaaatcacctggggagaacctctttacctctccggcgttgttacccgcaattctccgctatgggtttcaaaccctaaacagcaaattgcctatctgggcgttaaatattgggctcgcctgtactgcccggaagtgatcctcggcgtgtacagccctgatgaggttgagcaacgagaagaacgcgagattaaccctgctccagtccagcgcatgagcgtacaggaaatcaccagcgaggttagcaccaggaccagcgcgcaggagtcggcagctaacgttgatgctgttgccgacgatcttcgcgaacgcattgatacagcaagttccgttgatcaggcaaaagcaatccgtgcggatatcgaatcacagaaagcgttgctgggtactgcgctgttcaccgaattaaaaaacaaagcagtgaagcgctattaccaggtcgatgcacagaacaaagtcgaggcagtgatcaactcaattccaaaccctggcgaaccggaagccgcagagatgtttgctaaagctgaaagcacgcttggcgctgctaaacgccatcttggcgacgaactgcacgataagtaccgcgtcaccctggacgatatgaaaccggaatacatcggctaa

SEQ ID NO: 376457 - DNA, 240 bp, Salmonella enterica; identical to SEQ ID NO: 373927

SEQ ID NO: 376458 - DNA, 240 bp, Salmonella enterica; identical to SEQ ID NO: 373927

SEQ ID NO: 376459 - DNA, 1110 bp, Salmonella enterica; identical to SEQ ID NO: 376456

SEQ ID NO: 376460 - DNA, 1209 bp, Salmonella enterica
gtgaaagatgctcgcgtgtcgctgatgtactttaacgcgcgtcacgtagagaaaactatcgtcaaagagcgctctccagtgcttgatatgggcaacctggtacatgttctggctctacagccggaaaacctcgaagcggagttcagcgtagagccggagatccctgagggtgctttcaccaccaccgccaccctgcgcgagttcatcgacgcgcacaacgccagcctgccagcgctgctgagtgctgacgatatcaaagcgctgctggaagagtacaacgccaccctgccgtcgcagatgccgcttggagcttcggtagatgaaacctatgcatcgtatgagcagcttcccgaagaattccagcgcattgaaaacggcaccaaacatacagccacggcgatgaaagcctgcatcaaagagtacaacgtcaccctgcccgcgccggttaaaaccagcggcagccgtgacgcgctgctggagcaactggcaataatcaaccctgacctggtcgctcaggaagcgcaaaaatcgtcgccgttgaaagtctctggcacgaaggccgatctgattcaggccgtgaaatcagtcaacccggcagtggtattcgccgacgaattgctggatgcgtggcgggagaacaccgaagggaaagtgctggtcacccgccaacagctcagcaccgcgctgaacattcagaaagccctgctggagcacccgaccgccggcaaattgctgactcacccaagccgcgctgtcgaggttagctattttgggattgatgaggaaaccgggttggaagttcgggtacgccctgaccttgagctcgatatgggcggcctgcgcattggcgccgacctgaaaactatcagcatgtggaacatcaagcaggaaggcctgcgtgcgaagttgcaccgggaaatcatcgatcgggactatcacctgagcgcggccatgtactgcgaaactgcggcgctggaccagtttttctggattttcgtcaacaaagacgagaactaccactgggtcgccatcattgaggcgtctaccgagttgctggaacttggcatgctggaataccgcaaaacaatgcgagagatagcaaacggcttcgacactggtgaatggtcagcgcctatcacagaagactacaccgacgaactgaacgattttgatgtgcgccgccttgaagcgttgcgcgtacaggcataa

SEQ ID NO: 376461 - DNA, 2166 bp, Salmonella enterica
gtgatcaacagatttgaactgctcaggacgctcgcgtatgccggatgggaggaaagcattcattccggccagcacggggaaaattacttctgtattctggatgaagacagtcaggagatattgtcagtcacccttgatgatgccgggaactataccgtaaattgccaggggtacagtgaaacacatcgcctcaccctggacacagcacagggtgaggagggcacaggacacgcggaaggggcatccgggacattcaggacatccttcctccctgccacaacggctccacagacgccagcagagtatgatgctgtctggtcagcgtggagaagggctgcaccagcagaagagtcacgcggccgtgcagcagtggtacagaaaatgcgtgcctgcctgaataatggcaatgcagtgcttaacgtgggagaatcaggtcttaccaccttgccagactgtttacccgcgcatattaccacactggttattcctgataataatctgaccagcctgccggcgctgccgccagaactgcggacgctggaggtctctggtaaccagctgactagcctgccggtgctgccgccaggactactggaactgtcgatctttagtaacccgctgacccacctgccggcgctgccgtcaggactatgtaagctgtggatctttggtaatcaactgaccagcctgccggtgttgccgccagggctacaggagctgtcggtatctgataaccaactggccagcctgccggcgctgccgtcagaattatgtaagctgtgggcctataataaccagctgaccagcctgccgatgttgccgtcagggctacaggagctgtcggtatctgataaccaactggccagcctgccgacgctgccgtcagaattatataagctgtgggcctataataatcggctgaccagcctgccggcgttgccgtcaggactgaaggagctgattgtatctggtaaccggctgaccagtctgccggtgctgccgtcagaactgaaggagctgatggtatctggtaaccggctgaccagcctgccgatgctgccgtcaggactactgtcgctgtcggtctatcgtaaccagctgacccgcctgccggaaagtctcattcatctgtcttcagagacaaccgtaaatctggaagggaacccactgtctgaacgtactttgcaggcgctgcgggagatcaccagcgcgcctggctattcaggccccataatacgattcgatatggcgggagcctccgccccccgggaaactcgggcactgcacctggcggccgctgactggctggtgcctgcccgggagggggaaccggctcctgcagacagatggcatatgttcggacaggaagataacgccgacgcattcagcctcttcctggacagactgagtgagacggaaaacttcataaaggacgcggggtttaaggcacagatatcgtcctggctggcacaactggctgaagatgaggcgttaagagcaaacacctttgctatggcaacagaggcaacctcaagctgcgaggaccgggtcacattttttttgcaccagatgaagaacgtacagctggtacataatgcagaaaaagggcaatacgataacgatctcgcggcgctggttgccacggggcgtgagatgttccgtctgggaaaactggaacagattgcccgggaaaaggtcagaacgctggctctcgttgatgaaattgaggtctggctggcgtatcagaataagctgaagaaatcactcgggctgaccagcgtgacgtcagaaatgcgtttctttgacgtatccggcgtgacggttacagaccttcaggacgcggagcttcaggtgaaagccgctgaaaaaagcgagttcagggagtggatactgcagtgggggccgttacacagagtgctggagcgcaaagcgccggaacgcgttaacgcgcttcgtgaaaagcaaatatcggattatgaggaaacgtaccggatgctgtctgacacagagctgagaccgtctgggctggtcggtaataccgatgcagagcgcactatcggagcaagagcgatggagagcgcgaaaaagacatttttggatggcctgcgacctcttgtggaggagatgctggggagctatctgaacgttcagtggcgtcgtaactga

SEQ ID NO: 376462 - DNA, 474 bp, Salmonella enterica
atgtcttatgacatttttctgaaaattgacggcattgacggcgagtcaatggatgacaaacacaaaaatgaaattgaagtactgagctggcgctggaatattcatcaggaatccaccatgcacgccggtagcggcctcggctccggtaaggtctccgtcaccaacctggattttgatcactatatcgaccgcgccagcccgaacctgttcaaatactgcgcctccggcaagcacattccgcaggccattctggttatgcgtaaggctggcggcaatccgctggagtacctcaagtacactttcacagatctgattattgcaatggtatcgcccagcggaagccagggaggggaaattgcgtctcgcgaatcaattgaactctccttcagcaccgtgaagcagcagaaccagcagggtggcagcggcggcaccatcaccgcaggctacgacttcaaggccaacaaagaaatttaa

SEQ ID NO: 376463 - DNA, 372 bp, Salmonella enterica
gtgaaatggttaatattagttactttcagcataagtggaatgctggtatggcagccatcctttgcacaagaagcattgaccacacaatattcacagtcggaactcttaaaaaattgggcgctgagtcattgtctggcattagtatacaaagatgatgtcgttaaaaacgatgccagagctacggccagtgcttaccttgaatatggtaaacaatctgtggagatttaccatgaaattgatgagattgcgaaaaaatattcagggttgaaatataacggttcgatatcatcagattttaataccatgaagtgcatagattttatccatgacagggaattaaatgaattaattaaaaggcgtgtcgagaagtaa

SEQ ID NO: 376464 - DNA, 486 bp, Salmonella enterica
atgaacagaccttcattcaatgaagcgtggttagcttttaggaaggtgaatcattccgtcgctgatgtgggtagcattattggtggaaacgttgggaaaaatataactggtggttattttcaaaatgcctgccctattcgaatgagctatgttttgaatgcgacagggttcccaatagcccgtaactctccgtatgcaaaggttagtggtgccgataataaattctatatttatcgcgtgaatgatatgattgattatcttactcatactatgggcaagcctgatcttattgttaataatccgaaacagagtgactttatcgggaagaaaggaattatcgtagtaaaagggcatggctggagcaatgccagaggacacgttacattatggaatggcagtatctgttcagatcagtgccacttattaaatgacccagataatggaccatttgttcctgaagttgggacactgtggatactgccgtga

SEQ ID NO: 376465 - DNA, 825 bp, Salmonella enterica; identical to SEQ ID NO: 376363

SEQ ID NO: 376466 - DNA, 1698 bp, Salmonella enterica
atgctgccgattgccgccgcgctcgatgacgtgggctacgggtcgctggagtgctggggcggcgccacctttgacgcctgtatccgctttctcggcgaagacccgtggctgcgcctgcgcgaactcaaaaaagccatgcccaaaaccccgctgcagatgttgctgcgcggccagaacctgctcggctaccgccactacgccgatgacgtggtggagcgcttcgtcgaacgcgcggtgaaaaacggcatggatgtgttccgcgtcttcgatgccatgaacgacccgcgcaatatgaaagccgcattacaggcggtgcgcagccacggcgcgcacgcccaggggaccctgagttacaccaccagcccggcgcacaccctgcagacctggctggatttaacggagcaactgctggaaaccggcgttgactcgattgccatcaaggatatgtccggcattctcacaccgatggcggcgtatgagctggtcagcgaaatcaaaaaacgttttgaggtgcgcctgcacctgcactgtcacgccaccaccgggatggcggagatggccctgctgaaggctatcgaggcgggcgtcgacggcgtggacacggcgatttcctccatgagcgccacctacggccacccggccaccgaagcgctggtggcaacgcttgccggcacggaacacgacaccgggctggatatcctgaagctggaaaatatcgccgcgtacttccgcgaggtgcgcaaaaagtatcacgcctttgaaggccagctgaagggctacgacagccgtattctggtggcccaggtaccgggcggaatgctcaccaacctcgaaagccagctgaagcagcagaacgcggcggacaaactcgaccaggtgctggcggaaatcccccgcgtgcgcgaggacctcggctttatcccgctggtgaccccaacctcgcagattgtcggcacccaggcggtgctcaacgtcctgaccggcgagcgctacaaaaccattgccaaagaaacggcgggcattctgaaaggcgaatacggccacaccccggtgccggtgaacgccgcgttacaggcccgcgtgctggaagggggcgccccggtgacctgccgtccggcggatttactcaaaccggaactggctgaactggaagcggacgtcaggcgccaggcgcaggagaaggggattactctggcgggaaacgccatcgacgacgtgctcaccgtggcgctgttcccgcaaatcggcctcaaattccttgagaaccgcaataacccggcggcgtttgagccactgccgcaggcggaagccgcgcagccggtggcaaaagcagagaagcctgccgcctccggtatctacaccgtggaagtggaaggcaaagcctttgtggtgaaggtcagcgacggcggcgatatcagccagctcactgcggctgttccggcggcctcttccgcaccggttcaggctgccgccccggcaggcgccggcaccccggtcaccgcgccgctggcggggaatatctggaaggtgattgccaccgagggccagacggtggccgaaggcgacgtgctgctgattctggaagccatgaagatggaaaccgaaatccgcgccgcgcaggccgggacggtacgcggtatcgcggtgaagtccggggacgcggtctccgtcggcgacaccctgatgacgctggcgtaa

SEQ ID NO: 376467 - DNA, 261 bp, Salmonella enterica
atggctaactgtgagcgtaacggtggctccggtgccatcaccgtcacgataaatattaacggccaggtgaaaacggcggaggttatcccgtataccgcagggcttccggccatgtatcagaccgttgtcttttcggtctacaccacttcacctgtcgtggatatcagcgtttctctgagggttcgtgggcagtacaccacgtctgcttccgtctggccgctggtgatggtttcccggtcggggaacaacttcacaaactga

SEQ ID NO: 376468 - DNA, 243 bp, Salmonella enterica; identical to SEQ ID NO: 375752

SEQ ID NO: 376469 - DNA, 696 bp, Salmonella enterica
atgctgatgacgaggcggctgttgcgctggccgctgctgtacttgctgacgttgcagcgtttgtctcagatatttttgctgcggctgccgatgcggctgccgccttttccgacgctgccgccgcagtggctgacgcacctgcatcaccggcactggaagccgcctgcgtttctgacgtcttcgcggcggtttcggatgctccggcgcgcgctgctgatgtctgcgccgccgtcgcgctggcggctgcggcagcagctgaatcgccggcggcagtacgggaggcatctgcattcgcttcagatgttttcgctgcggctgccgatgcggctgccgccgttctggctgtgtcagccgacgccgcgctggctgatgcctccccggcttttgtggtcgccgtacctgcgctgctctccgcagatgctgcggatgaggctgcctgtgtggctgatgcttctgccgctccggctgcattcactgctgccgtggcgctttccgatgcctgacctgctgatgtctgcgcctgttcagatgcctgccctgcggcggtggcattccgcgatgcctccgatgcctggcgggcaacttcttccaccatcgcctcaaaacgtcgcagcgcctccgggcggacgtcgtcttccgtcatggcccccagaaaatcattcagggtgcccggttttgaatcatcgtagaccgtaa

SEQ ID NO: 376470 - DNA, 696 bp, Salmonella enterica
atgctgatgacgaggcggctgttgcgctggccgctgctgtacttgctgacgttgcagcgtttgtctcagatatttttgctgcggctgccgatgcggctgccgccttttccgacgctgccgccgcagtggctgacgcacctgcatcaccggcactggaagccgcctgcgtttctgacgtcttcgcggcggtttcggatgctccggcgcgcgctgctgatgtctgcgccgccgtcgcgctggcggctgcggcagcagctgaatcgccggcggcagtacgggaggcatctgcattcgcttcagatgttttcgctgcggctgccgatgcggctgccgccgttctggctgtgtcagccgacgccgcgctggctgatgcctccccggcttttgtggtcgccgtacctgcgctgctctccgcagatgctgcggatgaggctgcctgtgtggctgatgcttctgccgctccggctgcattcactgctgccgtggcgctttccgctgcctgacctgctgatgtctgcgcctgttcagatgcctgccctgcggcggtggcattccgcgatgcctccgatgcctggcgggcaacttcttccaccatcgcctcaaaacgccgcagcgcctccgggcggacgtcgtcttctgtcatggcccccagaaaatcattcagggtgcccggctttgaatcatcgtaaaccgtaa

SEQ ID NO: 376471 - DNA, 261 bp, Salmonella enterica
atggctaactgtgagcgtaacggtggcaccggtgccatcacagtcacgataaatattaacggccaggtgaaaacggcggaggttatgccgtataccgcagggattccggccatgtatcagaccgtcgtcttttcggtctacaccacttcacctgtcgtggatatcagcgtctctctgagggtccgtgggcagtacaccacgtctgcttccgtctggccgctggtgatggtttcccggtcggggagcaacttcacaaactga

SEQ ID NO: 376472 - DNA, 696 bp, Salmonella enterica
atgctgatgacgaggcggctgttgcgctggccgctgctgtacttgctgacgttgcagcgtttgtctcagatatttttgctgcggctgccgatgcggctgccgccttttccgacgctgccgccgcagtggctgacgcacctgcatcaccggcactggaagccgcctgcgtttctgacgtcttcgcggcggtttcggatgctccggcgcgctctgctgatgtctgcgccgccgtcgcgctggcggctgcggcagcagctgaatcgccggcggcagtacgggaggcatctgcattcgcttcagatgttttcgctgcggctgccgatgcggctgccgccgttctggctgtgtcagccgacgccgcgctggctgatgcctccccggcttttgtggtcgccgtacctgcgctgctctccgcagatgctgcggatgaggctgcctgtgtggctgatgcttctgccgctccggctgcattcactgctgccgtggcgctttccgatgcctgacctgctgatgtctgcgcctgttcagatgcctgccctgcggcggtggcattccgcgatgcctccgatgcctggcgggcaacttcttccaccatcgcctcaaaacgccgcagcgcctccgggcggacgtcgtcttctgtcatggcccccagaaaatcattcagggtgcccggctttgaatcatcgtaaaccgtaa

SEQ ID NO: 376473 - DNA, 555 bp, Salmonella enterica
atggtttcccgtaaaccaacgtattcgataagaccgtcaacgctttttcctgacagcgccgtcagtgtatcgtccagcggctgcttgcccgccagtttattcagtacagtggtggcaaagttcggatcgttacccagcgcgtcagccagttcctgcagcgtgtccagcgtttccggcgcagaaccaaccaactgcgccactttcgcagccacaaacgctgccgtggcaatttcaatacctgcagctgcggtttccggagttggtgctgttggcgtaccagtcagtgccggactgtccagcggcgctttggtctgtacctcgtccatgacagcatggaccgcctttggcgtggctgccagcgcttcgctgtcactgtccgtggcgctgcttaacttaacgataccttttttcgtcaggctggcatcttccagggaaatcacgtccgcgatatcttctgcccgttttgcggcatcttctgctctggtggctgctgctccggcagcagtactgctttgcgccgccagtgatgcgctggtatcagatgcggcggcgtga

SEQ ID NO: 376474 - DNA, 696 bp, Salmonella enterica
atgctgatgacgaggcggctgttgcgctggccgctgctgtacttgctgacgttgcagcgtttgtctcagatatttttgctgcggctgccgatgcggctgccgccttttccgacgctgccgccgcagtggctgacgcacctgcatcaccggcactggaagccgcctgcgtttctgacgtcttcgcggcggtttcggatgctccggcgcgcgctgctgatgtctgcgccgccgtcgcgctggcggctgcggcagcagctgaatcgccggcggcagtacgggaggcatctgcattcgcttcagatgttttcgctgcggctgccgatgcggctgccgccgttctggctgtgtcagccgacgccgcgctggctgatgcctccccggcttttgtggtcgccgtacctgcgctgctctccgcagatgctgcggatgaggctgcctgtgtggctgatgcttctgccgctccggctgcattcactgctgccgtggcgctttccgctgcctgacctgctgatgtctgcgcctgttcagatgcctgccctgcggcggtggcattccgcgatgcctccgatgcctggcgggcaacttcttccaccatcgcctcaaaacgccgcagcgcctccgggcggacgtcgtcttctgtcatggcccccagaaaatcattcagggtgcccggttttgaatcatcgtagaccgtaa

SEQ ID NO: 376475 - DNA, 696 bp, Salmonella enterica
atgctgatgacgaggcggctgttgcgctggccgctgctgtacttgctgacgttgcagcgtttgtctcagatatttttgctgcggctgccgatgcggctgccgccttttccgacgctgccgccgcagtggctgacgcacctgcatcaccggcactggaagccgcctgcgtttctgacgtcttcgcggcggtttcggatgctccggcgcgcgctgctgatgtctgcgccgccgtcgcgctggcggctgcggcagcagctgaatcgccggcggcagtacgggaggcatctgcattcgcttcagatgttttcgctgcggctgccgatgcggctgccgccgttctggctgtgtcagccgacgccgcgctggctgatgcctccccggcttttgtggtcgccgtacctgcgctgctctccgcagatgctgcggatgaggctgcctgtgtggctgatgcttctgccgctccggctgcattcactgctgccgtggcgctttccgatgcctgacctgctgatgtctgcgcctgttcagatgcctgccctgcggcggtggcattccgcgatgcctccgatgcctggcgggcaacttcttccaccatcgcctcaaaacgccgcagcgcctccgggcggacgtcgtcttctgtcatggcccccagaaaatcattcagggtgcccggttttgaatcatcgtagaccgtaa

SEQ ID NO: 376476 - DNA, 243 bp, Salmonella enterica; identical to SEQ ID NO: 375752

SEQ ID NO: 376477 - DNA, 696 bp, Salmonella enterica; identical to SEQ ID NO: 376475

SEQ ID NO: 376478 - DNA, 234 bp, Salmonella enterica
atgactttgtccgcatgtacaacgacgccgtcaccagtaccgaacgtacgttatcaggaaaacctgaaaactaaatgtgccacgcagctgccgcgcctgaatggcacgcagggaaaagatgcggcggaattactgacactttatctggagttatacgggcagtgtgctgcacgtcataacacgctggttgatgaaattaatttaagagagaatattatttatggaaaaaattaa

SEQ ID NO: 376479 - DNA, 231 bp, Salmonella enterica; identical to SEQ ID NO: 376365

SEQ ID NO: 376480 - DNA, 204 bp, Salmonella enterica
atgcctcgtaatgatttcattacattagcccacgccagctttgcttttgtgttaagccacgtccaggccgtatcgattttggtaaccgctgtaagtaacttccatacccccttccaacccatcatgatgaactttgaaactcccatgacgatattggcaaccgcacccactgccgcaaaccccagcaacgccatagcggcgtag

SEQ ID NO: 376481 - DNA, 522 bp, Salmonella enterica
atgtcagtagatgttctctctaatggtgccattcgcgcaggtaacgcaaaaaaactgtcactgacgagcaataacaactcagcactgactgccacgttcaatttatggggcgacccaaacagacctaccgtgattgaactggacgacgaccaggggtggcacctgtacagccagcgaaatcctgacggttcgattgtctttacggtcaatggagatatcaccgctaacacacttcgtgcaggtggagccatctatcagaataacggcgacatctttggttcgttgtggggaaatggctggttaagtacctggattcacaacaatgtagtaaaagcggtcagacttggccccgtggcgctttctggcggtctgtggcgtgattttcagcttggcggcggacaggtggtgacggggttccatactgacggtagctgggaaatggaaggtgatgatgacaaggtttattaccgtcccattcagtatctgattggtgatacgtgggtaacagccccaagtgtataa

SEQ ID NO: 376482 - DNA, 306 bp, Salmonella enterica
atggtggcaaatctgatccactgggcagaagaacacggctaccggctgacgttcggggaggcttaccgcacgccggaacaggcggcgctgaacgctaaaaagggtagcggtattaccaacagtctgcatacccggcgtctggcagtggattttaacctgtttgttaacggccagtaccagacccgcacagaggattacctgccgctgggcgaatactgggagtcactgggcggcagctggggcgggcgcttcaaatccaggccggatggtaatcatttcagtctggaacatgacggggttcgctga

SEQ ID NO: 376483 - DNA, 372 bp, Salmonella enterica
atggtcgttgatctggaactaaaagataaagtgacttttttacatgaagtctcatttaatgaattaaagattttatattctaaagcctacgcgcttgtttatccatctattgatgagggttttggtatacctcctattgaagcgatggcatcaaatactccagttatagtgtccgatataccagtatttcatgaagtgttaaccaatggtgcattatatgtgaatccggatgatgaaaaaagctggcagagtgcaattaaaaatatagagcagttgcctgatgcaatttcccgatttaacaactatgtcgcacggtatgactttgataatatgaagcagatggttggcaattggttggcggaatcaaaataa

SEQ ID NO: 376484 - DNA, 2253 bp, Salmonella enterica
atgtcgcataatgagaaatccccccatcagtcccccgtgcatgatacccgtgaatcacagcccggcctggactccctggcgccgtcagacggttcacatcgccccacgccagaaacgacgccgccgggcgcgcaaccgacggcccccggcagcttaaaagcgcccgagaccgcgaatgataagctcactgccctcgacgcctttcgtaaaggcagcgaaaattatgcgctgaccaccaatcagggcgtgcgcatcgccgacgatcaaaattctcttcgcgccggcagccgcggccctacgctgttggaagattttatcctgcgcgagaaaattacccactttgaccatgagcgcatcccggagaggatcgttcacgcccgcggatctgcagcgcacggctatttccagccatataaagacctgagcgacatcacgaaagccgcgtttctgtgcgatccacagaaaattaccccggtctttgttcgcttttcgacagtacagggcggcgcggggtctgctgataccgtacgtgatatccgcggttttgcgaccaaattttataccgaagagggaattttcgatctcgtcggtaataacacgccgatcttttttatccaggatgcgcataagtttccggattttgtgcacgccgttaagcccgaaccacattgggctattccgcaagggcagagtgcgcacgacaccttctgggactatgtttccttacagcctgagacgctgcacaacgtcatgtgggcaatgtcggatcgcggtattccacgcagttatcggacgatggaagggttcggcattcacaccttccgtctgatcaatgcacaagggaaagcgacctttgtccgtttccactggaaaccgttggcaggtaaagcctcgctggtatgggatgagtcacaaaaactgaccggtcgcgatccggattttcaccgccgggatctgtgggaggccatcgaagcgggcgatttcccggaatacgagctgggcctacaactcattgccgaagaggatgaatttaaattcgattttgatctgctcgatccgaccaaactgattccggaagagttggtgccagtacaacgcgtcggcaaaatggtgttaaaccgtaatccggataactttttcgctgaaaacgaacaggcggcatttcatccaggacatattgttcccggcattgattttaccaacgatccgctgttacaggggcgtctgttctcttataccgacacgcaaatcagtcgtctgggcgggccaaacttccacgaaattccgattaaccgccctacctgcccctaccataacttccagcgtgacggtatgcaccggatggatatcgacaccaatccggcgaactatgaaccaaactccattaatgacaactggccacgcgaaacgccgccagcgccaaaacgcggcggcttcgaatcataccaggaacgcgtggatggcaataaaatccgcgaacgcagcccctctttcggtgaatattactcgcatcctcgcctgttctggctcagtcagacgccgatagaacagcagcatattattgacgcgttcagctttgaactgggtaaagtcgcccgcgcgtatattcgggagcgggtggtcgatcagttagcgcatattgatgtcacgctggctcagggcgtcgcgcataatctcggttttgcactcacccatgagcaaacgcaaattgccccgcctcctgatgtcaacggtctgaaaaaagatccggcgctcagcctgtatgcggtgccggacggcgatgttaaaggccgagtggtcgctattctgctgaacggcaaagttaacgccgccgaactgttgaccattttgcaggctttaaaagccaaaggcgtccacgcaaaactgctctattcacggatgggtgaagtaacggctgatgatggttcaacattaacgattgcggcaacctttgccggcgcgccgtcgctaacggtcgatgcggtaatagtaccgtgcggcaatattgccgatatcgagagttgcggcgatgcccgttactaccttctggaagcctacaaacatctgaagcccatcgcactggcaggcgacgcccgacggtttaaggcgcttttaaacattgatagccagggggaagaaggacttgttgaggcagataacgttgaccaccactttatggacactctgctgacgctgatggcggcacaccgtgtctggtcgcgtgcggggaaaattaacgcgattcctgcataa

SEQ ID NO: 376485 - DNA, 582 bp, Salmonella enterica
atgatgaacaccgatggttatgccgccaccggtgtagaaattaaaatcgtggatgaagatcgcaatacgcttccagcaggccacgaaggcgaagaagcctcgcgcgggccgaacgtttttatgggatacctggacgagccggaacttaccgcccgcgcactggataatgagggctggtattacagcggcgacctctgccgcatggatgaagacggttatatcaaaattaccgggcgcaaaaaggatattattatacgtggaggtgaaaatatcagcagtcgcgaggtggaggatattttattgcaacacccccgcatacacgatgcttgcgtcgttgctatgcctgatgaacgcttaggcgaacgttcatgcgcgtatgtagtcttaaaaccgccacacctttcgctgacgctggaagaggtgatcgcttttttcagtcgaaaacgggtagcgaagtataaatatccggaacggatcgtcatcgtagaaaaactgcccagaaccgcctctggcaaagtgcagaagtttctgttgcggcaggatattattgagcggctgcgccaggagcacactgcggtataa

SEQ ID NO: 376486 - DNA, 765 bp, Salmonella enterica
atgaaaataataacctgctttaagttggtgcctgaagaacaggacattaccgtgaccccggagcattcgctcaattttgatcgtgccgaggccaaaatcagccagtttgatttaaatgcaattgaggccgccgcgcagttagctggcggtggcgacgagatcgccgcgctcaccgtcggcggctctctgttacaaaattcaaaagtccgcaaagatgtgttatcccgcgggccagatgcgcttttcatggttcaggatgcgcaaatggagcacgccctgcccaaagaaaccgcgctggcgctagcatccgcggcggagaaaatcggctttgacctgttgctctttggagagggctccggcgatatttatgcccaacaggtgggcctgctgactggcgaactcctgaaactccccgtcatcaacgcagtaagccatattcaacgcgacggcgacaaaatcatcgttgaacgcacactggaagaagacgttgaaattatcgagctcacgctgcccgcggtgctttgcgtgacctcagatattaacgttccacgcatcccgtcaatgaaagccattctcggcgccgggaaaaaagccgttacgtcgtggctggcgagcgatatccactggaccccaaccacgccaatggcggaactggtcgccatctcggtaccgccgcagacagaacgcaagcatatcattctcgataacgattcgccggaagccattaccgcactggccgaccatttgaaaaaatccctgaactaa

SEQ ID NO: 376487 - DNA, 207 bp, Salmonella enterica
atgaatcattccataaccagtcatccctgcgacaacgtatctttagcacaattaaccgaactggcgcagtcaggaaatagtgaagctcaatatatattaggccgtttatataatgacgaacgtatagatggcagcgaagaggataagctctctttttattggttgcagcaggcagctgaacaaggacactgcgaggcacaatattga

SEQ ID NO: 376488 - DNA, 1236 bp, Salmonella enterica
atgctggctggcggccttgtatacatagcatctgtacgttacaaaatgccagaatggataaagcattgtgaggtttatgggatagtcctcattgttgttgctgttgttatactgcacagtaatggttactggccaagctattcagcactcgctcccgtgctgggtgcttcgatggttattctggctaacaaacagaactctttattcacatcaaacagaattgcacagtgggtgggtaagatttcttactcagtttatttatggcactggcctgtaattgtagcgatgaaacattatgatattgagttcagcgctataaatattttctttggtgtaattgtgtcttttgcgcttggggatatttcatacagaacaattgaaaacacgctcaggaaacgagttaagctacaatttaatattgtattattttcctctactctggctctatgcttgtttgtcatgttcacaaaaggtgttagttttagattttcagacaccctaaagcaagtcgttgagtatcgtatggacaactctccctggaggcctgatatttgcttcctcaatccagatcaagattattcagcattctcaaaatgtcaggataaaatgactgaaaagtcttttgttgtatggggtgactcgcatgccgcacatcttatgccagggctgaaatcggtatttggaaattcacttaacattacgcagagaactgcaagcttgtgcccaccaatcattgggcttcaaaaagatgacaggccgtattgcaaagacatcaatgatatggtagccaaggaaatttcagacaacaagcctactacggtattaatgtccgcgttgtggcctgtctatcctatgcgtgattatctgcctgagactattaaattcctgaaggataacaaagtaaaaaacatcatcattgttggcccgttcccggtttggaagaaaacgatgattgatactattgaggatatggggattaattccggaaggaccgttccatggagcatgacggatgaaacccgtaatctgagagataatgacaaatatcttagagagctggcgaaagagcattcccttacttatatttcaccacttgagactatgtgtacagaaagttattgcaaagcaataatagggaatagaattgcttaccctatacaatatgacaatgcgcacctaacaccagaaggctcagggtggtttattgaggaagtgaaaaagcagatttcaaaataa

SEQ ID NO: 376489 - DNA, 285 bp, Salmonella enterica
atgaaatttttgaaacggggtgtggcgctggcgttactggcggcgttcgcgctgacgactcagcctgcacaggcttacgaaaaagataaaacctataaaattactatcctgcataccaacgatcaccacggtcacttctggcgcagcgaatatggcgaatatggtctggcggcgcaaaaaacgctggtggacagtatccgtaaagaggtggcgcaagaggggggaagcgtcctgttgttatccggcggcgacattaataccggggtgccggaatccgatctctag

SEQ ID NO: 376490 - DNA, 927 bp, Salmonella enterica
atgtttgacccggaaacactgcgtacctttatcagcgttgccgaaacggggagtttctccaaagcggcggagcgcctgtgtaaaaccacggcaaccattagctaccgcatcaaactgctggaggaaaataccggcgtagggctgttctttcgcacaacgcgaagcgtctcgttgacggcggcgggctctcaccttctctctcaggcaaaagactggcttgcgtggctggacagcatgcctgacgagctacgccaggttaacgacggcgtagagcgtcaggtcaatattgtggtgaataacctgctctatagcccgcaagcggtcgccagtctcttatcgtggcttaatgcgcgttaccctttcacccagtttcacttttcccggcaaatttatatgggcgtctgggattcgctcctgtatgaaggtttttcgctggcgattggcgtaactggcaccgagccgttggctaatacctttatgctcgaccctttaggttccgtacaatggcgttttgtgatgtccgcggatcatcctttagctcacgtcagcgggcctctaacagaagcgcagttgcgccgtttcccggcaattaatatcgaagacagcgcgcgtacgctgaccaagcgggtagcctggcgccttccggggcagaaggaaattatcgtgcctgatatggaaaccaaaatcgccgctcatctggcaggcgtcggtatcggttttgtcccgcagccgctttgtcaaacgctgatcgacaaaaacgaactggtgagctgtaccatcccgacgatgcgtccgccctcaccgttaagcctcgcctggcataaatttggcggaggcaaagcggtagaagacattgtgaaattatttacccaacggcaacccgaaatagccggttttttatccattttcaacacggtacgctgttaa

SEQ ID NO: 376491 - DNA, 363 bp, Salmonella enterica
atgttgaagttattcgctaagtacacatcgatcggtgttcttaacacgcttattcattggggcgtatttgctttttgtgtgtatgggatgcatacgcatcaggcgctggcgaacttttccggttttgttatcgccgtatcgttcagcttctatgccaatgcgcgtttcacctttaatgccaccaccaccacgcttcgctacatgatgtatgtgggattcatgggaacactgagcgctgttgttggctggatggctgaccaatgttccttgccaccattgattacccttatcactttctcggcaattagcctggtatgcggctttatctattccagattcattgttttcagggatataagatga

SEQ ID NO: 376492 - DNA, 1413 bp, Salmonella enterica
atgtcttcggatgctgatgctcacaaagtgggcctaatccccgtcaccttaatggtatcggggaatattatgggttcaggggtattcttactccctgctaacctggcggccactggcgggattgcaatctacggatggctggtcactatcatcggcgccctggcgctgtcgatggtttatgccaaaatgtcgtccttagatcccagtcccggcggttcctatgcctacgcacgccgctgcttcgggccgtttttgggctatcaaacgaacgtgctgtactggctggcatgctggatcggtaatatcgcgatggtcgttatcggcgtcggctatctgagctatttcttcccaattctgaaagatccactggtattaacgcttacctgcgtcgcggtgctgtggatttttgtgctgctgaacatcgtcgggccgaaaatgattacccgcgtacaggccgtcgccaccgtactggcgctggtgcctatcgtagggattgcggtcttcggctggttctggtttaaaggcgaaacctatatggcggcctggaacgtgagcggcatgaataccttcggcgcgattcaaagcacgttgaacgttacgctgtggtcattcatcggggtagaaagtgcctccgttgcggccggtgtggtcaaaaacccgaaacgcaatgtgcctatcgccaccatcggcggggtactgatcgccgccgtctgctatgtgctctccacaacggcgattatggggatgatccccaacgcggcgctgcgcgtgtcggcatcgcctttcggtgacgcggcgcgtatggcgctgggcgataccgcaggggctattgtttccttctgtgcggcagcaggttgcctgggctctctcggcggctggacgctgcttgccggtcaaaccgcaaaagcggcggcggacgatggtctcttcccgccaatcttcgcacgggttaataaagccggtacgccagtggctgggttgcttatcgtcggcgtgctgatgactatcttccagttcagcagtatgtcgccgaacgccgcgaaagagtttggtctggtctcctccgtgtcggttatcttcaccctggtgccttatctttacacctgtgccgcgctgttactgttgggccacggtcactttggtaaagcgcgcccgctgtatctgctgattaccttcgtcgcgtttgtgtattgcatctgggcggtcatcggttccggcgccaaagaagtgatgtggtcgttcgtcacgttgatggtgatcaccgcgctgtatgcgttgaactacaaccgcattcacaaaaacccgtatccgctggatgcgccggttaaacaggattggccacgtgtagttaatgttatcgcaacaggccggatagcgcaggttatccggccgccaccaacattaagttcttaa

SEQ ID NO: 376493 - DNA, 303 bp, Salmonella enterica
atgcggatgttgtgggccatcataagtaatattacctctattagctcctccggaacctctttttcctgcggattgccaaccaacatgtggtttatcatgccctgctgtcacatccatatctgcatgaggtgcatcataagcaactttagccccatttggacctttaaactcaacaacagtaccagttttgggatcgactttcgagaaagtgacatcctcagggtttgtcatacccgcattttcaaatccggttctccttgccgcatcaaaattagattgatgctccaggatagcaagtcctaa

SEQ ID NO: 376494 - DNA, 138 bp, Salmonella enterica
atgattcttgtgatcagtgccacctatctttgtcgccgcggggatattgatggcgcggtttacgcaggtatagcaatttttggatttattgagcttcttgtagagattgctcttctcgcttcagtattaggaaagtaa

SEQ ID NO: 376495 - DNA, 285 bp, Salmonella enterica
gtggctaacctgcaacttgccgtcaaaggtgaatacttcgatgccatgattcgcggagagaaaacggaagagtatcgcctgtgtaatgactactggaataagcgaattatgttccgggagtatgaccgcctgattatcacaaagggatatccgaagcgcgacgattccagccgcagaattgacgtcccgtatgacggatatgaaatcaagacaatcacacatccgcacttcggcgataaaccggtaaaggtgttcgcgataaagatgaatatcggcaatgaataa

SEQ ID NO: 376496 - DNA, 285 bp, Salmonella enterica
atggaccccttcgcgaaatatacgattattgactggatagccttccttcaggttttgctcatctggttttatatggcttacaggagtggacagtggattgtcagtgtagcctgtagcaagggatggcgttggtggaaccgaaagaataaaaaagcactggcattggattcgttttacgaagcattcaatcttaacagccttcagcctggttctgtcgttgtagtcaccactcaaagcggcatgacgatacaaattcacaagccaaaggaggaaggtcgtggctaa

SEQ ID NO: 376497 - DNA, 792 bp, Salmonella enterica
atggctctggcggtcgattctatttcgttcgatgcggtacgtgtcgcgctcaatctggtagcaaatatgcggcgcctggaaatgactgcgcgattttttattcagaggttagagcagagtggaatcagcgagcaaaggaggcaaccagtgagcaagattgactatcaggcactgcgtgaaaaggcagagaaagcaacgtgtggtgtgtggtcgctcgaatatggagaggagagatttgatgctggtgatgcgctaattcatcgtgaagttgttggatatcttcccatttgcagaattgaaggagcgcatcctgaaagcggtttcgatgaagatttccaaatggaacagcaggccaatgctgaattcatcgctgcagccaatccggctactgtgctggcactgctggatgaacgggaaagaaaccagcaatacatcaaacgccgcgaccaggagaacgaggatattgcgcttacggtaggtaagctgcgctttgagcttgaagcagcaaaaaagcgcatagcggaactggaagccgaacccgtaagccaaacttacaagttgaacgagctatcgggcagctatccggcaactccggatggttggataagctgtagtgagcgaatgccaaacgaagaagatgttttggtttattgttcagacacaaaagagcagatggtagggtttcacaaaggtaaagggttatttcaattcttttacatgaacggtgttgagggggtatgtgagccgtcacactggatgccgctaccggagccaccgcaggaggtgaagtga

SEQ ID NO: 376498 - DNA, 510 bp, Salmonella enterica
atgaaacaaatgacactaattgagatggatggatttctgaaaggtaaatgcatcccacgagatttaaaggttaacgaaacaaacgctgaatatctggtgcgtaaatttgctgaagcggaggccaagatttccgcgctggccgaagaccaccagagagcgattgagtcaattaagcaggctgattcggctgttaagttggcacacgagaagttttcggcgctggcttcggagaatgcggcactgaaaaaatcagaggtcgaattcaacgaatattgtcgtcgcgagtgcgaggacgttggagatacgtgggtggacgatttcactgataccccagccaccgacgctttcctggatgaagtgcgtgcgcaggcgtttaatgacctttgctcggcgttcgttaaggacgctacggttgtcgggctggacgatggcgacatcgttacggtgaaagaagcgacggacgccctgctgcattgtgcagaccaacttcgcaagggagtgcattcatga

SEQ ID NO: 376499 - DNA, 171 bp, Salmonella enterica
atgagaggtttgtcctacgaccaaggaatccttccatcggaaatgattattcgacaccgcttcaagcccatcaacgatattccacgcgaagaaatgctggcgagaaagagttttccatcagtgaatcaaaacaaatatctgaatgcgatgtggcggagtgggaagaaatga

SEQ ID NO: 376500 - DNA, 294 bp, Salmonella enterica
atgcctgcacctctatatggtgcggatgacccgcgcaactgctccggtagctccaagtcggaggtgctggaaaatatcaaaaacaatctcgacgcgtttcttgctctgccaccggaaacaaaagcagaacggaagtaccgacgcgatatacaactcgcagaaaaacaggaaaaagaccgaataaacgaaacagcaatccgaccattccgaaaagccacttacaccaaattcattgaaatagacccgcgccttaaaaattaccgttcgcgttacggcgctatcagcaataactga

SEQ ID NO: 376501 - DNA, 288 bp, Salmonella enterica
atgaaaaagtttaaaggtacgccaggtccttggagcggaaaggatgtacgcatttgcaggcaagatagagctgggttgcagcttggttttatcatgacccatgacgaaaatcgcgtagctgaatgtgaggccaatgcacacttgatagcagcatctcctgatttgctcgaggctcttcaattggctgaaaaagcgatggcagaaggacgcaatgtgacttatccggagtggtacggggtaatcaataaagctcgcgcagccatcagcaaggctcttggggaggagtga

SEQ ID NO: 376502 - DNA, 855 bp, Salmonella enterica
atgaattcagcagatttatcgaagattcttgaagaacacaaagtgtggattacctcaatgcgtgagagcggatctagagccaacctgtacggtgccgacctgtacggtgccaacctgcgcggtgccgacctgcgcgatgccgacctgtgcggtgccgacctgtacggtgccaacctgcgcggtgccaacctgtacggtgccaacctgtacggtgccaacctgtgcggtgccaacctgtacggtgccaacctgcgcggtgccaacctgtacggtgccaacctgcgcggtgccaacctgtacggtgccgacctgtacggtgccaacctgcgcggtgccgacctgcgcgatgccgacctgtgcggtgccgacctgtacggtgccaacctgcgcggtgccaacctgtacggtgccaacctgtacggtgccaacctgtgcggtgccaacctgtacggtgccaacctgcgcggtgccaacctgtacggtgccaacctgcgcggtgccaacctgtacggtgccgacctgtacggtgccaacctgcgcggtgccgacctgcgcgatgccgacctgtgcggtgccgacctgcgcgatgccgacctgcctgatctcactttcgtaattctgggtgagaaatacttcataagtataacgaacggtgaatatgtacgagcaggatgccagaaccacacagttgaggaatggagaaaatatagtaagcaggaaattgctgagatggatggtcgtaaagctcttaaattttatccacgtcttctggacattatcgatttctatattggtaaaggtgaacgcccggattggttaacaagtaaagaatatgcagatgaagtaactgagtaa

SEQ ID NO: 376503 - DNA, 195 bp, Salmonella enterica
atgactacgactattgatacaaatcaatggtgtagtcgttttgtgaaatgcaaaggctgcaagcttgatgctgaatgtatggtgaagcctgaggaaatggctctggtgagagaagatggaaagattgtcgataaatgggcaatcagaaccacggcaatgattgccagagagctggaaaaactaaagtctacatag

SEQ ID NO: 376504 - DNA, 303 bp, Salmonella enterica
atgacggttatcacctacgggaagtcaacgtttgcaggcaatgctaaaactcgccgtcatgagcggcgcagaaagctcgcaatggagcgcgacaccatctgcaatatcattgattcaatttttggctgcgatgctcctgatgcttctcatgaggttaaagccaaaagaattgaccgcgttaccaaagccatttcgcttgccggaacgcgtcagaaggaagttgaaggaggatctgtacttcttccagacgtagcactttacgcggcagggtatcgtaagagcaaacaaataacagcgaggtaa

SEQ ID NO: 376505 - DNA, 1044 bp, Salmonella enterica
atgtctgataaagaaagcaaagaaccaacgggaaagtccaaaggtggtgtggcaagggctaatgctctttctgcagaagaaaggtcggctattgcaagaaaagccgcagcagctaggtggggtggcgatggtgaggtggaaattgccaaaagatctggcgacattgtcattggagacttaaagatacaatgtgccgtgcttgaggatgggacgagggttctgtcagagagagctatcactaaagccttcggcgggaagcgtggaggctcccactggaagagaatgaaagagaatccagatggcgcctatcttcctgttttcttgtcagctaaaaacattaagccattcattaataatgaattatcagaaggcctatcccggcgccgtcttttcaaaataaataaaggagcggcgccagcttacggcattgaagcatctttgctcccaaagatatgcaatgtttatttgaagatgagagatcagggtgatgcccttcagtcatctcagatacctatttctgttcaggcagacattatcatgcgcggtcttgcagaggttggtattgtagcgctggtagacgaagctactgggcatatcgatgaaaagagacaagatgaatatcgaattctctttcaagagttcatcaaagagcaggtcagagaatatgagaaggaatttccgaagcagttcacggatggcctttatcgactttacggacttacgcagaaaaaagcaggtcggcaccctcagtttttcggtaagtttacgaggaagtatatctacgaaccattagcatcaagtaaaggcgccatccttgagatgctagatgaaaaaaaccctgtcgtttatgcgaatggcggtagaagatataagatgtttcagttcctaaccgatagcatcggagttccgatgtttagggcgcacctttggcaggtagttggcatcctttcaagctcaagaaataaagctgagtttgacagagcattcaaaagagcctttccatcgcccgggactcaatttgagttgctagatgaagatgagtaa

SEQ ID NO: 376506 - DNA, 282 bp, Salmonella enterica
atgaacgtagttgcaactaaaagcaagaaggcggctcgcatcgagtccaccttactcaacaagttagccatgatgggccagaagacattcgctaaagctatgggtgttcctgaataccaggtaagccgatggaagaacggtttcttctctcaggtcagcatgatgcttgcggttctggagtatggaatcgaagacgaggaaatggcagagctcaccaggcgacttgctacctacctgacaaaagaaaaagccccgaagaacggcgaattcttcgaggcctga

SEQ ID NO: 376507 - DNA, 162 bp, Salmonella enterica
atgacaaaacgtcgtaagaaataccaggaaaaagaagagattcgacaccctgattcacctgagggattagtagtagccgcagcaaataacagggcgttcgcagagcgccttgttggtgtttacagactagccaaagcaggagtgaaacatgggcgtcgttaa

SEQ ID NO: 376508 - DNA, 1377 bp, Salmonella enterica
atgagacaggatatcgaagcgagcgttatcggtggcttgctgattggtggattaacaccaaccgcgagtgacgttctggcaacgctggagcctgaagcattctcaattccgctttaccggaaagcttttgaagttattcgaaagcaggccagaaacaggaacctgattgatggactgatggtggccgaggagtgcggggatgaatacgcaacggcggtgatgatgactgcgcggtcatgtcccagcgctgcaaacctgaaaggttatgccggaatggttgtagacagttatcaacggcgtcaggttttacagctactggatgagatgcgagagccaatcagtaacggcacgctggatgcttcaggtagagcgatggacgatcttgttaagcgtctttcagccatcaggaagccacgcaacgaggttaaacctgtgcgactgggggaaattatcaatgattacactgacacgcttgacaggcgtctgaggaacggagaagagtcggataccctgaagaccggaatcgaagagcttgacgctatcaccggaggaatgaacgcagaagaccttgtgattattgctgctcgtccaggtatgggtaaaaccgaactggcgctgaagatagccgaaggcgtggcaagtcgtgttattcctggttctggcgtccggcgcggtgtgttgattttctcgatggaaatgagcgccattcaggttgttgagagagggattgccggcgcaggaatgatgtcggtcagtgtgctgcgtaacccgtcacgaatggacgatgaaggatgggcgagagttgcaagcgggatgaagttgctggcagatctggatgtgtgggtagttgacgcatcgcgtttgtctgtcgaagaaatcaggtccatttccgaacgccacaagcaggagcatcctaatctgtcactgattatggctgactatctcgggctaattgagaaaccaaaagcggaacgtaatgacctcgccatagcacatatctccggtagcctgaaagcgatggcgaaagacctgaaaactccagttatctccctaagccagctttcacgcgatgttgagaagcggccaaacaagcgcccgacaaacgcagatttgcgtgattcaggaagcattgaacaggatgcagactcaatcatcatgctttaccgtgaagcggtatacgacgagaacagtagcgccgcaccatttgctgaaatcattgtgacgaaaaaccgttttggctcgcttggtacggtttaccagcggttctgcaacggacactttgttgcatgtgaccaggatgaagccagacagatttgcacagcatcaaatgcacctgctgcgcgtggcagacgatatgcacaaggggctgacgtatga

SEQ ID NO: 376509 - DNA, 270 bp, Salmonella enterica
atgaataaaaaacaattagccattctcgaaaaggcatgggatgcacaaatatcatacgctttgaaagaacaggcactaccaataatccagaccaaatcgaaaatagccaggcagttatgcgatgacggattcctaaacgaagttgagattacgcaccagatggcaacgttcaaagggtatgagataaatcatcatggtatagcagcgtattgctcccatcttcctgatgacgttgacattgatgaaatggaaagggagatgaagcaatga

SEQ ID NO: 376510 - DNA, 342 bp, Salmonella enterica
atggattattcacagttaagtgattttgaaattaaccgaatggtaggagacataatttttaaaggcctttgggcatgtaagccggaaacgtcagggaataacaccaacaaatggtattacggaaacgctgatacaacttttgagccattaaaccatttacctgattactgcaatgatccgagtgcctcatggccgattattgagaaacacaggatttctatcttagaccagttaactgaatggtgtgtggatgcaaaaggcgtaagcccaatatttgataccagacctctccgcgccgccatgattgtctttctcatgatgcaggacgccaataatgcttag

SEQ ID NO: 376511 - DNA, 390 bp, Salmonella enterica
atggcaaagacgaagtggcctaaacttccccggttcttcgtgccattgttccatagcgccaatgtctacctgtgtcgttcaaaggaagagtgggatcaggcttgcattcatcttggagttggtagcggcgggaatgagatgctggcgggggcaacacagtcatattgcaataccgaaacaggcgagaatctttacctgcttggtgtattcaatggtgaggcggccacattggttcatgaatgcgctcacgttgcattttatgtctgccgagatgttggtgtaaccacttatcctggcgacgcaaacgaaacctactgctacatgcttgacagaatgttcagtcacttcctgccgttctttcatgaaccagaaaaagaaggagccaagtaa

SEQ ID NO: 376512 - DNA, 405 bp, Salmonella enterica
atggcaaacccaaacttcacgccatcatggcctctatacaaagatgctgacggtgtatatgtgtctgcgcttccgattaaagctatcaaatacgctaatgacggaagtgcaaacgcagaattcgacggcccgtatgctgaccagtacatgtcagcgcaaacagtagccgtattcaagccggaggttggcggatatctgttccggagccagtacggcgagctgctctatatgagcaagacagcatttgaagctaactacacttctgcaagcggttcagtagctaatgcagagacggcggataagttatctactgcccgcactatcacactaaccggagcggtcacaggttcagcgtcctttgatggttcggctaacgtgactatcgaaacaacatcaggaagttaa

SEQ ID NO: 376513 - DNA, 561 bp, Salmonella enterica
atgggtgtaatgctatataagcagggtcgtggaacgaaggtatggggcaaggacgttcaggttaaagttgtcgatgacggcgacgtagaagatcaccttgccgatggttgggttaggcatccaaatgaggttccggagactaatgacgagccaatcggtgattcaggcgtggtcaagaaagacatgggtgaagtatctgatggataccacacctttaacgaactatatgcacatcgagtgcgcctgttttcaacactaatgaatgccttccgcgaaagcgcatggtggagctttcagcatcatgacggcgagcaatgggatggatgggtgttagctggcatcgacaccccagaaggcgcggtaacataccacctcccagagagtgaaattgaacatctgcctaaaggcacggaaattgagtttggcaaggaatgggacggccacacggcagatgatgtgttgaatcgtctgctaagcctgcgaccgaaagaaccggcaaccaaagaacgcaaaaagccaggaccaaagcctaaggcggaaagcgatgcagataaagactaa

SEQ ID NO: 376514 - DNA, 690 bp, Salmonella enterica
atgttatatgcatttacgctgggcagaaaactgcgcggtgaggaaccttattatcctgaaaaaggcggaaaaggtggcgcagataaaagcgcaaagtatgcagcagaagcgcaaaagtatgccgcagacctgcaaaaccagcagttcaacaccatcatgaacaacctgaagccgtttactcctctggcagataagtatatcggcagtcttgaaggtttatcgtctctcgaaggtcaggggcaggcgcttaataattactataactcccaacaataccaggactttgtggggcaggctcgctatcagaatctggcagcggcagaagcaacaggtggccttggttctacagcgaccagtaaccagcttgcagcaatcgccccaacacttggtcagcaatggctgtcaggtcagatgaataactatcagaaccttgcaaatattggtcttggtgcgcttcaggggcaggcaaacgccggacagacatatgccaacaatatgagccagatttcacagcaaagcgcggctcttgcagcggcaaatgccaacagaccatcagcaatgcaatctgctattggcggaggtgcgtctggtgctattgctggggctggacttgcgaaattaattggttcatcaactccgtggggggctgcgatcggcggcggtcttggtctgcttggctcgttgttttaa

SEQ ID NO: 376515 - DNA, 1437 bp, Salmonella enterica
atggctacgtggcaacagggtattaattctggtggttttctggctggcattggtgcgcaaaatgagaacgcgccaaaggcaagcgacattaacgcaacgcttggactgattcgcgaaaacaatgagttggcccgttcaggcgctaataatgtggctttaacagggctgcgtggtctggctggagttgctgatatttataaccaggaacagcaacagaaagcgctaaacgcattcaatcaggttcatgccaacgcatgggctactggcgacaattcaggactcatcaagttcgcgcaggaaaacccggcgtttgttgcacaggcacaacaggcgttttccggtcttaatgagcagcagcgtaacgatatgggcgatttagccatgaaggctaacgtcgctctttctcaggggccggaagcctacagtaaattcattactgataacaaggacaggttaaaccgtgttggcgctaatccagactggatgatccagactggagtacagaatccagaacagctatcacacatgttgactacgatgtctctcggtgcgcttgggacagaaaaggcgtttgctgttcaggataagatggttggtcgccaacttgaaggagaaagaaaccagttaaccgcaagagggcaggatattagtgccgctaccgctcgaagggggcaggatattagtacccaaaactcgctacgttctgcgggcggggcggttccggcatcagtccgtgaatatcagtatttcaatagtttgtcgccagaacaacaaaaaaattatcttcgtgttcgtggcaggccggatgcaggtggggaaaatgttgtgcaattagcagacgggcgtactgttaatgtcaatggcaagctgcatggatctggcgctagtgcattttacgaaggtactgacgataacggaaatatggttcgtgtcccggcaagtgctattgcagcacctccaacgtctgcggcaagcgcacagaactacgcgatgaagaaagatatcgatgcaatcgcaaacgcagatgcttctgctctcgatttcatgactggaatgactggcggagcaggaaatccggcaattggtgcagatgttcgcagccgactcacaggcaaagaacaacgacagttatataactccgcacaacgtattcagggaagaatgcagaatcagggcgtggcagcagcaagagatatgggtgctagcggtatcaacaccattgcagaagcaaagatgtattttcagggtatgccgcaggttgactactcaagcccggaggctatgcagcagtcgattcgtgagattcaggaatacaccaacaattataacaagcagtacaacgttaatgttggtaaatcgcagtatcagcaatctcaacctgtacaggaatcacagcctgcatccaacagcaacttttcttcactatggggtgattaa

SEQ ID NO: 376516 - DNA, 1977 bp, Salmonella enterica
atggctaaggcatggaaagacgttattgcctctcaaaagtaccaggcattagcaccagagcagaaagcacaggcgcaggagcaatacttcaatgaagtagtagcaccgcaagccggaaacgatgccgaacaggctaaacaggctttctatgctgcttatccacctccaacggctcaacaaccagcaaaacaaccacatggaccggcgcagccacagcaacaaggtggcttcatgtctgaccttagcaatgctgctgcggagacggggcgtggattgcttcaggctggcgttaatctggcaaatatcccggcatcaatggctgatgcagtcgccagcgccggggcatgggctggtcagaagcttggcattggtgacggaacttatcagccatcgcctcgcgtcacgacacaaggacttgagcaggactttggcttgcaacaaggtgcgcttactccacagacgacagaaggcaaaatcttctctgaagcactgccatatttgactcctgttggggccgagagaattgcagcgcaggcatcatctattgccggtcgagttgctcagggtgcatcacgcttgttggcggagaacgctgttggttcattggctgcaaacagtgagcgtgataatccaggagcactggcaacagacttaggaactggtgttgcattaggcggggcaataaatcagttaggccgtgccgctggtgctgcttatcgtgggattcgcgggacgatcgcaccagaagcgcagcaggctattcagttcgctaatgctgctgatgttcctttgcatacaactgacgttttgcagccaaattcccgcgtcgggcgcatggcacagaccaccgctgaaaacatcccatttgctggaacaagcactatgcgagctaatcagcaagaagcgcgcagccagttggtagatgaatttgcatcacggtttggtgagtatgatccgtcaattgttattggcagcctgaaggcaaaaacatcaggaattcggaaagcagcagggaaccgtcttgagcaagttcagagcgcaatgacaggagtcaacattcagccaacgcgagcaattcagcagatagatgatgagattggaaaactgcaaaaattaggacaagttgccgacacggatacaattagcaaacttcaggcatacaggaatgaattggctaaaggtgatgttaacctggaacagttaagcagactgagaacgcagtttaggatggatgtcagaggagaaaggacacaaatgccaccgccagctgaggcggcagtgcagcgtgtatacagggcaatgacaggagacattgataactccattggccagaaccttggaaacgacactctgcgcagatacaagcaggccaatgcggtatacgcagatgaggctagtaagctccagaatacccgcttgaagaacgttctgatgaaaggggatctaactcctgaagttgtcaacaacatgttgttcagcaagaataaatcagaagttcagaatctgtaccggtcagtcggtcaggtgggacgcgctcagatgcgtaacggcatcatcggaaaggctatggagaaatcaggcggttctccggatcagttcctgcgccaggttaatttaatgtctacccagacgggaatcgcttttaaaggacgagatgctgcgtatctgaaaggactgaagaactatcttgagtcaaccaagcgtgctggtcaggcaggagtaacaacgcctacaggtcagcaaactataccgttcatcctaggtattggaacggtaactacccctgcgctggtaggtgttggtggcgggtatggtttgctggcaagaatgtatgagagtgaaccagcacgtaatgcaatgcttcgcctggctaatactccacgtggttctaccgcattcgagaaagcgttagccgaagttgagcgggctgttaactctgttgctcaaggtgctaaatcagatgcattaagcgaatag

SEQ ID NO: 376517 - DNA, 1458 bp, Salmonella enterica
gtgaaatttaatagtaatgacaggatatttatatcaatctttcttggattggcgattatatatacatttcctttattgacacatcaatcatttttcgttgatgacttgggtaggtctttatatggcgggttgggttggtcaggcaatggtcgcccactttccgactttattttctatatcattaattttggaaccccaattatagatgcttctccgctacctttaatgctagggatagttattttagcattggcactatcctgcatcagggaaaagctgtttggagatgactacatcacagcatctctttgttttatgatgattttggcaaacccattctttattgaaaatctatcatatagatatgattcattaacaatgtgcatgagtgtggcaatatctattatctcatcgtatgtcgcttatcaatacaagcctataaatatcataatatcatccattttaaccattgcattccttagtctttatcaggctgcgctgaatacttacgcaatattcttgttggcctttataatttcagatgtggttaagaaaaactcaatttcaaatatcacaaaaaatacagcatcttctgtcgctggtttaatagtaggatattttgcctattcttactttattgcaaaaagacttgtaacaggttcttacaatatcgaacatagtaagattatagagataaactcaagtttatttgaagggataatttctaacgtcttatcattttatagaatgtttagcacgatcttgaatggcgataattacttaatctactactcgctattctttgcgctaatcatttctttgatagtcatagttttaaaagtaatcaaaagagatgaaaataagaaaacaaagttcttgctagtagttttaattttattggcatcaatgtttttcatcattggaccaatgatttttctaaaatcaccaatatacgcaccgagggtattgattggtatgggtggctttatgtttttttgttgcctatgcgtattctatgcttttgaagataagcagttaatatcaagaatatatttttcttttattcttttaatatcaacaatattttcttatggtgcttacaatgccataaatgcacagtttcagcttgaggaaagcattgtaaatagaatatctcaagacatagatcatcttggatttggaagagacaagaaaaatataaaattcattggcacagaaccgtatgcatcaataaatgaaaacatagtaataaagcatcctttaatgagagagttaataccacgcattattaacaataattggatgtggtcagaggtgttaatgcaaagaaatgtgttctccagaaattacagactatatgacaaagaggtgaaacttgaaaatgggtggaaaaaatctggtaataacgtatacgatattggtgttgtaggggaaaccatagttgttaggtttaattag

SEQ ID NO: 376518 - DNA, 927 bp, Salmonella enterica
atggcttcctggggcaaaacgtttaaatatgcctcaattaccgctaactggcagcacgctgttaatcaggatgatgagaatcataacgacagtaatgatgatgatatgttttacatcaacatcagcattccactaggtgagcagcgcgtcggcgcttatatgcgtaatcaaggtgataaaacaacctacgggctacaaaataatggttcgctgagtaaagatacccattactatatttctgcggatcgtgatgcaaaaaaccagcaaaatagcttcaacggtaatctcaatagcaatcttcattacactcaactcagcgtgggcggcggcactgatggcgataattaccgcaactataacgcaaccttcagcggaggcatcgctgcacacgaacatggcataacgttctcgccttatacaatcaaaaatacctttgctatcgcacgcctgagtgaaccagaaagcggcattgaaatcgccacgccacaggggcgaatctggactgaccactgggggcaagccgtcattccggggctaactgaatggcggaaatcccgcgtagaggttaatgcgaatacgctaccaaagagtatggaactggcaaacggtattaagaatattaccgtcgcgcacagcgcttttcgggtactggatttcaacgtgctgaatacacgccgtgtgatgctggcagtaaagcgtccggatggctcatggctacctaaaggcaccagcattgtagatgaaaaaaataactatttggtcagcgctgtcgacagcggacgcgtatttatcaccgatgttggggataatcctgcgttatatgccgctgatgatgatatgaatcgtctgtgtcgcatccactacacgctgcagaaaacccaggataaagaggcattttatgaaacggcaaagggagtctgtcaatga

SEQ ID NO: 376519 - DNA, 1308 bp, Salmonella enterica
atgattgaccctatttttgcgtcctgtacgctaattgccgtctttgttgttttactggccatgggcgcgcctatcgggatctgcatcgttatcgcctctttcagcaccatgatgctggtactgcctttcgatatttcgatgttcgccaccgcgcaaaaaatgttctccagcctggacagttttgccttgctggccgtgccgttcttcgttttgtccggggtgatcatgaatagcgggggaattgccgcccggctggtcaattttgccaaactgtttactggcaaactgcccggctcgctctcttataccaacatcgtcggcaatatgatgttcggtgcaatttccggatcggcgattgccgcctcaacctccatcggcggcgtgatggtgccgatgagcgcgcgcgaaggttacgatcgcggctttgcggccgcggtgaatatcgcctccgcgccgacgggaatgttaattccgcccaccacggcttttatcctttacgcgctggcaagcgggggaacatcgattgccgctctgttcgccggcggtctggtcgcgggagtgctgtggggcgttggctgtatgctggtcacgctggtggtcgctaagcgtcgaaattatcgggttttcttcaccgtccaaaaaggtatggcgctaaaagttgccgttgaggccattcccagcctgctgctgatcgtgattattgtcggcggcattgtgcaggggattttcaccgccattgaagcctccgcgattgccgtggtgtatacgttattgctgacgatggtgttttaccgcacgctgaaaattaaggatttgccttcgattttgctccagacagtggtaatgaccggggtcatcatgttcctgctggcaacctcttcggcgatgtccttctcgatgtcgatcaccaatattcctgcggcgctgagcgatatgatcctcggtatttccgccaataaactggttatcctgttagtcattaccgtctttttgttgattatcggcgcatttatggatattggtccggccattctgatttttaccccgattctgctgccaatcatggctaaactgggcgtcgatccggtgcatttcggcattatcatgatctataacctggcgattggcaccattacgccgccagttggcagtggtttatatgtcggggcgagcgtcggtaaggtcaaagttgaggaagtgattaaaccgttgctgcctttttacggcgcgattatcggcgttctgttattaattacctacattccggaaatcacactgttcttaccccgtctactgggcatcatgtaa

SEQ ID NO: 376520 - DNA, 690 bp, Salmonella enterica
atgcattatccggttgacgtgtttattggcaaaattcgtgactatgacggcagccgcccgagcgctatcgccaaggtgcaaatcgacggcgaactcatgctgaccgagctcggtctggcaggcgatcagcaggccgaaaagaaaatccacggcggccccgaccgcgcgctatgccattacccccgcgaacactatgctgattggattcgccagttccccgagcaggcgacgctgttttgcgccccggcgtttggcgagaatctgtcgacgaacggaatgaccgaacacaacgtgtttattggcgacatctaccgctggggcgaggtgttgatccaggtcactcagccgcgctctccatgctttaaacttaatttccactttgccatcagcgacatggccctccttatgcagaacagcggaaaaaccggctggctgtatcgggtcattgcgccaggtaaggtctccagcgatgcgccgttggaactggcgtcgcgtctgagcgatgtctcggttcatgaagcgggtgttatcgcctggtctatgccgtttgatgacgaacaatatcaccggctgttgagcgccgccgggctgtcggcgagctggagccgcaccatgcagaagcgtcgtttgagcggcaaaattgaagatagcgccagacgactgtggggggataaaactccgccaaaatga

SEQ ID NO: 376521 - DNA, 3141 bp, Salmonella enterica
atgaaaattctcagtttgcgtctgaaaaacctgaactcgctgaaaggagaatggaaggtcgactttaccgccgaaccgtttgccagtaacgggttattcgccattaccggcccgaccggcgcgggaaaaaccaccttgcttgacgccatctgcctggcgctgtaccacgaaacgccgcgcctgaatacggtatcgcaatcgcaaaacgatttgatgacgcgcgatacagcggaatgtctggccgaagtggagtttgaggtaaaaggcgaagcctggcgcgcgttctggagccagaaccgagcccgaaatcagcctgacggcaatctccaggccccacgcgtagagctggcacggtgttcagacggaaagatctttgccgataaggtaaaggataaactggagatgatcgccacgttgaccgggctggactacgggcgcttcacccgttcgatgttgttatcacaggggcagttcgccgcctttcttaacgccaaagcgaaagagcgcgcagagcttctggaggagctcaccggcactgagatttacgggcagatctccgcacaggtatttgaaaaacataaatcagcccgtctcgaactggaaaagttacaagcgcaggccagcggcgtcgccctattggcggacgaacagttacagcaactggaagccagtttgcaggcgcttactgacgaagagaaacgcctgctggccgaccagcagggacagcagcagcaccttcactggctgacccgaaaaaacgagctccacactgaattacacgcccggcagcaggcgctgtacgcggcgcaagaggcgcgagaaaaagcgcagccgcagctcgcggcgttgacactggcgcaacctgctcgccagttgcgcccgcactgggagcgcattcaggaacaaacccgcgccgttgagcgtgttcgccagcacagtgatgaagtgaatgctcgcttacaaagcgcgtatcgcctgcgccagcgtatccgcgcctgcgcgcatcgacaattcacgcaactgaacgccacagggcagcggttgaagacatggctggcggaacacgacggcatccgcgtctggcgcagcgaactggcggggtggcgagcattattaacacaacaatcccacgatcgggcgcaactgagccaatggcaacagcagttgctgagcgatacgcgtcagcgtgatgcgctaccgccgctcacgctcgacctcacgccacaggcgctggcggaagccagagcattgcatacccggcagcgtccgctacgccatcgtctcgccgcgcttcaggggcaaattctcccgaaacaaaagcgtcaggcgcagctacaggcagctatcgcgcgtcatcatcaggagcaggcgcaatacacccaacgtctggcggataagcgtttgagttataagactaaagcgcaggagcttgcggacgttcgcactatttgcgagcaggaggcgcgcatcaaagatctggaaagccagcgggcgcacttacagtccggccagccgtgtccgctttgcggctcgacgacgcaccccgccatcgccgcctatcaggcgctggaactgagcgcgaatcaaacccgccgcgacgcgctggaaaaagaggtcaaaacgctggcggaagaaggagcggcgctgcgaggacagttagatgccttaacgcaacaattacagcgggatgaaagcgaggcgcagtcgttgttgcaggaggagcaagcgcttactgaggaatggcaaacgctgtgcgctacgctgggcgttcagctccagccgcaagaagacctcgcgggctggctgaccgccgcggaagagcatgagcaacagttggatcagctcagccagcgtcatgctctacaaacgcaaatcgcggcgcatactgaacaggtagcgcgctttaccgcgcagattgcgcagcgtcaggcgtcgctgacggcagatttggcgcagtatacgctttcccttcctgcgccagaagacgaggcttcgtggctgaatgagcgcgccgacgaagcgaaaatatggcaacagcgtcagacagagttcgcggatttgcaaatgcagatcgacaggcttgccccgttgctggagacgctaccgcaaacggataccgcggattccgacgacgacgtgccgctggataactggcggcaggcgcatgatgagtgcgtgtcattacaaagccagttgcaaaccctgcaggaacaaacgacgcaggagcagcagcgcgccgccgaggcgatagcgcactttgatgcggcgttaaaaaatagcccgtttgacagccaggcaacgttcctggcggcgttgctggatgaagagaccgtgacccgtctggaaaaacaacaacaaacgctggaaagtcagctacaacaagcgaaggcgttaagcgcgcagtccgcgcaggcgctggctgaccatcagcaacagccgcccgcaggtctggacccaacgtgtacggcggagcagctcgcgcagcggctgacgcagttggcgcaacaactgcgcgagaacacgacacgccagggggaaatccgccagcaaattaaacaggatgcagataatcggcagcgccaacgcgcgctgatgacggaaatgaagcaagcctctcagcaagtggaagactggggctatctcaatgcgctgatcggctctaaagaaggtgataagttccgcaaattcgcccagggactgacgctggataatctggtctggctggcgaatcatcagctcacccgcctgcatggccgctatttattgcagcgcaaagccagcgacgcgctggaactggaggttgtcgatacctggcaggccgacgccgtgcgcgatacgcgaacgttatcaggcggcgaaagtttcctggtcagcctggcgctggcgctggcgttatcagatttggtcagccataaaacgcgcattgattctttgttcctcgacgaaggcttcggcacgcttgatagcgaaacgctggacgccgcgctggatgcgctcgatgcgctgaatgccagcgggaagaccatcggtgtgattagtcacgtggaagccatgaaagaacgtatccctgtgcagataaaagtgaaaaaaatcaatgggcttggttatagcaaactggacaaagcgtttgccgtggagtaa

SEQ ID NO: 376522 - DNA, 321 bp, Salmonella enterica
atgaacaaaatcactgcattacccgtagagcgcgataattacggttactggactcacccgttgtacgaacagttttgcgatggtcgtgaggttatctctccagacgagtttaatgcctggctggaggctaacggtttggaatggaaagtctcatacctggatgacgaggaaatagatcctgacgttgacggatgcgacatttcaacgtggcaaccagatccgccagcaggtaacggctggtttgtcggttccattcacgacaccgaagacggcgcggtctgtatctggttacgcaacgtgcaggacggtcattatgagtaa

SEQ ID NO: 376523 - DNA, 711 bp, Salmonella enterica
atgctggcctatgcaatttccaggggaatcatcttcaacaacccggcagcggctatcgaggctcgttatatcacacaagcaacaagtcgtgatgtggcactgaccgcagaagagatcggcatcctgttacgggggatctacacctctaacatgaaccgacgccacaagctggccctgcacctgctgatcatctgcatggtgcgtaaatcggaattgattgaagcaacatggagtgaagttaacttcaacgcgctggaatggcgtatccccggcgaaagaatgaagatggataatccacatattgttccgctgtcaaagcaggcgctggcgatgttcgaagagctaaaatttctggccggagattccccttacgtcttccccagccgacacggctaccgacgtccgatctccaaaacaacgctgaactgtgcggtgcgtacgctggatctgaacgtcagggattttgttattcatgacttccggcgtactgccagcacattgctacatgagcagggctacaactcggattggatagagaaatacctggcgcataagatcggcggcgttcacggtgtctacaaccgtgcggagtacctgaatcagcgccgggagatgcttcagtcttgggctgattttgttgatgcgcagattgagactggaaggaaggttatcattggacaattcgggaagtcttacaatgtaaccgtatga

SEQ ID NO: 376524 - DNA, 495 bp, Salmonella enterica; identical to SEQ ID NO: 376080

SEQ ID NO: 376525 - DNA, 630 bp, Salmonella enterica; identical to SEQ ID NO: 290967

SEQ ID NO: 376526 - DNA, 765 bp, Salmonella enterica; identical to SEQ ID NO: 6031

SEQ ID NO: 376527 - DNA, 585 bp, Salmonella enterica; identical to SEQ ID NO: 270443

SEQ ID NO: 376528 - DNA, 990 bp, Salmonella enterica; identical to SEQ ID NO: 270442

SEQ ID NO: 376529 - DNA, 2544 bp, Salmonella enterica; identical to SEQ ID NO: 270441

SEQ ID NO: 376530 - DNA, 1926 bp, Salmonella enterica; identical to SEQ ID NO: 270440

SEQ ID NO: 376531 - DNA, 1662 bp, Salmonella enterica; identical to SEQ ID NO: 270439

SEQ ID NO: 376532 - DNA, 276 bp, Salmonella enterica
atgtttatcatcattgtgcttgcagcgttttgctgctgcctgcgtttgtgcattccgcaagcgaccaggcttccatatcgcgatctggctgacagctatgtcgcgttcctggcgctcaattccgagcggccaaacacaagagggcctccctcatccgtcagaacgagtgctggatttccggcttactctatgctccaccccgtctctgtcgccgtaggcgtaaacagagacgggggtagagcccccgacggaagccttgagcctcaagggctctag

SEQ ID NO: 376533 - DNA, 966 bp, Salmonella enterica; identical to SEQ ID NO: 270438

SEQ ID NO: 376534 - DNA, 318 bp, Salmonella enterica
atgtacttttctacgttcgttttgatcatgattgttaccgtgggcgttattgctttcggggctacgattgtcgccaaactactaaataaggcttcgattctggcatatcgatcattgataaaaacgcggcctgtacgggtcgttagcccattggtaactaatagcagttcattgtgtggtgaatggttgaaagctacctccggtagccatcaacctagagtctccgatgctgtcgaatgcgctccgcttgagggggagctggttgctgaacgcgctgtaataggttccaccaggaaattattgtcagctcaaagatga

SEQ ID NO: 376535 - DNA, 186 bp, Salmonella enterica; identical to SEQ ID NO: 290954

SEQ ID NO: 376536 - DNA, 270 bp, Salmonella enterica; identical to SEQ ID NO: 270437

SEQ ID NO: 376537 - DNA, 396 bp, Salmonella enterica; identical to SEQ ID NO: 270436

SEQ ID NO: 376538 - DNA, 858 bp, Salmonella enterica; identical to SEQ ID NO: 290957

SEQ ID NO: 376539 - DNA, 1425 bp, Salmonella enterica; identical to SEQ ID NO: 270407

SEQ ID NO: 376540 - DNA, 672 bp, Salmonella enterica
atgagaaaatctcttttcttactattacctcttgttgtaacaaatgcgcatgcagtatatgtcgatgttcgtcatgaatatcttgatgacagtaaagctaactatgaccgtgcgtatatttctcatcggtttgcgaatggtgttggttttgcgatagaagctatctcaaaatcaggcggggatgacaccaataaagcgtttaatgacctagaaacacagggcaacgaatatacgataagctaccaatttaaaaccggtgatgtcgcctggcaaccgggtttcgtgctggaaacaggcaacggttactctacctataagccttacttccgcgcgacgtggacattaaatgaaagctggtgggttggcgcgcgctatcgttttgaatatgtacgccgttcttctgatatccgtgatgatgataccatcaatcgtatggatgtctgggcgggttataaatggaacaactttgactggacaatcgaaggaatttataagaaagccgataaatatgatctttacgatggcggcaaagataactatgaatataacttcagaactgcctatattattgaccaatggtcgccattcgttgaggtaggtaatgtttccgtcaatagcaacagcgatgaaagacaaacccgtttccgcgtgggtataggctacacattctaa

SEQ ID NO: 376541 - DNA, 930 bp, Salmonella enterica
atgaaaatttcattagtggttcccgtctttaatgaagaggacgcgatccctattttctataaaacggtcagagaatacagttcacttaaaccttataacgttgagattatcttcgttaatgatgggagtcacgatgcgactgaatcaatcatcagcgcattagctgttgccgatcctcttgttgttccgatctcatttacccgcaattttggtaaagaacctgcactttttgccggattagatcacgcgaccggagatgtggtgatccctatcgatgttgatttacaagatcccatcgaagtaatcccacatttgatcaataaatggcaggctggtgcagaaatggtgctggctaagcgtatcgatcgttcaacggatggccacctgaagcgtaaaagcgctgagtggttctacaggctgcataacaaaatcagtacgccaaagattgaagagaatgtcggtgattttcgattgatgtcgcgcgagattgtagaaaatatcaagctattaccagaacgtaaccttttcatgaaaggtatactttcatgggttggaggtcaaacagatgtggtcgaatatgcccgtgctgaacgtgtcgcaggtaactcaaaatttaatggctggaaactctggaacctggcgctggaggggattacaagtttttctactttccctttgcgtatctggatgtatataggagtgagcgtttctgccctctccctgatatatgccatgtggatgatcattgataaattgatgtggggaaaccctgttcctggttatccttcgcttatgaccgcgattctcttcttaggcggcatccagcttatcggcataggcatcatgggtgaatatatcggacgcgtttacacggaggtgaagcaaagaccccgctatatcgtgaaaaacaaaaaaacaatgatggaataa

SEQ ID NO: 376542 - DNA, 1287 bp, Salmonella enterica; identical to SEQ ID NO: 82525

SEQ ID NO: 376543 - DNA, 639 bp, Salmonella enterica
atgtactttgagacgctctggaataccggagcacgactgaacgaagctctggcgctgaaacctgccgattttatactgactccgacacggcagtacccgcaacccgtggtgatcctgaaaacactcaagcaacgtctaaaagaagcagaaagaagaccaggacgcccgaccaccaggcatccaccattacatcctgatccgcgatacagaaaaccaccggagcctgctgtaaggctggttcctgttctggatgccggatacgcattgcgtatgcgggaatacctggcgacctggaaaaagcggatcaaacatcagcctgtgtgggacataacatcgagacagacaccgctgaactggataaacaccgcagtggcacgggcagagcgtgacggcgtaacattttcggttccggtcacgcctcacacgtttcgccacagttacgccatgcacctgacaatgagtggcgttcctccgcgcgttctgcaatccctgctgggacaccgttatgcaagaagcaccgagatttacacccgcgttttttcgctggacgtcctgacaggaagtggcctgtcctttacctgcgatccacggcgagcaaaacagcttctcggataccctgaacgcattaatgatgagtaa

SEQ ID NO: 376544 - DNA, 660 bp, Salmonella enterica; identical to SEQ ID NO: 80409

SEQ ID NO: 376545 - DNA, 303 bp, Salmonella enterica; identical to SEQ ID NO: 80410

SEQ ID NO: 376546 - DNA, 252 bp, Salmonella enterica; identical to SEQ ID NO: 80411

SEQ ID NO: 376547 - DNA, 216 bp, Salmonella enterica; identical to SEQ ID NO: 80412

SEQ ID NO: 376548 - DNA, 528 bp, Salmonella enterica; identical to SEQ ID NO: 80413

SEQ ID NO: 376549 - DNA, 405 bp, Salmonella enterica; identical to SEQ ID NO: 80414

SEQ ID NO: 376550 - DNA, 1008 bp, Salmonella enterica; identical to SEQ ID NO: 19719

SEQ ID NO: 376551 - DNA, 351 bp, Salmonella enterica; identical to SEQ ID NO: 80416

SEQ ID NO: 376552 - DNA, 138 bp, Salmonella enterica; identical to SEQ ID NO: 80417

SEQ ID NO: 376553 - DNA, 516 bp, Salmonella enterica; identical to SEQ ID NO: 80418

SEQ ID NO: 376554 - DNA, 543 bp, Salmonella enterica; identical to SEQ ID NO: 12410

SEQ ID NO: 376555 - DNA, 252 bp, Salmonella enterica; identical to SEQ ID NO: 12411

SEQ ID NO: 376556 - DNA, 228 bp, Salmonella enterica; identical to SEQ ID NO: 80421

SEQ ID NO: 376557 - DNA, 300 bp, Salmonella enterica
atgaaatgctcatctgtttttacttcaaccactaatcatgttttcacattcgaacgagtaacgctttgcactattatccttatgcataaggatacgggacaacagtatgttgtcatatttactgataacaataaaattcgtgactataaaaccggaattgttcctcagtttggcgaaattaagcagagtgatgttgatttagttcttttctacagggacgaatatgaaaaatattttgattcgttaaaagatggtgatgaatgcttgagttttaaagattttattgagtgccttcgttaa

SEQ ID NO: 376558 - DNA, 351 bp, Salmonella enterica; identical to SEQ ID NO: 19718

SEQ ID NO: 376559 - DNA, 138 bp, Salmonella enterica
atgtcaacgcggcagatcgtacagcttgctgattcccttgtcaaaggctgggaaaccagaattccggcaatgaaatttagtgaatgggatcaattccggtggtggttaaactacttgcaagggtatgaaatgttttaa

SEQ ID NO: 376560 - DNA, 249 bp, Salmonella enterica; identical to SEQ ID NO: 19717

SEQ ID NO: 376561 - DNA, 348 bp, Salmonella enterica; identical to SEQ ID NO: 19716

SEQ ID NO: 376562 - DNA, 498 bp, Salmonella enterica; identical to SEQ ID NO: 80378

SEQ ID NO: 376563 - DNA, 1230 bp, Salmonella enterica; identical to SEQ ID NO: 80379

SEQ ID NO: 376564 - DNA, 267 bp, Salmonella enterica; identical to SEQ ID NO: 80380

SEQ ID NO: 376565 - DNA, 234 bp, Salmonella enterica; identical to SEQ ID NO: 19714

SEQ ID NO: 376566 - DNA, 177 bp, Salmonella enterica; identical to SEQ ID NO: 12970

SEQ ID NO: 376567 - DNA, 621 bp, Salmonella enterica; identical to SEQ ID NO: 80383

SEQ ID NO: 376568 - DNA, 327 bp, Salmonella enterica; identical to SEQ ID NO: 80384

SEQ ID NO: 376569 - DNA, 2748 bp, Salmonella enterica; identical to SEQ ID NO: 80385

SEQ ID NO: 376570 - DNA, 717 bp, Salmonella enterica; identical to SEQ ID NO: 80386

SEQ ID NO: 376571 - DNA, 1080 bp, Salmonella enterica; identical to SEQ ID NO: 19713

SEQ ID NO: 376572 - DNA, 180 bp, Salmonella enterica; identical to SEQ ID NO: 12964

SEQ ID NO: 376573 - DNA, 204 bp, Salmonella enterica; identical to SEQ ID NO: 80389

SEQ ID NO: 376574 - DNA, 129 bp, Salmonella enterica; identical to SEQ ID NO: 80390

SEQ ID NO: 376575 - DNA, 687 bp, Salmonella enterica; identical to SEQ ID NO: 80391

SEQ ID NO: 376576 - DNA, 807 bp, Salmonella enterica; identical to SEQ ID NO: 80392

SEQ ID NO: 376577 - DNA, 1119 bp, Salmonella enterica; identical to SEQ ID NO: 80393

SEQ ID NO: 376578 - DNA, 1029 bp, Salmonella enterica; identical to SEQ ID NO: 80394

SEQ ID NO: 376579 - DNA, 1863 bp, Salmonella enterica
gtgaaaacttttaataagtcgcaatctgtttttatattcgctgttatgcttgttgcggcatggtttgcaggttcatttattttctttgtgctttacttcagccagataaagaatctgaaaccattgaaggctgtgttcagatccattgatgcgtacaggatggatatttttacagacagccttactttatctgttgtgactacggatatcagaattttagcctttgttgcacttggagcaggatttgtcgtgtctcttatcatccctgttgcggcgttgataaaactgaacgagaagaaagaaaatattttcggtgatgcgcgatttgcaacaattaatgatattcgtgagtctaacagtttcacgcttgacggtgacgaaaaagacgggattatcgttggtataaaagacaagaaaataatacgctatgtgggagcagcattcagtgctatgggagccggaacaagggctggtaaaggtgctggtatagtcatcactaatcttatgaagtactggtggagtgttattattctcgatccaaaaagggagtgttttaatatcaccagtcttatcaggaaggtgattttaggtcatgaggtttataaatttgatccctttagtccggtaacgcaccgctttaaccctttgtattatgtcagcatgggaacgagtgaaggttttaaccagcttgaaaatctttcgttgattatttacccctataagacagatggtgcggatgctggtagctatcttaataagacggcgggtggtgtttttaaatcttatgctgtcgctttatggtttatgattaagaatgataaggctggactaaaaacgcttgatattgagcctgtcttctcaatgtctaaaattaatcagctttttgagcgtgcagaacccgaacatcttctttcattcatgaatgatattcgttcagaattaagggggaaagacaaaacgcttgctgatattggtgtagctggccttaaggcattcattgagatggaggataaaacaaaagcacaactcaaaagcaactttcttaatggattatcaccgtttgctaaccccaatgtggcaaatgctactgatggaaatgattttgatttgcggcaggtgcggaaaaagcggatgacaatttatttctgtatttctggtgataatgccaggttggctgaaaaaataacaaatattttctttcagcttgctatacaggtgaatcttgaaaagatgccaacggatgatccggaaataaagcatgactgcctttttctactggatgaattcccgtcaattggtgctgtagattacatcaagagtaaatctggtctcattgctggttacaagctgaaattgttgattgtttaccaggtcggctctcagcttgaggaaatctacagttatgcaggcagtaaaacattactggcaagtgcaccctgcaaaattgtttattccgcttctgatgttaaagatgcgcgggagttatcagaagcgatggggacacgaacagtaactatcggttcgaaaagcaaaagtcgtagtcgtggaggaacatcgagatctgaatcagaaagccttattgagcgtccactggtaacaacaaatgaactacttacactgaaatttagtgaagaaatcctggcaatgaagggagaaaacccgattcgttgtgaaaaggcattctactatctcaatgagtatttctttggtgactttgtgaaggttgctccggaacttgcaaacattttccccaggaagaaaggaaagctggttatgcctccacagaaagtatttgaaaatgaaatcgtcgcaaaagggtatctggcagtaaaagatgttcctgatctcgataaagcggcataa

SEQ ID NO: 376580 - DNA, 420 bp, Salmonella enterica; identical to SEQ ID NO: 80396

SEQ ID NO: 376581 - DNA, 306 bp, Salmonella enterica
atgactggaaaaaatagagtggttttaccagccttgctggcgttaggattaatatcaacaaatgctaatgcatctgacccttgcgcttcggtactttgcttatatggaaaagcagtcgggcaaggtggagggagtgaatgcagaagtgctgaaaaggaattttttaatattctgaaaaagaaaaaaggaagcattcgctggagtaaaacttttgatgcccgtaaagcatttctgaatcagtgttcaacggctgatcctgctgctatatcaaaaatcatgagtaagttcggcaaggttaaagggtag

SEQ ID NO: 376582 - DNA, 255 bp, Salmonella enterica; identical to SEQ ID NO: 80398

SEQ ID NO: 376583 - DNA, 309 bp, Salmonella enterica; identical to SEQ ID NO: 12954

SEQ ID NO: 376584 - DNA, 495 bp, Salmonella enterica; identical to SEQ ID NO: 80400

SEQ ID NO: 376585 - DNA, 405 bp, Salmonella enterica; identical to SEQ ID NO: 80401

SEQ ID NO: 376586 - DNA, 2154 bp, Salmonella enterica
atgagactttttatcgcagaaaaacccgcagtagcaaatgatattgttaaggcacttggtggcaattttacccgccatgatggctggtttgaaagtgataacgccattgtgactaactgttttggtcatattatcgaatcacaaccgccggaaaactataatcctgaatacaaagcctggaaggttgaaacgcttcctttacgtctttatcccgtgaagtatcagcctgttgaaagtgcagcaaaacaggttaaaacgattctcgaacttatcagacgtggagacgtgactgaaattgttcacgctggcgatcctgatgatgagggacagctacttgttgatgaagtcctggaatatgcaggaaacacaaaacccgtaaagcgcgttctgattaacgacaacacgcttccggcagtgaaaaaggcactggcaaatcttaaagataatcgtgatttcaaagggctttaccttaaggcgctggcgcgttcagttgctgatgccgtctatggcttctccatgacgcgtgcttacaccattccggcacaggccagaggatatcagggtgttctgtctgtcgggcgcgtccagactcccgttcttggcctgattgtgaaccgtacccgtgctaaccagaaccataaatccagtttttactacaccatgaccggagtctttcagcgtggtgctgatgttatcagggcgaactggaagccaggggaatttgctccgctgacagaccgtaaattacttgataaagcgtgggcagacggaacggctgcatcccttgccggaaaaccggctacagttgaagcggcagcaactgatgataaaaaaacggctgcgccgttgccgtttaacctggtcagactccagcaatacatgaacaaaaagttcaaaatgacggcacaaaaaacgctggatattacgcaacaattacgtgaaaaatataaagcgattacttataaccgctctgattgctcatatctttctgatgaacaattcagcgaagcaccgcaggttatcgatgccctgaaatcagtctttcctcagtcgctggatattgattctgcacgtaaaagcaaagcgtttaacagtgcaaaggtgactgcgcatactgcgataatcccgaccgccagtgtgcctgatgttaacgcactcagcaccgacgagcgcaatgtttacctggcgatcgcacaacactatcttgttcagttcatgcctgaaaaagcataccaggaagtatcggttgccattcagtgtggtgatgagtcgttctgtgcccgtgccagaaaaacaactgacagcggatttgaggcgtttcttggcgcggaaaccacagacgaaggtgaatcagaagataatgatgattccgcttttgaactgctctgtaaaattcgcacaggagaaacagtgacgacaaaagaagtggttgtgaatgagaagaaaacaacaccaccgccattattcaccgaagccactttacttgccgcgcttgttcgtgtcgcagattttgtcactgatccagtgattaaaaaattactgaaggataaagatcgggataaaaaggatgaacatggtggcattggtacgccagctacccgcgcagccattctggaaacgctgaagaaaagaaactatatcacgctggaaaaagggaaacttattcctactgataccggatatgcgcttattgatgccctgcctggtatagcagttaatcctgatatgacagcattatggtctgaaaagcagacagccattgaaaatggcgacctgacggttgaagagtttattaatgagctgtacggtgaactgacaggcatgatttctgatgttgacctgggcgagatgaagattgaacccgctgcgccagcagggcagtttcaacgcctggactctccctgcccttcctgtggtaaacatattgttatcagaccaaaaggttatttctgtaccggatgtgaatttaaaatctggagtgagttttctggtaagaaaatcacccaggcgcaggcagaaaaactggttaaatcagggaaaaccgatttgattaagggatttaaaaagaaaaacagtggaacgtatgatacagttcttgttcttgaggataagaaaacagggaagctgggttttccggcaagggctaagaagtga

SEQ ID NO: 376587 - DNA, 465 bp, Salmonella enterica; identical to SEQ ID NO: 80402

SEQ ID NO: 376588 - DNA, 654 bp, Salmonella enterica; identical to SEQ ID NO: 80403

SEQ ID NO: 376589 - DNA, 792 bp, Salmonella enterica
atgacgaagaagaccttagctgaaagatttgaagtgcttgaacaagagtacaattctgtcatgtcgacaaaatatatgggaacaagtgcatttagtcacagaagccaggaatatattgattcggctaaaggtaataactggattgcaagagcaaaaaagttacttgaagacagttatggaaaggaatctgattactacaaagattttaatgatacacaaaggattgcttggtctagtaattatcagggattggttagacattacaaacctatttttgatgcagccagagacgatttaacttactccggcacggcatcgactatagcaacaaaacatgccgaactggatttgattataaatatactcaataaatttccagctttttgtcgtcaattaaagcaacgatacaatgacagaacgccgcttgaaattaatgacgagtatgatgtacaggatcttgttcatgctcttctgctgctgcattttaatgatgtcagacctgaagaaaattcacctagcttcgcaggttcatcatccagacaggattttcttctgaagaaagagaagattgtcattgaagtgaagaaaactcgccgctctctaggggcaaataaaattggagaggaactgctcattgatatggcccgttaccgtgcacatccggactgtgagacgctagtatgctttgtatatgaccctgaaggttgggtgactaaccctaaaggtgtgatagacgatcttgaggggaaagataccgaaggaaagactagagtcgtgatagctcagttctga

SEQ ID NO: 376590 - DNA, 195 bp, Salmonella enterica; identical to SEQ ID NO: 12839

SEQ ID NO: 376591 - DNA, 480 bp, Salmonella enterica; identical to SEQ ID NO: 12838

SEQ ID NO: 376592 - DNA, 534 bp, Salmonella enterica; identical to SEQ ID NO: 270413

SEQ ID NO: 376593 - DNA, 2760 bp, Salmonella enterica; identical to SEQ ID NO: 270414

SEQ ID NO: 376594 - DNA, 228 bp, Salmonella enterica; identical to SEQ ID NO: 67537

SEQ ID NO: 376595 - DNA, 954 bp, Salmonella enterica; identical to SEQ ID NO: 290965

SEQ ID NO: 376596 - DNA, 1218 bp, Salmonella enterica; identical to SEQ ID NO: 270417

SEQ ID NO: 376597 - DNA, 5688 bp, Salmonella enterica
atgcaaaagaaaaaacttatttctatcgctatcgctttaacgctacaaagttattacattccggccatcgccgcagaaaataacgatgatgaaaaagaatgtcccagtaatatctcctccctgcctaaagaaaaacgcgcaaaactctcaccgacctgccttgctacacctgaaaatgataatcactggggctgggttgctggcggcgttgctgcattggtcgcaggtgtggctattggcgttgaaaataacggtggcggagattctaatcattcttataccccccctaagcccgataatggcggcgacgtcaccccgcccgacgatggcggcaacgtcaccccgcccgacgatggcggcaacgtcaccccgcccgacgatggcggcgatgacaatgtgaccccgcccgacgatagcggcgatgacgatgtgaccccgcctgacgatagcggcgatgacgatgtaaccccgcccgacgatagcggcgatgacgatgtgaccccgcccgatgatagcggcgatgacgatgtaaccccgcccgatgatagcggcgatgacgacgacacgcccccagatgactctgttattaccttcagcaacggcgtcaccatcgataaaggcaaagacaccctgaccttcgacagcttcaaactggataacggcagcgttcttgagggtgccgtgtggaattattcagaacaggacaaccagtggcagctcaccaccgcggacggtaaaacgctgaacgtcaccggctgggacgtgaccgacgccaatgccgccgtgattgaaggcacccaggaaaacggtctctactggaagtacgacagccggggctatctgattattgccgacgataacaccaccgttatcagcggcgatgaccaggcgcataattccgatcgcggcatggatatcagcggccaggatcgcaccggcgtgattatttccggcgatagaaccgtcaacacgctcaccggggactccagtgtgaccgacggtgccaccggcatggttatctccggtgacggcaccaccaacaccatttcgggccactccacggtggacaacgccaccggcgcgctgatttccggcaacggcaccaccaccaatttcgccggtgacattgccgtgagcggcggcggcaccgccatcatcatcgacggcgacaacgccacgattaagaataccggtacctctgacatcagcggcgcaggctccaccggcaccgtcattgacggcaataacgcccgcgtcaacaatgacggtgatatgaccatcaccgacggcggcaccggcggccacattaccggcgacaacgtggttatcgataacgccgggagcactaccgtcagcggcgcagacgccacggcgctgtatatcgaaggcgacaacgcgctcgttatcaacgaaggtaatcaaactatctctggcggcgccgtcggtacgcgcattgacggcgacgacgcccataccaccaataccggtgatatcgcggtggatggcgcgggctctgccgccgtgattatcaacggcgacaacggcagcctgacccaggcgggcgatctgctggtcaccgacggcgcgatgggcatcatcacctatggcaccggaaatgaagcaaaaaataccggcaacgccaccgtacgtgatgcggactcggtgggttttgtggttgcaggcgaaaaaaacaccttcaaaaacaaaggggatattgacgtcagccttaacggcaccggcgcgctggtgagcggcgatatgtcgcaggttacgctggatggcgatattaacgttgtctcagtccaggacagcgaaggcgtgtttagctcagcgacaggggtgagcgtgagcggcgacagcaacgccgttgatatcaccggcaacgtaaatatcagcgccgactacgggcaggatgatctggctgccggggctcccccgttaaccggcgttgtcgtcggcggtaacggcaataccgttacccttaatggcgcgctgaatattgatgacaacgatctgtccgccaccggcggacaatacctggacgttgttggcctgagcgtaacaggtgatgataacgacgttgagattgacggcggtattaatatcacccacagcgaggatccacttgatggaacctctgcagacattaccggcatcagcgtcagcggtaacagtaccgttacgctaaacggtcattctaccattgataccaacacggtagtgggggggcacgttgtactggcgcgggtcaacaacggcggctccctgattctgggtgatgactcagttgttgacgttaatgtcagttatatacccacaggctattatacctacaacgcgttgctgatggctgatggcgaaggcacatcaattgaaaataaaggcgatattacaagccatggcgtgtattccgtcattcgcgcagataacggctcggaagtcagcaacagcggagatattctggtctacgcgaccagtagcaacagtagtgaggatcgtgcagccatcacaagggctagtggcgagggatcggctgttcataacaaagccggcggcgatatcaccctcatttctgatcagacgccgcagggcagtggcggtattgaagtatacccattgaaatggtacacccacaccttttacgccatgatggcttcggattatggcgatgtcgttaacgatgagggcgccacgatccatttgcagggggcaggtgtatatggcgttaccgccagccgaggtaaagcactaaacgaaggcaatatctatctggatggccttgtcccgacgctggacgatgaaaataacatcaccagcaccagctactggcagccatcatcgctctatctcaccagctcaggaatggtggcgggttccaccgatgccgatggcgacgccaccgccatcaacaccggcaacattaccgtcaacaacgccgggttcggcatgatggcgcttaatggcggcaccgccattaaccagggcgtgatcaccctgaccgccgatgacggcgtgaccggtcaggcagacgagctggtcgggatggcggcgctcaacggcggcgtcgtcatcaacgacaccagcggcgtgattaacatcgacgccgattacggccaggcgtttctgagcgacagttccagctacatcatcaataacggctctatcaaccttaacggcagcccgatggatgatactgattcacacatgggcggcacgccaacggacaaaatctggattcagtctctgcccggcagcggcgacagcgacaccaggacctccgacacaggtttcttcaccgccggtacgctggccaactacggtactgaaaccctgaacggcgatgtggacgttaacgggggctggctgtacaacgaagcgggcgcctcgctcaccgtcaacggcaccgtgacgattaacggcggggctaacgcgctggctaactacgggacgctggacgcggacgctatttccacctggcacagcctctttaatgaagcggacggcagcatcaccaccgatctgttaacccttaatggcgacgtcactttttacaataacggcgatttcaccggctccatagcgggcaccagctaccagcaggaaatcgtcaatactggcgatatgacggtggcggaagatggcaaatcgctggtcagcggcagcttctatttctataacgaagaggacgctacgcttaccaacagcggcagcgcggtggaaggcggcgagaacaccatcatcaatctgacgcgcgccaacgattcgctgacccaggtgaacagcggcaccatcaccgccactaacggttacagcgccatcaccacggtcaacggcagcaatgaccccaaatggatctggaacaccgcaaccggcgtgattaacggtattaacccggatgcgccgctaatcaatttgggccgcggctataacttcggcaaccagggcactatcaacgtgcagggcgataacgccgtggcgattagcggcggcaccagcagttatgtcattaacctggtcaatagcggcaccatcaacgtcggtaccgagcagggcaaggaggacggcaccaacggcaccgggcttatcggcatcaagggcaacggtaatgccaccaccataaacaacaccgcagacggcgtgatcaacgtttacgcggatgactcgtatgcgtttggcggcaagaccaaagccatcatcaacaacggcgaaatcaacctgctgtgcgacagcggctgcgacatctacgcgccgggtactacgggcacgcagaacgaccataacgggacagcggacatcgtcatcccggatgcgactaccgccccgaccgagggcagcatcccgacgccgccagcggatcccaacgcgccgcagcagctctccaactatattgttggcaccaacgccgacggtagctccggtacgctgaaagccaataacctggtgattggcgacaacgtgaaggtggataccggctttaccagcggtacggcggataccaccgtggtggtggataacgccttcaccggcagcaatatccagggcgcggacaacatcacttccaccagcgtggtgtggaacgcccagggtagccaggatgccgacggcaacgttgacgtcaccatgaccaaaaacgcctatgccgatgtggcgaccgacagctcggtaagcgacgtggcgcaggcgctggacgccggttacaccaacaacgagctgtacaccagccttaatgtggggactaccgccgagctgaacagcgcactcaagcaggtgagcggtgctcaagccaccacggtattccgtgaagcgcgtgtactcagcaaccgctttaccatgctggccgacgccgcgccgcaaattaaagatggtctggcgttcaacgtggtggcgaaaggcgacccacgtgcggagctgggcaacgacacccagtacgacatgctggcattacgccagacgttggatctcaccgccagccagaatctgacgctggagtacggtattgcgcgtctggatggcgacggttcgaaaactgcgggcgataacggcctgacaggcggctacagccagttctttggcctgaagcacagcatggcgtttgatgaaggtctggcgtggaacaacagcctacgctatgacgtgcataacctcgacagcagccgttctgttgcctatggcgatgtcaacaaaattgccgattccgacatgcgtcagcagtaccttgagtttcgcagtgaaggggcgaaaactttcaccatgatgggcgatgcgctgaaagtcacgccgtatgccggggtgaaattccgtcacaccatggaagatggctacaaagagcgcagcgccggagattttaacctgtcgatgaactctggcaacgaaacggcggtagactctattgtcggcctgaagctggattacgccgggaaagacggctggagcgccaccgctaccctggaaggtggcccgaacctgagctacagcaagagccagcgtacagcgtcattacagggtgcggcgggtcaatcgttcggcgtggatgacggtcaaaaaggcggcggcgttaatggtctggcaaccatcggcgtgaaatacagcagcaatgataccgcgctacatctggatgcctaccagtggaaggaagacggtatcagcgataaaggctttatgcttaacgttaagaaaacatttcgttaa

SEQ ID NO: 376598 - DNA, 612 bp, Salmonella enterica
atggctaaattaccgcgccgtaagtgcgcaaacaaagaatgccgccagtggtttcacccgatacgcgaggggcagatcgtttgctcgtaccagtgcgccagcgccgtcggcaaagaacagaccagaaaagctcgcgaagccgcgcaacgtaaggcgcaatcccttcagcgcgccgctgagaaaaaagaacgcgccgcctggcgccagcggaaagccgcggttaagccgctgaaacactggattgacttgacgcagcgcgccgtaaatgacatttgccgcgaaaccgaactggcagaaggactcggttgcatctcctgtggaacgaagacggcattcgcatggcatgcaggccattacaggagtacggccgccgccgggcatctgcgcttcactcgcttcaacatccatcttcagtgtgatgtctacaacgtctacaaatcagggaacatcgaagcatatcgtgccgcgctggttgagcgttacggggaggcggcggtgctggcactcgagaacaataacaccccgcaccgctggacggtcgaggagctgaaggaaatcaggctcgcggcactggcggatctgcgtgcgctaaaaaagctggaggccgcatga

SEQ ID NO: 376599 - DNA, 207 bp, Salmonella enterica
atggcgatgaaatactcctggttccatcatcacgactgcacaaccgagcaggccgacacgctgatatcggattatcagaagcggggcgtaaggacagaaaagagcctgaaccctgacttcattacctggactgtcagcgcgaaattacctgaatatgcacaccgggtgcggacgccaaaatccttacgccaaaaggtctgggggtga

SEQ ID NO: 376600 - DNA, 381 bp, Salmonella enterica
atggcgcacgaattacaactcatcaagcagtcatctggaattctgatccccgctacgccggagaccagcgaaattctgcagtcaaaaattaaactcggtgccgtgctggtggctgagttccgtcaggttaggaatcctgcattccatcgccgctttttcgcgttgcttaatcttgggtttgaatactgggaacccaccggcggcaccatttctgccaatgaacgcaaactggtaaacggttatgcaaagtttctcgctgcatatggcgggaatgagagcgcattactggatgcggctgaacagtatctggaacagattgcaaaccgccgggtaacaaacggaattagcctctgtaaatctttcgatgcataccgcgcatga

SEQ ID NO: 376601 - DNA, 1542 bp, Salmonella enterica; identical to SEQ ID NO: 375980

SEQ ID NO: 376602 - DNA, 135 bp, Salmonella enterica
atgtccctccctacaaattttaatgatattcttcgtttttttgaaaaagattacgatacagccaaagaagataatgctttaagtgcacgcggccaatttctgcaactttacccccttaatcacctaaaaaaatga

SEQ ID NO: 376603 - DNA, 1422 bp, Salmonella enterica
atgacttctacgccgatatccagaccgacgcttaatccggccctgagaaacttctggaccacgcaggcgcgaaataaggtgctctatggcgggcggtcatcgtcaaaatcatgggatgcagccggatttgcaatattcctggcaaataaatacagcctgcgtttttgctgcgctcgccagatccagaacaaaattgaagaatcggtttacacgcttctcaaaattcagatagaccggtttggcctgcggcatcgtttccgcattctgaacaacaaaatcattaaccgggttaccggctcggaatttgttttttatgggttatggcgcaacatcgaagaaattaagtcactggaggggatcgatgtgttgtggctggaagaagcccatgcactgacggaatatcaatggaaaatactggagccgacaatccgtaaagagggttcagagtgttggtttatttttaaccctggactggtcaccgatttcgtgtggcgtaactttgtggtcgatccgccagaagatacgctgattcgcaaaatcaactacgacgagaatccattcctttcagacaccatgctgaaggttatcgatgcagccaggcatcgtgacccggaagggtttgtgcatgtttatgagggcgtaccagagtctgatgatgatgcggcaattattaagctttcgtggattgaagcggctgttgacgcgcataaggttctgggctttgagcctgaaggacgtaagcgcatcggtttcgatgtcgccgacagtggtgcggataagtgtgccaacgtctatcgacatggttctgtggtgtactgggccgacgagtggaaggcgaaagaagacgagttgctgaaaagttgtctgcgtacatacatggctgctttagaacggggggccgatattgtttatgactctattggtgtcggggccacagcgggtgccaagttctctgaaattaatgaagatcgcaggcgtgctaatcctgtggcatcgcaaatcacctatcaacgttttaatgccggagctggtgtgcatgagccggataatgaatataacggtatcccaaataaagacttttttgcaaacctgaaggcacaggcctggtggctggtggctgaccgtttccgtaatacatttaacgccgtgaacgcggtgaaaaatggagaggtgggagagacattcagcgtcgatgagttaatcagtattgattcctcatgccctctgttggaaaagctcaagctggaactcaccacgccacaccgcgattttgaccgtaacggtcgtgtaatggtggaaaccaaaaaggaactggcgaaacgtgatgttccatcgccgaacgtagctgatgccttcattatgtcctttgccccgacggtaatgcctatcgtaatttctgatgattttatggagtggatttga

SEQ ID NO: 376604 - DNA, 753 bp, Salmonella enterica
atggcaaaaccggactgggaggccatcgagacggcataccgggccggagttatgagccttcgtgaaatcggtactctgtatggtgtaacagaaggggcgataaggaagaaagctaagaagctggagtgggtacgcaaaaatggtacgcaggtacgcaaaaatggtacgcaaaaaaacacggtgcgtaccacgaggaagcctgccagctccggtgcagtgcaaaagcattcacagccagaaaccaaacctcccgcagatacgaaacccgaaacggtacgcaaaaaggttgtcactaatcatcccccttttcagcccggtaatcagtatgcactgaaacatggcggttacgcccggcgccttctcctgaaagatgaagtcgttgaggatgccagagcgctgacgcttgaagatgagctcttccggttgcgggcgaataacctgatggccgccgagaacattggtcgctggctcaccctgctggaggatgcggaggaagagcagcagcgcaaaattctgatggataacatcagcgctgccgaaaaggcgatgatgcgtaacaccgtgcgcattgaatccatcgttggaacgctggcgaccgttagcaaaatacacgccgacactgattatcgtttggcggctactgataaggtatctctccaggctgacaggctgcgacgtgatgctggtatcgatgatggtaacggagaacgtgacctgaatgacttctacgccgatatccagaccgacgcttaa

SEQ ID NO: 376605 - DNA, 183 bp, Salmonella enterica
atgccggatatgaaagatatcgtcaccgacgacatggtgaaaaacgccctcaaatcagacgccgttaccatcgcagttaaaacgcagattaaatccactctggatcagcagattgacgccgctgtcgataccgcattgaccgatattctcggtagtgatgctgataatacggttatgcagtag

SEQ ID NO: 376606 - DNA, 489 bp, Salmonella enterica
atggcgctcaggacaaaagttaaggctcttctggctggtggcgcgagtgcaatagtgatagctgcggcgatgcttggcggtaatcacggtctggaaggcaggcgccacgaaccctatcgggatgtggctggcgtacttaccgtatgtgacgggcatacgggaaaagacattttacctggcaagcactacaccgatgcggagtgtgatgcgctactgaataaagaccttgcgctggtggctgctcgtgtagatccactgattaagaccactatcccgaacagcgaaagagctgcactctactcctttgcgtacaacgttggtactggcgcgtttgccaggtcaaccctgttgaaaaaactcaacgctggtgatctggccggagcctgcaacgagcttaaacgctggacgtatgcaggtggtaagcagtggaaagggctggtaacgcgtcgcgagatcgagcacgaggtgtgtacgtgggggctgaaatga

SEQ ID NO: 376607 - DNA, 309 bp, Salmonella enterica
atgacaatggataaacatacaacatggctggcctacatctgggcattaatcagcggcatatgcgcccagtggacgttaaacgactatggcgcgttgataggtattgttctgggtattggtacgtttctggttaataagcattacaaaaaaaaatcagagcaggctcaggcaaggcaggctgccgcgatggaggagcgtaacaggctaatcgcccggattctggaaaaaaacgaccatgacagcacgttaaaaatgctggcggtatctgaaatgccggagggcaataatggcgctcaggacaaaagttaa

SEQ ID NO: 376608 - DNA, 639 bp, Salmonella enterica
atgacgttcattttcgcgctccagtgcggcattgcgtacagcagcatcggcatactgcatggcggtaatgcgcgccacctcccgttggtgccgcagggattcagtttcattatcccggttcagcgcggcattctgctcgttccgacgtttctgcgtttcctgataattacgctctgcctgcgccttcgcatccagcaggtccttctggcgtttctgttccttaagttcgttcagctgctgctgatcgtattcagtctgggaggaagacaccgtccagggcgtttttctgccgcgcgcgattttttcctgcagtgtcgcgatcttttcatcgagcgtatcttcccgcccgatatccagcatccgatcccatgcccacttcgccgcatcaccgacagcattccatgctctttcaatccagcccagattgtcgtgtacgtctcccatccgcttattcatttcttccgaatacgcggacatggcaattttcgcggcatcagccactcttccctgctcgcccagtaccctgatttgttcaagctgggtggaggtcagaaaatgcagtgtcctgtccagttctttcgccgcattcaccggatcatcccgcaggcgtttaaactggcggatggtttcatccactga

SEQ ID NO: 376609 - DNA, 483 bp, Salmonella enterica
atgaatctgttacctgtattgctgaaaaaatactggttgcaactctcagtgactttgctgattgctgcacttgcatggacaacagagcattaccgcgacaacgccattcagtataaatcgcagcgcgatacagccagccatagcctgacactggcgaacgcgacaattaccgacatgactaagcgccagcgtgacgttgctgcccttgatgctaaatacacgaaggagttagctgatgctcagaccaggaatactgatttgcagcgccgccttgctgctggtggccgggtgcgcgtcgaagggcgatgttcagtgcccacccggaccgaaaccgccagcaccagccgcgtgggcaatgctgccaccgtcgaactctctccaggtgctggacaaaacgttctcaatatccgcgccggaatcatcagcgaccaggaaaaactgaagtatttgcaggagtacatccggacgcaatgtctgaaataa

SEQ ID NO: 376610 - DNA, 189 bp, Salmonella enterica
atgaaagaagggtattactggattcagcataacggtgttgctcaggtggcatactatacgaatgacacagttgacgatctggaatcaggacagcttattgtcggtgtctggcatctgacaaggggcgatgatatctgccataacggtgaagcagaagtactgtctgggccgttacagccaccagtttaa

SEQ ID NO: 376611 - DNA, 426 bp, Salmonella enterica
atgaaaaataaattaaaggttttggctcttactcttgcgtcgttatccagtgtttgttatgcaaacatggctgattataatacgtatcagagtaatgttcagattaacaatctgtcttatggcgtgtataggtcaggggataaggaaagtcagtttttttgtgtcggactgaagagggggagtcaagttcctaatgtccataccatatgtaaaatagatgtgttcgggactcataaacaggggtttgataacatgctggcgacagcaaggtattattatgcaacaggggaggatgtaagaatatattataaagagaatgtctggactgacagaaattttacagcagcattctctggtaatgaattaattgcgataactacttgtacttcatcagattattgtatgggacctacgttgccaaactaa

SEQ ID NO: 376612 - DNA, 726 bp, Salmonella enterica
atgataaaaaaagtaatattatttttagcatttttttctggttatgcaagtgctgttgattttgtatatcgtgttgactcgagacctccggatgtgattttccgtgatggttttaattctcatggtaataacaggaatcttcagcaacatattagaggtgactcgtgttccgccggtagtcgggacagtaactacattgcgactacctcagatattaatgagacttataacatagcacgggtatattactccagaacaacatttagcggcaggttgtatagatacagaatccgtgcagacaatagtttctacagccttccgccgtctgtcgcttatattgagtcacgtggtatccagtttagtcattttgagcgagtgatgatgcggttgcaaagtgagtatgtagccgtaaattctatcccaattgaaaatatccaggaagcagttgagcttgtttacgacagaaatacaagtcaggtaagagacggatctggaacatcaaattcccgttatttacgcgtgagtacacaatcaaatcctggggtaatacccaacttgccagtaccacaggtaagtacccgggaaaggattagtgcatttggtaccttaatcagtgcttgtttttcaatgagaggagtacgcagggatgatgcacgtagtaattataattactatgaaatggagttttatgacgcacggggagttttaacggaattattggactga

SEQ ID NO: 376613 - DNA, 405 bp, Salmonella enterica
atgtacggcctttggcgctttgcgtaccaggtcaataatggtctgtcggtcgtagcctttgatgtcgggaataatgcccactgtcatcgacatttgtttccagtcttcccggtcttcggcgatgatacgttttgcaaaatccattgcaggacgcaggttattcagatccagctcctcacagaaaccacaagcgagctcatagttaatcgttctgtgtgtcggtttttcgctacggcgtggacgttctggcttatttacgtcgtcgacaattactttatgtggcccggtttttttaacaggtgcaggtttattcttcaggcgttcagcccattccttaatcagcaggccgcggttaatgtgttcagcactgaaccattccttaaaaaacttaatagtggtgcataa

SEQ ID NO: 376614 - DNA, 159 bp, Salmonella enterica
atgaaagtgccaggaaacgcctcggctttaaagccggttttttctggtgtacagctaaaaagcagtcactcgccctctcccgtggcgaactggctatggatgctgccggatttgatgaagctgattttgccagacctgtacgcgtacattttccggtag

SEQ ID NO: 376615 - DNA, 462 bp, Salmonella enterica
atgactgagcgccaaatccggctgatttgtcagcagtgtatggagcgatgccgggcggctgagacatggcctccggacctggctgagtttatttcgctggtttctgaaagcggagctaatgcgtttggtctcacagccgatgcggtgctggcggaatatcgtcactggcgtaacgagtcctggcgctactccggcagtgataaatatccgtggcctcagccggttctgtatcacatctgcaccgagatgcgcagaacgggcgttgagcaccagatgacggaaggcgaactgaaacgacttgcagaacggttactggcgaagtggacaaaacacgtcggtaatggtttcagcataccgccggtacgccgtcaactggcagcgccgcgtcatccggcagggccaaccccggcacaactgatgatggaagaattcagacggcgtaaggcggcgggaaggctttaa

SEQ ID NO: 376616 - DNA, 153 bp, Salmonella enterica
atgcgaaggaactatgtgttttgtctggttgttgtttgtatcaccattctgattttggtctggatggttcggggttcactttgtgaactacatatcaggcagggaaacacagagctttcggcgtatttagcctacgaagttgaacaacgttaa

SEQ ID NO: 376617 - DNA, 327 bp, Salmonella enterica
gtgctcttatctgaaatgaaaacttaccgcagtaaaaaatggctggcagccgtcgggcagattgagcagtgcgtgctgtgtggtcggtggggaacgcaggtcgcgcacatgaatgaaggcaaaggcatgggaatgaaaactgatgactgcgccacggcggctatttgtcaggaatgccatcatgaaatcgataacggcagtcacctgagcagggaagagcgccggtgtctgatgaacagggcaatcgtactgacagtgattgaagttgcccgccgcgggctggtggtgcccgccgcgggctggtggtgcccgcatgaaaatttatga

SEQ ID NO: 376618 - DNA, 342 bp, Salmonella enterica
atgcgtgatatgtatgaagtaatggaccgttggggtgcttgggctgccgcggatagtagtggtgttgactggcaacctattgccgctggttttaaaggtttgctaccacatggtaaaaagtcgcggctgcaatgtaatgacgatgatgggataatgattgatggctgtgtcgcacgcctgaagatatataaaccagaggagtatgaactaataattgctcacttcatcctagggatttcattgcgtactattgcaaaaaaaagaaaatgttctgatggtactgtaagaaagaacttgcaaaccgctctcgggtttgtagatggagtactgtcaatgttataa

SEQ ID NO: 376619 - DNA, 531 bp, Salmonella enterica
atgcctttgtatgaatggcttataaataaaaggttgaggtgtcagtacttagtcctactcctactgtcagccctagttttgctggggctgtacttcctgtatcgaaacacacctggcgtcagtgaaaaattctttgacttttatcacaaaaatctgcgtgggtatctcttttctggattcatttctgttggctcctttttattgagtttgcatacctttgtcattataaacattagagataaagtttttgcaactcctgaatataaagatacttacagtaaggcgaatggtatttctccagataaaataaaggatgctgatctctacaaacctttagataacctttcttctttcattaatacatcgattttattttcactaacgactgctattgcccagtttaccatcggcctttcaaccaatctgttcgcttgtttattttgcgtctggcttgccatacttactatttttttcttgttgcactgtctaattataattagacaaaacataagacttctgttgaaacaatag

SEQ ID NO: 376620 - DNA, 930 bp, Salmonella enterica
atgcaagttaaaagcttaggattttcaataacaaatgaaaatgaaaatatcaatacaatagatgtaatgaatgaatttattaaagcatcttcacgacaatatgatcgcgcggattatactcgcaggatactcatgtcagatgtgaatgatttttattatggtttggtggtcacgttcaaaaatcaaaagaagaactgtaagtctcaattcattgacggaaaatttcaactcaaagtggaagatcttcagggtgacgaaaaattggccacattcaatttatttttgctgaataaaactaatcttcgcggcctgtatatgtctcatcatggatcttgcagcctgaacacactcttcagccacttacaaagcgtgagtaatgagtttatcagaaagcagaacgcagcagatattgtaaaactgggggacaagccaaagcaaaaagaagtcactgcagttaacaaaaaatacaagaaacgtttttcatttagcatcatgacaaccaaggaagatattaaaaccatccttggacaatttagagaaataaaaaaagcatcatttaaatttgattacattgactttaagggcggaccaatgactccactcgaagcatttgctaattcaacaacaatagacatgtgcattaatccagatgataaatataaaattggggcactatcacaaacaatgtcagatgcctttaatgccatgaaaggaggaatatctaaggcgagagttactgcaattgatcacagcgggatagagaagatcatagatttcatggattgccctgctttctttgaatcgtatgattttgatgtaatagcagaaaaagttaatggcctgacaaacgacaattatacttccaatcctgtatttgatataataaaggatgagatattaaacggggccaacaaaaatgcctttgtatga

SEQ ID NO: 376621 - DNA, 207 bp, Salmonella enterica
atgtatcaatcgggtcaacacagtcactcattgtttccgggagtgaacagcgacaacctcaaaacgtttgtgcttgaagttgactgttatcatttagaggatgcgctgaaagcaatggaaaaagttatccaggagttaaagctgagtcagagctattttggctacggaagtaaaaccggagtcaggacagcaatccgttattcctga

SEQ ID NO: 376622 - DNA, 546 bp, Salmonella enterica
atgaacgggaaaacgttgtacaccctggacaggctcggaacattatcagcaggagctcgcattgaacatcaaacagcttgttgttccatcgaacttcaggagcacgtcgcaaatcgtttttggtcacaagtatcaaggcacggcaataattatttcttcaaccacaatatcaaccttcttaaatccaaagaaaatatgagtattttcatggaaatgcttcttgaagaaagaagaagagcaaactttccagataaaccatcccggtttcgttctctctttgcctgtgaagctatccatgatgcagccaggtttagattgttaagccatgtgccttcaaatacagctatctatgaagtccatcagaccgcaggttgccacagagctgatatgaatttactcaatgtaaactgtacccctccagaaatgtcacatcgactggatctttactggcaaggtaaaacaaaagaattgtatcccggctatgaaccattttgggaagtacttgtaccgttacctgcaatcattggtgggaggattcaggaataa

SEQ ID NO: 376623 - DNA, 447 bp, Salmonella enterica; identical to SEQ ID NO: 290975

SEQ ID NO: 376624 - DNA, 1215 bp, Salmonella enterica; identical to SEQ ID NO: 290976

SEQ ID NO: 376625 - DNA, 627 bp, Salmonella enterica; identical to SEQ ID NO: 149106

SEQ ID NO: 376626 - DNA, 1176 bp, Salmonella enterica; identical to SEQ ID NO: 52403

SEQ ID NO: 376627 - DNA, 723 bp, Salmonella enterica; identical to SEQ ID NO: 290979

SEQ ID NO: 376628 - DNA, 1533 bp, Salmonella enterica; identical to SEQ ID NO: 281084

SEQ ID NO: 376629 - DNA, 654 bp, Salmonella enterica
atgaaaaccgccactgcgccgttaccaccgctgcgttcggtcaaggttctggaccagttgcgtgagcgcatacgctacttgcattacagcttaccaaccgaacaggcttatgtccactgggttcgtgccttcatccgtttccacggtgtgcgtcacccggcaaccttgggcagcagcgaagtcgaggcatttctgtcctggctggcgaacgagcgcaaggtttcggtctccacgcatcgtcaggcattggcggccttgctgttcttctacggcaaggtgctgtgcacggatctgccctggcagggcatcaacgaagaccagaacctgggcatcgccatcacccgccgtgcgctggaagccccgctgcgcgccatcgtggccaacgccggtgaagaaccgagcgtgatcgtggccaacgtcaaggccggcgaaggcagctacggctacaacgccgccaccggcgagttcggcgacatgatcgccatgggcatcctggacccgaccaaggtgacccgctcggccctgcagcacgccgcttccgtcgccggccttgcgatcacgaccgaagtggtcgtggccgaagtgccgaagaaggaagagccggccatgccgggtgctggcggtatgggcggcatgggcggcatggatttctga

SEQ ID NO: 376630 - DNA, 915 bp, Salmonella enterica; identical to SEQ ID NO: 27201

SEQ ID NO: 376631 - DNA, 303 bp, Salmonella enterica
gtgttcgtaatcagggttacggtcagtcttattgccaccgccagcgttggcgccgctttcagtgcgttgaatagccgatacacggttgcctttcgcccactccttaacgagcaaaccgcgatcgatatgctccgtctcgaaccatgttttaaggaactggataacagtcgccagttcaggagtttttccatcgacagggaatacttttttaacggcattcactattttgtgaatgtcatgttcaatggctttcttgaacgcttcaacattctcggcggcaagcagcaggttctggacatatga

SEQ ID NO: 376632 - DNA, 234 bp, Salmonella enterica; identical to SEQ ID NO: 244341

SEQ ID NO: 376633 - DNA, 561 bp, Salmonella enterica; identical to SEQ ID NO: 244342

SEQ ID NO: 376634 - DNA, 369 bp, Salmonella enterica
atgggggatttgttagggggaatgataccgatgaaacgcgagaagatgctcacgatacgggttaccgatgaggagcacgcccggttactggaacgctgcgagggtaaacgactggcggaatggatgcggcgggtctgtctgggggagccggttgcacgcacaggaaaactgccgacactatcgccgccattgctgcggcatctggctgccatcgggaacaacctgaaccagacagcccggaaggtgaacagcggccagtggtcttcgattgaccgggttcatgtggtggccgcactgatggccatcgagggtgaattgcgccagttgcggcaggctgtcagggaacagggggtacgggatgatagttaa

SEQ ID NO: 376635 - DNA, 192 bp, Salmonella enterica
atgaccaaacaggaaaaaacagcccttaacatggctcgctttatcagaagccagacgctaaccctgctggaaaaactcaacgatctggacgcggacgaacaggcagacatctgcgaatcacttcacgaccacgccgacgaactctaccgcagttgcctcgcacgcttcggcgatgacggtgaaagcaactga

SEQ ID NO: 376636 - DNA, 1143 bp, Salmonella enterica
atgatcgataaattagtgcttacggttacaccaattttctccataccaccgcgtggtgcagccgcagtagagacatggatgtaccaagttgcacagcgaacaaaaatacaaaacagaatcgcttgtattaagaatgaaggttatagcgattttttaaaggtcaatgaccattgttctgttcatcgcataggtttcagcagactctataagcgcctctttcagaagtggactcgtctggacccgctcccttactcacagcgcattctgaatattgcaaaagactttaacgttaccgatgatagtgtaatcatcgtgcataacagcataaagctgtaccgccagatccgcaaaagagccccaaaggcaaaaatggttatgcatatgcacaatgctttcgaacctgatgggctagatcaaaacgttaaaatgatcgtcccaagcatgtttttgaagaagcattatcaggtgtacctgccggatgctgatatcgctatcgtccctaatggtattgacctggaggcctatcagaaaaaggctgtaccgctgcaaaagtctgacctgggaataactccggagaaaaaaacgattttctttgctggccgtatatcaccggataagggagtgactttgcttttacaggcgttcgaacaactcctcaaggaacgcaacgatatagagttagttgtcgttggtgactatatgagtaaaagtaaaggtgaaaaagcaacttatcagcgtgaggtgcgggaattagcagaacggctaaaaccacattgtcatatggtcggaggtgtaacgccagaagagatatacaactactattcattagcagatctggttgttattccctctcagttccaggaaccgttctgcatggttgcaattgaagcgatgggagcaggaaaacctgtactggtcagcacacgcggcgggatgactgagttcgtaaaagagggggataccggcttccatttgcaggagctaatgaccccggagactattgccagggacattaataaagcgctggcatcccccgatttaaacgatgttgccttacgtggacaacgttgtgtggaagagaaatttccgtgggaaaaagtaacccagcggtttgagaaagtggttaataactggtttaaataa

SEQ ID NO: 376637 - DNA, 555 bp, Salmonella enterica
gtgggacatgaacctgaatggaaagttgaaaagcagccccgctggctggtggctgcgattaaaaagacgatttccagtctgcatggcggttatgaagaagctgcggaatggctggatgtcaccaaagatgctctgtttaaccgcctgcgtactggtggtgatcaaatcttcccgattgggtgggcgctggtactgcaacgtgccggaggaacctatcacctggcacattcagtagccagggcatcaggtggcgtttttgttccgctggcagatatggaagaagtggataacgcagatattaatcagcgcctgctggaagcgattgagcagatcaccagttattcccagcaaatcagggtggctatcgaagatggcgttattgagccacatgaaaaagccgtgattgatgaggagttgtatcaggcgatagcaaagctgcaacagcattcgacactggtatacagagttttttgcgtgccagaaaagggtgacgcccgcgagtgtgcagctccgggcgccgtggcgtcaaattttatggagaaaaccaacgcatga

SEQ ID NO: 376638 - DNA, 990 bp, Salmonella enterica
atggaaaaccctgaacttcagaatctggcggattactcccctgcggacaaaacgtgggatgagcaccggagtatttccgatgatgtgggcggaatttatctgcgggctgccggatttgaacgctacggcgaacgcgtggagggttgtagcggcattctgcgtttcgggtggtccaccaacgaggaaaccggagaaacgcgcctgcggttacgtgatgcgcggttctgtcgggtccggcactgtccgatctgtcagtggaggcgttccctgatgtggcaagcccgtttctatcagtccctgccaaagatcgttgcggaatatcctgatgcacgctggctgttcctgaccctgaccgtccgtaactgtccgattacggagcttggcgacaccctgaccgtgatgaatgcggccttccagcgcctgaaagatcgcaaagagtttcgcggcgtgctgggctgggtgcgcacgacggaagtcacccgtggcaaggacggcaatgcccatccccattttcatatcctgctgatggtttccccctcgatgttgtctggtgatggttatgtgaaacatgcccgatgggtggagttgtggcgcgactgtctgcgggtggagtatgacccgaacgtcgacatcagggttgtgaagtccaggaaaccgaaagacggtgaatcgttgccctgttctgtggtggatcaactgcgcggggtggtggttgaaacactgaaatattctacaaagcccgccgacatgctggtcgatcctgaatggttcctagagttaacacgccaggtacacaagcgccgttttgtggcgacgggtggtgtgcttaaggacgttttgcaactggagcgggaaacgaacgaggatttgattatggcagatggcatggcagagggtgcggatgacggatcgcgtctggcgttttcatggcgggcggtggctaaaaagtatcgccgcgatcgcacaatggataagccaaaacagaaataa

SEQ ID NO: 376639 - DNA, 645 bp, Salmonella enterica
ttgaattacaagataaatggaataactatacgttcagaaaatgcagccaaaccgcataccatgccatctagctatctctgcgaccatattaaaaactctattaaaaatggtagagcccttgattttggatgtggaaagcttagatattcagaacaattagtaaataaatttgaagctgtgacatttttagattccagaaaacagctagaaagagtgcaaattatcagaggtgtacaaaccacaattccagaatatgtggctaataactataaaaatgctaatgttgttccttttgaaagtatagataaaataacgagtctttatgatttcatactttgcgcaaacgtgctttccgcaattccatgtaaatccacaatttacaagatcattagtgcgattagagaattattaaagagtgatggtgaagcaatgattgtcaaccaatacaaaagctcttatttcaagaagtatgagagtggtattaagcatttgcatgggtatatataccaaaactcacgcaatgcttcctattatggtttgctggatgagaatactgtaagtgaaatttgcttagataacaaattagcaataataaagtcatggagcaaagcaggcagttcatatgtggttgttggtaaaaaataa

SEQ ID NO: 376640 - DNA, 462 bp, Salmonella enterica
atgatccttgatatgcttgatgccattcatcgccatcaggattatacgtcattacacccatggaatgataaagattcactcgaaataatactcaatatcattaatcgcaatgcaattaaacaccggatgaattgcgaaggcagcatatttgatatgcttaccggtttaaaggaaattaatgaagtaattacaaaaggaacaatccaacgtaagcaacgttcaaaatcgatatctgacttcaatgatcaaagcatggttaaattcctgagagatgtaatgggtgatctgtctgttattcaagctatagtgaataaatcaaaaattaaccaaggtgatatggtttgtatcagctatgaagatatgattactattgataaattaaaagctaaaatagcaaacgattcatcagagattgcaagtctaaataatattgacattacactaaatattgttgatttataa

SEQ ID NO: 376641 - DNA, 285 bp, Salmonella enterica
atgtgtaatgaggttcggattcatctatgggaggcaagtgatgaaggctggcgctctcgtagtaatgattcaccggtttgtacaggtgcggagtcgtttattgctggtactgctagttgccgcattgaagtagagggaattgatgaattatatcaacatattaagcctttgggcattttgcaccccaatacatcattaaaagatcagtggtgggatgaacgagactttgcagtaattgatcccgacaacaatttgattagcttttttcaacaaataaaaagctaa

SEQ ID NO: 376642 - DNA, 393 bp, Salmonella enterica
atgagtcaagttgttgattttttaaatgaagcaaaaactttttattttgcaaccgttgaaggagaccagccaagggtcagaccgtttaatgcagccatggagaggaatggcaaggtctatcttggtacaaccaatcagaaaaaagtttatcagcagttattggcaaattcaaaggtggaagtctcaggtatggcaaaaggaaaatggattcggctcaccggcgaagccgtaattgatgataccgtggaagcaagggaagcaatgcttgaagcaaatccgcctttgagagatatgtatagcgctgatgatgggaaattcaccgtattttatttgaaaaacatgcaggcagttttatattcctttacaggagatccggagatattagataattaa

SEQ ID NO: 376643 - DNA, 210 bp, Salmonella enterica; identical to SEQ ID NO: 67541

SEQ ID NO: 376644 - DNA, 402 bp, Salmonella enterica
atgaaaaaggcgctattctctttgtttttaatcgtaagtttgttctattcgtacaaacttcttggcctatggtcgctcatattttttgtagtcggagtttctctgctggcatctttaaagattggtagaagagcctatctaatcagtaattccgggagtaaaacgaacacattatctgggcgagatctgtttgcagacgtcacatacaaccctgccacaggatctccaatggtaagtgacgtagatgtatccggaagcttctatggattgaataaaaacaaaggctctcaggagcctttgtttttattcattatagacttaacgttaactgcctatctttatatcttaataacggataccgttgaggcgacgaaaaaaaacctatcaaaatgtgtttattaa

SEQ ID NO: 376645 - DNA, 255 bp, Salmonella enterica; identical to SEQ ID NO: 270409

SEQ ID NO: 376646 - DNA, 390 bp, Salmonella enterica
gtgaaactgatcctgccttttcctccgagcgtgaacacttactggcgcgcccctaacaaggggccgctggccggtcgtcacctcattagcgctgatggccgtaaataccagagcgctgcctgcgtggcgatcattgagcaattacgacgtctcccgaagccatcgactgaactagcagcggtagaaatcatcctgtatccgccagataagcggatcagggatttggacaattataacaaagcgctgttcgacgcactgactcacgcaggagtctgggaggacgacagccaggtaaagagaatgctggtggagtggggaccagttttcccgaaggggaaggtagaaatcacgatcacgaaatttgaaacaggggcgggtgcagccgcctga

SEQ ID NO: 376647 - DNA, 294 bp, Salmonella enterica
atgtcactggtcgaatttgctgcgggaaaggttcagccaccagccaccacggttccagagcaagaagaacccattgtagcgccagcagtattacctgatgtggattcgcgtatctggccgcttgaggttggtctggtgttcaaccaagttgagggggcggattctctggacgcattacagcagaacaagctgaaagccaacattaatcaactctggctggaacgaacggccaccagcgaaatcattactgcagcttctgaacttgttcgcaatatgcggggagaggccgtgtga

SEQ ID NO: 376648 - DNA, 336 bp, Salmonella enterica
atggaaagacgggctgatccacattacataagcaaacaccagttctttgcatacgtatgtaccttgttcagcaccaccgcgaacagtatttactggagcgatacccaaattttgggtatcactaccgccctgaaaaaagctaacggattgattttgttccgagggtggaattccgccctcggtgaaaagttgctcaatcagctcacgggtttgcttattatcaagccagtatttcggacgatatttctgctctccaccagcagcacggtgcaaatcgttaagacaatagcgcccatgaacgtcgcggcgaacttcgataccatcaatgaccattaa

SEQ ID NO: 376649 - DNA, 390 bp, Salmonella enterica
atgaggctggtactcccattccctccgagcgtgaacacttactggcgcgcccctaacaaggggccgctggccggtcgtcacctcattagcgctgttggtcgtaaataccagagcgctgcctgcgtggcgatcattgagcaattacgacgtctcccgaagccatcgactgaactagcagcggtagaaatcatcctgtatccgccagataagcggatcagggatttggacaattacaacaaagcgctgttcgacgcactgactcacgcaggagtctgggaggacgacagccaggtaaagagaatgctggtggagtggggaccagttttcccgaaggggaaggtagaaatcacgatcacgaaatttgaaacaggggcgggtgcagccgactga

SEQ ID NO: 376650 - DNA, 294 bp, Salmonella enterica
atgtcactggtcgaatttgccgcgggtaaggttcagccaccagccactacggcgccagagcaagaagaacccattatagcgccagcagtattaccttatgtggattcgcgtatctggccgcttgaggttggtctggtgttcaaccaggttgagggggcggattctctggacgcatcgcagcagaacaagctgaaagcgaacattaaccagctgtggctggagcgtatgccaaccagcgaaatcattactactgctggtggactggtcagcagcatgcggcgggaggttgcatga

SEQ ID NO: 376651 - DNA, 696 bp, Salmonella enterica
atgctgatgacgaggcggctgttgcgctggccgctgctgtacttgctgacgttgcagcgtttgtctcagatatttttgctgcggctgccgatgcggctgccgccttttccgacgctgccgccgcagtggctgacgcacctgcatcaccggcactggaagccgcctgcgtttctgacgtcttcgcggcggtttcggatgctccggcgcgctctgctgatgtctgcgccgccgtcgcgctggcggctgcggcagcagctgaatcgccggcggcagtacgggaggcatctgcattcgcttcagatgttttcgctgcggctgccgatgcggctgccgccgttctggctgtgtcagccgacgccgcgctggctgatgcctccccggcttttgtggtcgccgtacctgcgctgctctccgcagatgctgcggatgaggctgcctgtgtggctgatgcttctgccgctccggctgcattcactgctgccgtggcgctttccgctgcctgacctgctgatgtctgcgcctgttcagatgcctgccctgcggcggtggcattccgcgatgcctccgatgcctggcgggcaacttcttccaccatcgcctcaaaacgtcgcagcgcctccgggcggacgtcgtcttccgtcatggcccccagaaaatcattcagggtgcccggttttgaatcatcgtagaccgtaa

SEQ ID NO: 376652 - DNA, 336 bp, Salmonella enterica; identical to SEQ ID NO: 376648

SEQ ID NO: 376653 - DNA, 882 bp, Salmonella enterica
atgctcaccaacctcgaaagccagctgaagcagcagaacgcggcggacaaactcgaccaggtgctggcggaaatcccccgcgtgcgcgaggacctcggctttatcccgctggtgaccccaacctcgcagattgtcggcacccaggcggtgctcaacgtcctgaccggcgagcgctacaaaaccattgccaaagaaacggcgggcattctgaaaggcgaatacggccacaccccggtgccggtgaacgccgcgttacaggcccgcgtgctggaagggggcgccccggtgacctgccgtccggcggatttactcaaaccggaactggctgaactggaagcggacgtcaggcgccaggcgcaggagaaggggattactctggcgggaaacgccatcgacgacgtgctcaccgtggcgctgttcccgcaaatcggcctcaaattccttgagaaccgccacaacccggcggcgtttgagccactgccgcaggcggaagccgcgcagccggtggcaaaagcagagaagcctgccgcctccggtatctacaccgtggaagtggaaggcaaagcctttgtggtgaaggtcagcgacggcggcgatatcagccagcttactgcggctgttccggcagcctcttccgcaccggttcaggctgccgctcccgcaggcgccggcaccccggtcaccgcgccgctggcgggcaacatctggaaggtgattgccaccgagggccagacggtggccgaaggcgatgtgctgctgattctggaagccatgaagatggaaaccgaaattcgcgccgcgcaggccgggacggtacgcggtatcgcggtgaagtccggcgatgcggtctccgtcggcgacaccctgatgacgctggcgtaa

SEQ ID NO: 376654 - DNA, 348 bp, Salmonella enterica; identical to SEQ ID NO: 6026

SEQ ID NO: 376655 - DNA, 144 bp, Salmonella enterica; identical to SEQ ID NO: 376341

SEQ ID NO: 376656 - DNA, 924 bp, Salmonella enterica
atggaaccccttcgcgatacccgaaaccgcttactcaacggctggcagttatccaaactctatacttttgaagtcgcggccagacaccagtcctttgctctggcggcagatgagctgtcgttaagccccagtgcggtaagccatcgtatcaatcaactggaagccgagttgggaatccagctatttgtccgctctcaccgtaaagtggagcttacccatgaaggcaaacgggtattctgggcgctgaaatcgtcgctggatacgttgaatcaggaaatcctcgatatcaaaaatcaggaactgtccggcacgttgaccgtgtattcacgcccctctatcgcccagtgctggctggtgcccgcgttgggggactttacccgtcgctatccgtcaatttctctcactatgctgaccggcaacgataacgttaacctacagcgtgccggcattgacctggctatctattttgacgatgcgccgtcggcgcagctcacgcaccattttttaatggatgaggcgattttgcccgtttgcagcccggattacgcccgtcgtttcgccttgcaggacaacctgaataacctgcggcactgtacgctcttacacgacagacaggcgtggagtaacgattctggcaccgatgagtggcacagttgggcgcagcattttgcggtaaatttgccggattcatccggcattggcttcgatcgttctgatttagcggtgattgccgcgatgaaccatattggcgtggcgatgggacgtaaacgactggtgcaaaagcgtctcgacagcagtgaactgattgcgccttttggtgacatgagactgaaatgtcatcagcattattatgtcaccactctgcctggcaggcagtggccgaaaatcgaggcatttattcgctggttgcaggaacaggtgtga

SEQ ID NO: 376657 - DNA, 351 bp, Salmonella enterica
atgaccctttccgttttctgcattttgctgttcgccgcgctgctacatgccagctggaacgccattgtcaaagcgggaaacgataagctctacgccgcgatcggcgtcagcggttccgcggcggtcatggcattgatccttttgcccttctcgccgcagccagctcacgccagtatcccttttttagcggcctctaccgcgctccaggtggtgtataccgtcctggtggcgaaaacctatcaggtctcggacatgagccagacctatcctcttatgcgcggcaccgcgccgctgctggtggcgctcattagcgttctgtttcttggcgacagcctgtcgtcgatggcctag

SEQ ID NO: 376658 - DNA, 204 bp, Salmonella enterica
atgtctttagtcaatggtaggatcctgctcaattgtattcaggaaaaacatgtccttgcgggggcatttaatacaacgaacctggagacaacaatttccattcttaatgcaatagaacgttccggattgcccaattttattcaaattgctcctactaatgcacagctttcaggttacgattacatttatgaaatagtgaagtga

SEQ ID NO: 376659 - DNA, 645 bp, Salmonella enterica
atggatattcctgtcagcctgcatctggatcatgggaaaactctggaagatgttaagcaggctgtccgggccggatttacctcagtaatgattgatggcgcggcgctaccgttcgaagaaaatattgcatttacccgagaagctgtcgatttctgtaaatcatttggtgttcccgtcgaagcggaattaggcgctattctgggtaaggaagatgatcatgtcagcgaggctgactgcaaaactgaacctgagaaggttcagcgctttgttgaggagacagggtgcgacatgctggcagtgtcaattggtaatgtacatggtcttgaagacatcccacgcattgatatcccgctattacaacgcatcgcgtctgtcagtccggtacctttggttattcatggaggttctggtattgacgcggatattcttcgcagctttgttaattacaaagtagccaaagtgaatattgcgagtgatttgcgcaaagcctttattactactgttggtaaggcttgggtaaataataacaacgaggctaatctggcgcgtgtcatggcgagcgcaaaacaggcagttgaggatgatgtttattctaaaattaagatgatgaataaacatcactcagcactccgcaaagtctcttaa

SEQ ID NO: 376660 - DNA, 336 bp, Salmonella enterica
atgaccgggacatttgctgtcggtattttgcttggcactatcagctggcaaaccgttcctgataaggatttttatgatcgctacacgctggttgaaacaactcagggctgtcattttttctcgcggaatgaagatatcgaaagcggtagccgctttgcaggctataagttaatgattctaaaaaccggtatggattgtcagaaatacccatgggtctatttcccttccagcagtcgcaccccagcggttacggcattgatttgtcagcaaccttataaaacgcgcggtgatacaggctgcgtgacgctttttttccgcggggtgacacatgggtaa

SEQ ID NO: 376661 - DNA, 684 bp, Salmonella enterica
atgccaactccccaaaattactcattcatcgccatagcggtatcagcagcattagcctctatggtatttccctcccaggcggcctgggttgacgttgatagtctgccatccagtgggctggtcagccagctgccgccggaattacaggctattattcccgctcaggccagtaccggtttcaccaaagtcggtaccatgcccaactacgtttatcagtggaacaccggcaccatcccggtttatggcaatggcctcacgcttaatgggccgggtgcggaggcgtttgaacacactgtcacggttattcagaacagcgggacgggaagtccgggcgtgatttttggcaacgacctgactattcggacgcagtcggcgaatgccgcgaataatggtagagacgtcgatggcatccgtactcacggcgcaaatactccggataacccggtatttattattaccggtgaccgtaccaacatctacgtggatggtcaggatggtgacggtattaacgccggatataactcactgggccagggttggaccggatcggccaatatttacgtcggcgacgatctgtatatcaaaacgaccggtagccagggacgtggaattacagctaacgccatgcgggatgcgtcacgtgccaaaaatacgattgtcgtcggcaatcgtgtgcacatatag

SEQ ID NO: 376662 - DNA, 1029 bp, Salmonella enterica
atggaagataaatacttaacccaatccccggcaggtgaattcattatgtttgccagcggtgacgggaaagtgcgtgttgaatgccgctttgaaagcaatacactgtggctctctcagggaatgatctgcgaactatacggtaaagctaaagccaccatcagtgagcatataaagaacatctttgcagatggcgagcttgaagaaaattcagttgttcggttttaccgaacaactgccagtgatgggaaaaattatcagattcaatactttagtttgccgttgatactcgctgtcggctaccgcgttcgctccccgcgcggcacgcagttccgccagtgggcaacccagacgctccaggaatacctgatcaaaggttttgtgatggacgatgagcgcctgaaaaatccgcccgtgggttcatcggctgtacccgactatttcgatgagatgctggagcgtatccgcgatatccgcgccagcgaacgtcgggtttatttgcgggtacgcgagatctttgctctggccgccgattatcaaccgtccctcaaagaaaccacgcagttttttcaaaccatccagaacaagttacattttgcctgtaccgggtataccgccgctgaactcattcatcagcgtgctgacgcctgccagccgcatatggggctgaccagctataaaggtgaagaggtgcgcaaatgtgacgtgacggtggcaaaaaattatctcactcaggatgaagtcagcgagcttaaccgcgtagttaacatgtggctggatttcgccgaagatcaggcccgtcgtcgtcaacaggtctttttacgcgactggcaggataagctggatcagttcctgcaatttaacgaccgtgaggttttgcaaggggcaggtaaagtcagtaagaaaatggccgatgaaaaagcgcaggcggaatatagccagtttgccgagcaacaacggcgtttaaaagaagccgaaggtgagaaagatatcgccgctttgttacagtggaaaacagagcctaaaaagtag

SEQ ID NO: 376663 - DNA, 333 bp, Salmonella enterica
atgttgttcctgctggatggtaaaaccattcccgataaccgacacgatgtgactatccgactgatggacttcattcgtgataacccgcatcagcaggtttttgaggatgatttattctctatgcactactttcagaaaggcagtgggcatatcacgtttaagcgtctggatctggtggagaagatgaatgatatcgtgatgaaacactatccgggggcgctacccgccaaaataaacgctatctgcgtaatgagcttcaccaggaatttctggcatactaagcggattacagcatcacgagtcagatgtaagtggaggcgacatggaagataa

SEQ ID NO: 376664 - DNA, 597 bp, Salmonella enterica
gtgacgcttctgctcaatgagcaatatcatctttgctgttacagcgaaatccgtgctgatttgcgtggcctcggctatcacattgaacacgtcgaaaataaaagccagcagccagggcgaaccttcgattatcaaaatctcgcagccagcgcgttagactctgagaatggtttgccccagcttggcatcaacacgttcggtggtcatgtacagggaaagaataaatctgtggatatggcacagtttattcattgccacctccctgactgttctcgttattttgcctatttatctaatgggcatgtggttccttcaatagatttaactgagcaggaagctgagtacgcacagtacaccattgatcacctgaacctgaacagcggattccttcaaacggagcgtcgtaatcattgggaagagctggaacagctttttgaagaacatattgagaaagactgggatctgcaccaattacttcagcttgatctggtcccttcgccagatcataaactgcatgaattcttcagcattacacgccagtttttccagcaagaagctgaacaggtattacagagccacgcccctgcattaatttaa

SEQ ID NO: 376665 - DNA, 1080 bp, Salmonella enterica
atgaaaataacgtttgttggcgaagcggtatctggcttcggagggatggaaaccgttattagcaacgttatccatacgtttgaaaatagctctccgaaaatcaactgtgaaatgtttttcttttgtcgtaatgacaaaatggataaagcatggctaaaagagattaaatatgcgcaatcattctcaaatataaaattaagttttcttcgtcgatctaagcatgtttataattttagtcagtggctgaaagaaacgtcaccggatattgtgatatgtattgatgtcatctcatgtctttatgccaataaagcacgtaagaaaagtggtaaacagtttactattttctcgtggccgcatttttcgctcgaccataaaaaacatgcagaatgtataacgtacgcggattatcatctggccatcagtagtggtattaaagaacagatgatggcacgggggatctcagagcaagatattagcgtcgtttacaatcctgtctctattaaaacaatcattgtgccgccgcctgagcgcgataaacccgctgtatttctctatgtagggcgtcttaaatttgaagggcagaaaagagttaaagatttatttgatggcttagctcgtacgacaggggaatggcagctacatattattggtgatggctcagattttgaaaagtgccaggcctatagccgggagcttggtattgagcagcgtgtgatctggtatggttggcaaagcgcgccgtggcaagtcgtacagcaaaaaataaaaaatgttaccgcgttactacttacctctgcatttgagggatttcctatgactctgctggaagcaatgtcatatggaattccatgtattagttctgattgtatgtctggtccgcgcgatatgattaaacccggtttgaatggtgagctttacactccgggtgctatagatgattttgtaggacaccttaatcgagtcatttccggtgaagtaaaatatcagcatgatattattcccggcacgattgagcgattttacgatgtgctatattttaaaaattttaataatgcgatattctcgaaattacaaaagtga

SEQ ID NO: 376666 - DNA, 831 bp, Salmonella enterica
atgacgatcattctgcataatttaagctggcattttgtcttctattatattggcgccattggtgtgatgttcggtatattctggttaatgaaagtcaaagatccgatgcaccactcaaaagttaatcaagcggaaattgactatattcgtagcggtggtggcgagccctctctgggctgtaaaaaggagccgcagaaaataacgttcgcgcagattaaaaccgtctgtgttaaccggatgatgatcggtgtttacatcgggcaattctgcgtcacctctatcacctggttcttcctgacctggttcccgacctatctgtaccaggcgaaaggcatgtcgattctgaaagtcggttttgtggccagtattccagccattgccggttttattggcggcctgctcggcggcgtgttctccgactggctactcaaacgcggctatagccttaccgtcgcgcggaaactgcctgttatctgcggtatgttgctctcttgcgtaattgtgatcgccaactacacctcttcagaatttgtggtcattgcggcgatgagtctggccttttttgccaaagggtttggtaacctgggctggtgcgtactcagcgacacctcgccgaaggaagttctgggtattgctggcggcgtatttaacatgtgcggcaatatggcaagcatcgttacgccactggtcatcggcgtgattcttgccaatactcagtcgttcgactttgccattttatacgttggctcgatgggacttattggtctcatttcatatctgtttatcgtcggcccgctggatcgcatcacgctgacatcatccgcagcctga

SEQ ID NO: 376667 - DNA, 1197 bp, Salmonella enterica
atggctttaagcgcgaattccgacgccgtaacgtatgcaaaagcggcgaataccagaaccgcggcagaaaccggcgatcgtatcgaatgggtgaagctatcactggcttttctaccgctggcgacgccagtgagtgacgcgaaggtactgaccggtcgccagaaacctttgaccgaagtggcaatcatcattgccgaaatccgcagtcgcgatggctttgagggcgttggttttagctactccaaacgtgctggcggccagagtatttatgctcacgccaaagagatagccgacaatctactgggcgaagaccccaatgatatcgacaaaatatacaccaagctgctgtgggccggagcctcggtggggcgtagcgggatggcggtacaggctatctcccctatcgatatcgccttatgggatatgaaggctaaacgtgccggtctgccactggcaaaactgttgggcgcgcaccgcgactccgttcagtgttacaacacctcaggggggttcttgcatacaccgctcgatcaagtgctgaaaaatgtggtgatttcccgcgaaaatggcattggcggtattaagttgaaagtcggacaacccaactgcgctgaggatattcgccgcttaaccgcagtacgtgaagcgcttggggatgagttcccgttaatggttgacgctaaccagcagtgggatcgcgaaacggctatccgcatggggcgtaaaatggaacagttcaatcttatctggattgaagaaccattagatgcttacgacatcgaaggccacgcccagcttgctgccgcgctggatacgcctatcgccaccggggaaatgctgaccagtttccgggaacacgagcagttgattctgggcaatgccagcgatttcgttcagccagatgcgccgcgtgtcggcggtatctctccgttcctgaagattatggatctggcggcgaaacacgggcgtaagctggcgccgcactttgcgatggaagtacacctgcacctttccgcagcgtatcccctggagccgtggctggaacatttcgagtggctgaacccattattcaacgagcaacttgagctgcgcgatggccgcatgtggatttccgatcgtcatggtctgggtttcacgctcagtgaacaagcgcgccgctggacacaattaacatgtgaatttggcaaacgcccttaa

SEQ ID NO: 376668 - DNA, 1323 bp, Salmonella enterica
atgcaggcttattttgaccaactcgatcgtgttcgctatgaaggccctcaatcgactaacccgctggcatttcgtcattacaatcccgacgagctggttttaggtaaacgtatggaagatcacctgcgtttcgcggcctgttactggcataccttctgctggaacggcgcggatatgtttggcgtaggcgcgtttaatcgtccgtggcagcaaccgggcgaagcgctggagctggcgaaacgcaaagcggacgtggcgtttgaatttttccacaaactgaatgtgcctttttactgcttccatgacgtggatgtgtcgccgaaaggcgcgtcgttgaaagaatataaaaacaacttcgcgcagatggtggatgtgctggcggcgaaacaggagcagagcggcgtaaaactgctgtggggaacggcgaactgctttaccaacccgcgctatggcgcaggcgccgccactaacccggacccggaagtctttagctgtgcagcgacgcaagtggttacggcaatgaacgccacgcataaactgggcggcgaaaattacgtactgtggggcggacgcgaaggttatgaaacgttgctgaataccgatctacgccaggaacgcgaacagattggccgctttatgcaaatggtggttgagcacaaacataaaatgggtttccagggcacgctgctgattgaaccgaaaccgcaggaaccgacaaaacatcagtatgattatgacgttgcaacggtctatggcttcctcaaacagttcggcctggaaaaagagatcaaagtgaacattgaggcgaaccacgccacgctggcgggccattcgttccaccatgaaatcgcaaccgctatcgcgctgggtatttttggctccgttgatgccaaccgcggcgatgcgcaactgggctgggataccgatcagttcccgattagcgttgaagagaacgcgctggtgatgtacgaaatcctgaaagcgggcggattcacgacgggcggtctcaacttcgacgccaaagttcgtcgccagagcaccgataaatacgatctgttctacggtcatatcggcgcgatggatacgatggcgttgtcactgaaaatcgccgcgcgtatggtcgaagacggcgagttggataaacgcgtggcgaagcgctatgccggctggaatggcgagctggggcagcagattctgaaaggacaactctccttaggcgaactggcgcagtatgcggagcagcaccatctggcgccggtacatcaaagcggtcatcaggagctgttagaaaatctggttaaccgttatctgtttgataaataa

SEQ ID NO: 376669 - DNA, 318 bp, Salmonella enterica
atgcagcctaaaattaactggattgataacctgcgagggatcgcctgtttaatggtagtgatgatccatactacaacgtggtacatcaccaacgcccacagcgtcagcccgctaaactgggatattgcgaatgtcctgaattcggcttcgcgcgttagcgttcccctgttttttatgatttcaggctatctttttttggcgagcgctgcgcgcaaccgcggcattttttacgtattgccctgtgccttatcttttacagcgttgtcgccctggcttacatttcactttttacttcgatcaacgtcgagctttcgctaa

SEQ ID NO: 376670 - DNA, 2625 bp, Salmonella enterica
atgagcgccctttcccggtggctgcttatcccgccggttagcgcgcgcttgagcgagcgctatcagggttaccgccgccacggcgcgtcgccgtttagcgcagcgctcggctgcctgtggacgattctggcgtggatagtgtttccgcttgagcatccgcgctggcagcgtattcgcgacgggcataaagcgctttatccgcatattaacgccgcccgcccgcgcccgctggacccggcccgttacctcattcagaccctctggctggtgatgatctcgtcgactaaagaacgtcatgaaccgcgctggcggtcatttgcgcgcctgaaggacgttcgtggacgttaccatcaatggatggataccttaccggaacgggtgcgccaaaagacaacgcacctggaaaaggaaaaagagctgggacatcttagcaacggcgcccggcgttttattctgggcgttatcgtgaccttttcactgatactggcgctgatctgtattacgcagccatttaacccgctatcgcaatttatctttctgctgttgctgtggggcgttgcgctgttggtacgacgtatgccgggacgcttttccgcgctgatgctcatcgtgctgtcgctaacggtctcctgtcgttatatctggtggcgctatacctcgacgctaaattgggacgacccggtcagtctggtgtgcggactgattctgctgtttgcggaaacctacgcctggattgtgctggtgctggggtacttccaggtggtgtggccgttaaatcgtcaaccggtgccgttgccgaaagagatgtcgcagtggccgacggtggatatttttgtaccgacctataacgaagaccttaatgtggtcaaaaataccatttacgcttcgcttggcattgactggccgaaggacaagctgaatatctggatccttgatgacggcgggcgcgaatcatttcgtcagtttgcccggcatgttggcgtgcattacattgcccgcgctacgcatgaacacgccaaagccggcaacatcaacaatgcgttaaaacacgcgaaaggcgagtttgtggcgatcttcgattgcgaccatgtaccgacgcgctcgtttctgcaaatgacaatgggctggttcctgaaagagaaacagctggcgatgatgcagacgccgcatcatttcttctccccggacccgtttgagcgcaacctgggacgttttcgtaaaacgcctaacgaaggcacgctgttttacggactggtgcaggacggtaacgatatgtgggatgccactttcttttgcggatcgtgcgcggtgattcgccgtaagccgctggatgagattggcggtatcgccgttgagacggtgacggaagatgcgcatacttcgctccggctgcaccggcgaggttatacctcagcgtatatgcgcattccgcagtcggcggggctggcgacggaaagcctgtcggcgcatatcgggcagcgtattcgttgggcgcggggcatggtgcaaattttccgcctcgataaccctctgtttggtaaaggcttaaaactggcgcagcggctgtgctacctcaacgcgatgttccatttcttgtccggcattccgcgcctgatctttctgaccgcgccgctggcttttctgctgctgcacgcctatatcatttatgcgcctgcgttgatgattgcgctatttgtgataccgcacatggtccacgccagcctgactaactcgaagattcagggcaagtatcgtcactctttctggagtgaaatctatgaaacggtactggcatggtatatcgcaccaccgactctggtcgcgttgatcaatccgcacaaagggaaatttaacgtcacggcgaaaggcggactggtggaagagaagtacgtcgactgggtaatctcgcgtccgtatatcttccttgtcttgcttaacctgctcggcgtggcggcgggcgtatggcgatactattatgggccggaaaatgaaacgctgaccgtcatcgttagcctggtgtgggtcttctataacctggtcattctcggcggcgcggttgcggtttcggtagagagtaaacaggtcaggcgcgcgcatcgggtcgagattgccatgccgggggccatcgcccgcgaagatggacatttgttctcctgtaccgtacatgacttctccgacggcgggttaggcatcaagatcaacggtcaggcgcaggtgctggaagggcagaaagtgaatctgttgcttaaacgcgggcagcaggaatatgtctttccaacgcaggtagtgcgcgtaacgggcaatgaggtcgggctgcaactgatgccgctcaccaccaaacaacatattgattttgtgcagtgtaccttcgctcgcgccgatacgtgggcgctttggcaagatagcttcccggaagataaaccgctggaaagcttgctggatattctgaagctgggcttccgcggatatcgccacctcgcggagttcgcgccgccttcagtaaaagtaattttccgatcgttgacggcgttaattgcctggattgtatcgtttattccgcgtcgcccggagcggcaagcggcgatacagccgtcggatcgggttatggctcaggctcaacaatga

SEQ ID NO: 376671 - DNA, 1362 bp, Salmonella enterica
atgcgtaagttcacgttaagtctcatgcacgcttttttgctggctggcggtcgaaatgccttacctggcaaaaggggcgtttctcgggcattgttggggttatcgcttggtatggcgctaacaccgcttgccggcgcagcgacctccgcgcagcaacagttgctggagcaggtgcggctgggcgaggccacgcaccgtgaggacttagtccgtcagtcgctctatcgcctggagctgatcgaccccaatgatccacaggttatcgccgcccgtttccgctatctgttgcgccagggggatagcgacggggcgcagaagctacttgatcggctggcgcaactggcgccggagtcgacggcgtatcaatcttcccgcaccgcgatgctgctctccacgccgcaaggacgccagtctttgcaggaggcgcgtttactggcgacgaccggtcatactgaacaagcgatcgccagctacgacaagctgtttaaaggttatccgccggagggcgaactggcggtcgaatactggacgaccgtggcgaaattgcccgcccgccgtcacgaagcgattaaccagctacagaaaatcaatgccgtcagtccgggtaataacgctctgcaaaatgcgctggcgcaactgttgttcgccagcgggcggcgcgatgagggattcgcggtgctaaaacagatggcgaaatccagtacgggacgcagcgcggcctccgccatctggtaccagcagataaaagatctcccggttagcgacgccagcgtaaaagcgttgcaagactatctgacgcagtttagcgaaggcgatagcgtgtctgccgcccgcgcccagcttagcgagcagcaaaaacagttagccgatccggcgtttcgcgcgcgctcgcagggcatcgcggcggttaatgccggagaaggcggcaacgctattgcgcaatcgcagcaggcggtgagcgcccggcaggacgacagcgaggcggtcggcgcgctggggcaggcatactcacagcgtggcgatcgcgcccgcgccgtcgcgcagtttgaaaaggcgctggcgatggcgccgcacagcagcagccgcgataagtgggagagcctgctgaaggtcaatcgctactggctgttaattcagcagggcgacgcggccttaaaagcgaataatctggctcaggcggagcgtttctatcagcaggcgcgagcagtggataacaccgacagctacgcggtgctggggctgggggatgtggcgatggcgcgcaaagataatgccgccgccgaacgttattatcagcagacgctgcgtatggacagcggtaataccaatgctgtacgcgggctggcgaatctttatcgttag

SEQ ID NO: 376672 - DNA, 228 bp, Salmonella enterica
atggccagcgatattatcctgaaactttcacagaaggtgaatgcgttattggcgcgggatgatgttgacggtgtggtcattactcatggcactgacacgctcgatgaaaccgcctactttcttaatttgaccgtgaaaagcgacaaaccggtggtgtttaccgctgcaatgcggcccgcgtcggcaatcagcgccgatggcgcaaggacagccagggctggtgtctga

SEQ ID NO: 376673 - DNA, 444 bp, Salmonella enterica
atgaccacgttattacaggttattgtactgatatttattgttttctttattttccctgggcgaaaaattttccgtcggagtaagcatctgcaagatggccgtaaattaatttcatcttcttcgctgatgctgcgaaaatttggcagttctcgcggctataacgcggattactactttgacatgcagtacctctatgaggtcgcggacggtatcaccaccgcgataccactcaccagcattattgaggcgaaaccgggaacaacgagagtcagtggtcgttcagtctggtcagtcgactggataacagcggaagggcaaagaaaacagacgcgcttccttcataactacaccctattcaatcgaaattttgccaccttccttaagaccgtgaaacaggccaatccagacgcctgcatcacttcgttgacgttatttacgctctga

SEQ ID NO: 376674 - DNA, 654 bp, Salmonella enterica
atgttccattatggaaaatgtgtcgttcgcacgttgtttttattactggtttgctgttcgctgtcgggctgtctttcatttgggctgatacttgccaccgataaagatggcaatcgtcatcagtctacctggaaatcggataccgttaccgcgctttccttaggtaaagatagcaacgggaaaacgggctgggtgtttgttggcgaacattttgactacctgttgacccagggcggcgataatgtggtggcgctgttaaaagatgcgactattcgccgggataaaatgcgagtaaaggatggtgttaaattcctgattgatacagataagaaggagtttacgggtgaagtcaatgtgacttacgcctgggtggacgagaaagataaactggcggcggtaggctacgggtttatttgtgcagacggcgcggtaaattgcacgctatccgtcatggacctgaaagggactatccatcagaaaaataaagagcagagcgttacgcagcagctatcgttctatcatcctttcaccgttgagttctatcagtatcagcgcagtatgtccggggcaaaatttggcagagtgttgctgccggtaactttggcgctggatattgtcactatgccgctacagctactgatcttcagtcgttaa

SEQ ID NO: 376675 - DNA, 1152 bp, Salmonella enterica
atgtatttgcgtgaagtattctactatccgtggaatgaatacttttcactgacaaatacacaatcgggcatgttaatgagctggctcgggtttgtaggcattatatcaggtgctgtttcaggcatcatcgttgaccgtttcaaaaatcctaaaagcattcttaccattgcctatctcacaatggcggcccttgccatctggcagtccttccggccttcctatcaggccatgtttattatcgtcggatttatgtccttagtcggtaatggactgttcctggtttccatgacaaaaattgccagactccttgcatcagacaatgagcaggggcggtattttggatttctggagtccggtcgtggaattgccggcactgttctgacgttatgtgccgtggctattgttggtctgcatggctccagtgctgtcagcattggttttattttacgatttgacgcagccatttatattattctgggattcacctcttattatttatttccgaaaggtgttagtgctattgaaaatgcggcacctaaaaaaatgtcggatcttatttcactactcaaaagtgtaaaactttggctggcagcattcattatcagctgtgttatttttgtttaccagggcggagcttatctggtaccatacctctccgatgcctatggaatgactcccgaccaaactgccgttatcgggatgattagggcatattttctcgcttttattatttcgccttttgctggcctacttgcagataagattggttcttccctgaaagttatggccagcttctttattctcggtgcattgataactgcatcttttatatttattcctcatgactcacgatttctgatcctgcttattactctggttttattactgggagcgcttacgtttggcatgcgcggtataatgtatgcgcaggtaaatgaaattcgcataccgaaagtgtttaccgggaccgcaatggggatattaatctgcatcggattcagcccggaagcttatgtccatcttatcttcggataccttcttgatacgtataaagaatttgcatatacgctgatgtttgccactattgcagttgttctttttgctggcgcactgtgcagtggtttgctttacaggattaataagaaagtatga

SEQ ID NO: 376676 - DNA, 141 bp, Salmonella enterica
atggaacatgcagaagacaaatcgattaaaaggcataacctgatttttttattcttctggcagtcggtgggggaacaatattcaaggctatgtatttgcgtgaagtattctactatccgtggaatgaatacttttcactga

SEQ ID NO: 376677 - DNA, 648 bp, Salmonella enterica
atgaaaaacacttgtcttgaaccctatgaatttttgatcgatttcctggccgattattttggcgaaaacacggaagttgttctgcacaatctttctgatcttgagtcttctatacataaaatcagaaatggacatatcagcggtcgctctgtcggagatcccatcaccgatctggtagtccgtgccatgaagaacaatgacagtgaggtacattaccagtgtaattatctcagcaagacacgcgatggcagacggcttaagtgtgccactttttttatccggaataagcagggagaaattgttggtgcactatgtctgaataccgtcgtcgaagatttaattgccctgaatgataaacttagtcattttttaagcatttttgtcgggcagactgacaataataacggcactcagcttgatgaacatattggactgaccattcctgaaatggttgatctcaaaattaataatgtaatcaatattgaaaatattaatccagagtcactgaatgctgaaaataaaagccatattatttcattactaaatgatgaaggcgtatttctgcttaaaggggcagtaacgaaagtagccaaaaaacttaacatatctgaacccactgtttataaatacatacaaaaattaaaataa

SEQ ID NO: 376678 - DNA, 381 bp, Salmonella enterica
gtgaaagagattatttttacagaaacagcaccggcagcaattggctcatacagtcagggcaatgcgatgggtaatttaatttttacctccggacaattgcccattaacgctgacagtggcaaaattgaaactgatgatattcaggaacagacccgtcagtcactgcttaatcttctggctgtagttaagatggcaggcggtgatactgatacggtactgaaaacgacctgtttcttgagtgatatggctgattttgctgcgttcaacgatgtctatgccagcttttttaagataaatccgccggcacgcagctgttttgctgtaaaaacacttcctatgggtgccagagttgagattgaagctgtggcatttcgtcaataa

SEQ ID NO: 376679 - DNA, 1167 bp, Salmonella enterica
atgaaatacgattttaatgaaatctatcagagaatagcatcagaaaaatgggaatatgacagtgtcattaatggatttccagtaatacctatgtctgttgcagataccgatttagtttctcccgtggaggttcgtcaggcactgattgaagtctgtaaccgcagagaattcggatatccggcctatcatgatgattttaaggatgtgctggcatcctggtatgatcgatattatgactggcggccggatacggctgatattattgaaacaccgcctttactgatgacgatgggcgcttttatcaggggaatgacacagtgtaatgaatccgttgtggttatgacaccggtctatcattcttttgccagaaccatccgtgaaaaccaccgtgctgtaactgagtgtgatctgctgcgtgatgaaaacaatcattacactattgattttgaaaagctggaagatacctgttcacgcccggagaataagattctgattttctgtaaccctcataatccggtaggtcgttgctggactgaagaggaagtcaggaaagtcgccgcaattgcccagaaaacaggaacaatcctgatttctgacgaaattcatgcagattttgtctatgacgaaaaatgctatacgccggtcatgaaagctgcggaaaatttaaatggcattatcgtttttttatccggagggaagctgtttaacattggcggtatttttagttcctatgtcttcacggccgatcctgtatttaaaaaacagatggcagttgtcctgaaagaattacattttcagcccactgcgttcgcgcatgaagccgcctatgccggatataaatattaccatgactatcgtgaagaggtggtgaatcatatccgtaaaatgcagattaaactggttaacgggctcaataacatgccatatccggtaaaagccaatctgccggaagccacttatcttgtatgggccgactttaatgatacgggctggtcaggtgatcgcattcaggaatttttagtgcaggatgcgggactcggatttaaccggggagatcagtttggtgttgccggtaccggatttgcccgaattaactgtggtgttccggagtcacgtattgatgaagcactgagtcgtctggaaaaggcattcagtaagtatttttaa

SEQ ID NO: 376680 - DNA, 1293 bp, Salmonella enterica
atgaaaacatccaattttcaaaaatggttgatggtcattcttctggcaatcggaggagggaccatttttaaatcgatgtacctcagggaagtattttattacccctggaatgaattcatgggagtgaataacacggattcaggcctgctgatgagttggctggggtttgtggggattgtttcatcttcaattgctggggtgattatcgataaggtgaacaatacccgactgattatttcttttacctttctggctgtgggcgtaaccacattatggcagtcaacagcaccgggtctggctacgcagtatgtcatcatcggcatactatctttcctcgcaaatggtcttttcctagtatcgatggtgcgcgcaacccgcctgattggtaatgccagtgaccaggggaagctgtttggtttcctggagtccggacgtggtatcgctgggtcagccatctctgccgttgccgtagcatggttcgccatgtctgcaaccgaagtggaagggattggcagtgtgctacatgcatacggctttctctacctagcgctgggtgttctgatgtggttcgccatgccccgtgataaccataattctgcttccggagaagaaaaggccaaggaaaaaatatctgtacacgatattctggctgtcatgaaggttaaggaagtctggtttgcagctttctccatctttgcaaccatctccttctatcaggggtcctcatatctggttccttatctgtctgatgtctacggaatgaccgccgaacatgccggaattatcggtatgatccgtgcttatgtcctcgctatcctgattgcaccggttgtgggtctgctcgcagacaaagtcggctcagcgattaaggtgatgaattggctgtttattgccggggtgattggtgtcgccatgttcctggtgatcccacaggatccggctatggtatgggtcctgatcggcaccctgatgattgtaggctccattaactttgctctgcgcgggatcatgtatgcgcaaattgaggaaatgaaggttcctgttcgtctgaccggtaccgttatggggatcatggccactgtgggattctctccggaaatgtttatccatgcgttattcgggtactggcttgatgcatataaagtacagggttacacctacatgtttatcttcatgggtgccatgtttgctctcgctgtattcacttcacttttacttctccgcaatgccaaaacggcatttaagaaaatggatggtaaaccggcagatactttccggactgcggctgaataa

SEQ ID NO: 376681 - DNA, 462 bp, Salmonella enterica
atgcgcggattacgtaatatttataacctcggcgtcaaagaactgcgcagtctgctgggcgacaaagcgatgctggcgctgatcgtcttcgcctttacgatttcggtttactcctccgcgaccgtcctgcccggttcgttgcatcttgcccctatcgccatcgccgatatggatcagtcacagttgtcgaaccgtattgtgaatagtttttaccgcccgtggtttctgccgccggagatgattacggcaacggaaatggatgccggactggatgccggacgctatacctttgcggtcaatattccgccgaatttccagcgtgatgtgctggccggacgtcagcctgatatccaggttaacgtcgatgcgacgcgcatgagccaggcgtttaccggcaacagttatatccagaatattattagcggcgaggtcaacagctttgtggcgcgcgcggggagatag

SEQ ID NO: 376682 - DNA, 927 bp, Salmonella enterica
atgtccgagcagtttctctatttcttgcagcagatgtttaacggcgtcacgctggggagcacctacgcgctgattgctatcggttatacgatggtgtacggcattatcggcatgatcaacttcgctcatggcgaggtgtatatgatcggcagctacgtctcttttatgatcatcgccgcgctaatgatgatgggaatagacaccagttggctactggtggccgccggatttatcggcgcgattattattgccagcgcctacggctggagtatcgagcgagtcgcttaccggcctgtgcgcaattccaagcgcctgatcgccctgatttccgccatcgggatgtccatctttctgcaaaactacgtcagcctgacggaaggttcgcgcgacgtggcgttacccagcctgtttaacggccagtggattgtgggcagcagcgaaaacttttccgcgtccatcaccaccatgcaggcggttatctggatagtcacctttctggctatgctggcgctcaccattttcattcgctactcccggatgggccgcgcctgccgcgcctgcgcggaggatctgaaaatggccagcctgctcggcattaataccgaccgcgtcattgcgctaacgtttgttatcggcgcggcaatggcggcggtggcgggcgtgctgctcggtcagttctatggcgtgattaacccctacatcggttttatggccgggatgaaagcgttcaccgcggcggtgctgggcggtattggcagcattccgggcgcgatgatcggcggtctgattttgggcgtcgccgaagcgctctcgtctgcatatttaagtaccgaatataaagatgtcgtgtcgttcgctctgctgattctggtactgctggtgatgccgaccggtatcctggggcgtccggaggtagagaaagtatga

SEQ ID NO: 376683 - DNA, 279 bp, Salmonella enterica
atgatacgttcaggcgcctgcataatgggaacgctgttgttcgcggcttcgttcagtgttaacgccttaacctcaaacgattttgatccccgcgatcctgctatctggcaagaagaaaccgcaacgccttatccactggccgcaacgacctgcgaagtgcgtcatcatccggattgtgcaacgtgggaggatgaaaaatccgacattcagcgtgaacgcgagcggcgagatcagcggcgcttacaaaatctgtacaaaaagtattctcatcgtgattaa

SEQ ID NO: 376684 - DNA, 372 bp, Salmonella enterica
atgaaacgcttactacttattacggctttattaccctttgctgtattggcccagccaattaacactatgaataatcctaatcagccaggttatcaaatccccagccagcagcgtatgcagacgcagatgcaaacgcaggcgcgcagccagcagcaaaatctacagtcgcagttgaatgccaatacgcagcgggttcagcagggacagccgggcaacggtatgctcggtcagcaaacgctgcccaatacgcagggcggaatgctcagcggcagcggaaatccggaccggatgctaaaccattcccagccaatgttgcagcaggacagcgggacgccgcagcctgacatcccgctgaaaactatcagcccttaa

SEQ ID NO: 376685 - DNA, 948 bp, Salmonella enterica
atgaaaaataatgtatgtgttattggctcgttcaatgttgatattatcagttatctaccgagattaccctcaacgggagaatcattgctggccgataaatttattttttcacccggcggtaagggatgtaatcaggcattagcagcaagctatgccgattctgatgtgcattttattactaaagtcggctcagatcattttagcgattacgccattaattttataaactcatcaaaaatccataaaagtgttatctaccagaccaaagaaacacaaacaggtacagcaaccatcatggtgaatggtgataccggagataatgtcatcgctatctaccctggcgccaacatgacaatttcccctgatgaaatcaccattcaaaaagaagccattgttcattcagatattgttcttgtccaactggagacgaattacgaagcgctgcagcaaacaattcgtctcgcacaaaaaaatgacataccggtcatcatcaatccagcgccgtacaatgacatggttaacaccatcattgataacattgactatattacgccaaatgaaacggaagccggcctgctggccaatatggcggttaatgatatcgaatcagccaaatgcgcggccaaaattattcaccagaaaggcgtcaaaaataccattattacattaggtagcaaaggttcgcttgcttatgacggcacacaattcatctattccccggcatttccggcagttgtaaaaaatacggcgggagcgggtgacgctttcaatggcgccctctcatctggccttgcaaaaggaaagtcactggcatccgcattgtgctacgccagcgcatttgcctcacttgcggttgaaacgcctaatgcctctgatatgccggaaaacgactccgttcttcatcgtattcagggttcacattacaaacaaactatctctactcactaa

SEQ ID NO: 376686 - DNA, 126 bp, Salmonella enterica
atgttggattctttgacggtggcggagaagccttttcgggcctacaaaagcagatgcctcaagatcggccgtcagcgtcgcggtcagtttgttcacggcaagcgcgcagggcccggagcgtactaa

SEQ ID NO: 376687 - DNA, 1296 bp, Salmonella enterica
atggtgagtttagagaagaacgatcgtgtaatgttggcgcgccagctgccattgaaatctgttgccctaatcctggccggcggccgcggcacgcgtctaaaagatttaacgaacaaacgcgccaaaccagccgtccactttggtgggaagttccgcatcatcgatttcgccttatctaattgtctgaactccgggattcgccgtatcggcgtgatcactcagtatcagtcccacacgctggtgcagcatattcagcgcggctggtcactgtttagcgaagagatgaacgaatttgtcgatctgctgccagcccaacagcgtatgaagggcgaaaactggtatcgcggcacggcagacgcggtgacccagaacctggatattattcgttgctataaagcggaatatgtcgtcatcctggcaggcgatcatatctacaagcaggactactcgcgtatgttgatcgatcacgttgaaaagggcgcgcgttgcacggtggcctgtatgccggtgccgatcaaagaagcgacggcgttcggcgtgatggcggtcgatgaaaacgacaagattattgattttgtcgaaaaaccggcgaatccccccgcaatgcctggtgacgccagcaaatcgctggccagtatgggcatttacgtttttgacgccgattacctgtatgaattgttggcggcagacgataaagatgacgcttccagccacgatttcggtaaagacattatccccaaaatcacccgcgaaggtatggcttacgcgcatcctttcccgctctcctgcgtgcagtccgatccacaagccgaaccgtactggcgtgatgtaggtacgctggaagcttactggaaggcgaacctggatttagcctcggtgacgccggagctggatatgtatgaccagaactggcctatccgtacgcatatggaatcgctaccgcctgcgaaattcgtgcaggaccgctccggtagccacggtatgacgctgaactcgctggtctccggcggctgcattatctctggttcggtggtggtgcaatctgtgctcttcccacgggtgagaataaattctttttgtaatattgattcggcagtgttgttacctgaggtttgggtagggcgctcctgccgtttacgtcgctgtgttattgaccgtgcctgtattatcccggaaggcatggtgattggtgaaaatgcggaagaggacgctcgtcgtttctaccgttcagaagaaggtattgtactggtcacgcgtgaaatgctgcgcaaactgcaggtcaaacaggagcgataa

SEQ ID NO: 376688 - DNA, 1218 bp, Salmonella enterica
atggcaactgaacaaacggctattacgcgcgcaacttttgatgaggtaattctgcctgtttatgcaccggcggactttattccggtcaaaggtaaaggcagccgcgtatgggatcagcagggcaaagagtatatcgatttcgccggcgggattgcagtgactgcgctgggccattgccatccggcactggtcgaggcgctgaaatcccagggggaaaccttgtggcataccagtaacgtttttaccaatgaaccggcgttgtgtctgggacgtaaactgatcgacgccacgtttgccgagcgcgtgctgtttatgaattccggcaccgaagcgaacgaaaccgcttttaaactggcgcgtcattatgcctgcgtgcgccatagcccgttcaaaacgaaaatcattgccttccagaacgcctttcatggccgttccttgtttaccgtctctgtaggcgggcagccgaaatattccgacggctttgggccgaaacccgccgatattattcacgttcccttcaacgatcttcatgcggtgaaagcggtaatggatgaccacacctgcgcggtggtagtcgagccgattcagggtgaaggcggcgtgcaggcggctacaccggaattcctcaaagggttacgcgacctgtgtgacaagcatcaggcgttgctggtgtttgatgaagtgcagtgtgggatggggcgcaccggagacctgtttgcctatatgcactacggcgtcacgccggatatcctcaccagcgccaaagcgttaggcggcggttttccggtgagcgccatgctgaccacgcaggagatcgcctcggccttccatgtcggttcgcatggttcaacctatggcggcaatccgctggcctgtgcggtggctggcgcggcattcgatattattaatacgccagaggtactacaaggcattcacactaagcggcaacagtttgtgcaacatttgcaggcgattgacgagcaatttgacattttcagcgatattcgcggcatggggctgctgattggcgcggaactgaagccgaagtacaaaggtcgggcgcgcgattttctgtacgcaggcgcggaggccggcgtgatggtgctcaatgccggagccgacgtgatgcgttttgccccgtcgctggtggtggaagaggcggatatcaatgaaggaatgcagcgctttgcgcaggcggtagggaaggtggtggcctga

SEQ ID NO: 376689 - DNA, 462 bp, Salmonella enterica
atgtggcgaagactgatttatcacccagagattaattacgcactacggcaaacgctggtgctgtgcctgcctgtggctgttggtttattgataggccagctacacctgggcttgcttttctctctcgttcccgcctgctgcaacattgcaggtctggataccccgcacaaacgcttttttaaacgcctgatcatcggcgcgtcgctgttcgccggatgcagtctggtaacgcaacttctgctggcggaatccatccccctgccgttgatcctgaccgggctcacgctggtgcttggcgtgacggcggaaattagcccgcttcacgcgcggctactgccagcgtcgctgattgccgccatctttaccctgagccttgcgggatacatgcccgtctgggagccgctgctcatttatgcgctgggcacgctatggtacggcgtgtttaactggttttggttctga

SEQ ID NO: 376690 - DNA, 261 bp, Salmonella enterica
atggttgagatcacgtccacagaaatgaccccgcctgtcaatgactcgcatgaatttattcccatgcgtggcattcgtaatcgccatttacaaactatgctgccacgtttaatccgccgcaaagtgaagttcaacgcccactggcagcggctggagctaccggacggcgattttgtcgatctggcatggagcgaagaaccgcaacaggcaaagcataaagcgcggctggctgggcgtggtgatgcactttcgcggctgtag

SEQ ID NO: 376691 - DNA, 330 bp, Salmonella enterica
atgtcgttacttgaacaactggataaaaatattgccgcttctggcggcctgattgtctcctgccagcccgttccgggcagtccgctggataagccggagattgtagcggcaatggcgttggcggcggaacaggcgggcgcggttgcggtgcgtattgaaggcatagacaacctgcgcgtggcccgttcgctcgtttcggtacccattatcggcattatcaaacgcgatctggacgactctccagtgcgcattaccccttttctcgacgatgtagatgcgctggcgcagctattatcgccgttgatggaaccgctcggcaacggccggtag

SEQ ID NO: 376692 - DNA, 546 bp, Salmonella enterica
atgaatatcgcgtttggcatcctgttcgttaccgtctttttctatgcggtttccttcaccctggcgatggggcatgacgaagcggtgaaagcctacgagcagaatatttccgccctggcgatcgccgcgcaatttattagcggcgatggcgctagctgggtcaaagtggttagcgtaattctgaacatctttgccgtcatgaccgccttctttggcgtttatttaggattccgcgaagcgacgcaaggcattgtgatgaatatcctgcgccgcaaaatgcccgccgagaagattaaggaaaatctggtacagcgcggcattatgattttcgctattttgctggcctggagcgccattgtgctcaacgcgccggtactgagcttcacctctatttgtagccctatcttcggtatggtgggctgtttaattccggcatggttggtctacaaggttcccgcattgcacaaatataaaggcgcttcgttgtacctgattattattaccggtctgctgctatgcgtttctccgttcctggcattctcttga

SEQ ID NO: 376693 - DNA, 198 bp, Salmonella enterica
ttgatcggcggcgaaccgcagttgctggaagtggatcatgtggtgatctgcgccggacaggaaccccgccgtgaactggcggacccgttacgcgccgcaggtaaaacggtacatcttatcggcggatgcgatgtcgcgatggaactggatgcccgacgggcgattgcccagggcacccgactggcgctggagatttaa

SEQ ID NO: 376694 - DNA, 699 bp, Salmonella enterica
atgccgataacgccggccatacgcaaaaagaatctggccgttgtcggcgcaggcccggcggggctggctttcgcgattaacgccgcgtcgcgcggccatcatgtcacgctgtttgacgcccagagtgaaattggcggtcagtttactatcgccaggcagatcccgggtaaagaagagttttacgaaacgctgcgctactaccgtcgaatgatcgatgttactggcgttacgctgaaactgaaccaacgggtgaacgcagaggatcttcagccgtttgacgaagcgatcctcgcctgtggaatagtaccgcgccgcccgccgatagacggtatcgatcatccaaaagtattgacctacctggaggtattgcgcgataaagcgccggttggtaagcgagtggtgatcatcggctgcggcgggatcggttttgacacggccatgtatctgagccagcacggcgaatccaccagccaaaatattgctgaattttgtacggaatggggaattgataccagcctgcaacaggcaggcggtctgcgcccggaaggcccgcgcctggcacgtagtccacggcaaatcgtcatgctgcaacgcaaagccagcaagccgggcgaagggttaggtaaaaccaccggctggatccatcgcgcgacgttactggcgcgcggcgtgaagatgatcccggcggtcagttactag

SEQ ID NO: 376695 - DNA, 147 bp, Salmonella enterica
atgagaatcaatgaagagggatggcggctactgacgttctggatgtttactacaggcggctatcttattctgctcttcgttgttatttgcctggcttttttgttccaaacgcctcgtcgcgtgttgctgtggattgctttgccatag

SEQ ID NO: 376696 - DNA, 693 bp, Salmonella enterica
atgctggggcttagtttattgttggcgctactgtttagccaccgattacgccaaccacaccacctttgggccgggtgctatgtggtcgtattgctgctgttgttggcgcacatgggggatattctcgataggcatcatcggcgcgatgcctatcaggcacagcaggtggcggaagaaacgctgttacgaaaaatcgatacgactgatgaccgcgtttttttaaatcatttgatgtcgcaagccatgcagccgcaaaacgcaggggattgggggacgaataggcggattgagcatctcgcaaaacgcatttccccttttgatattgcgggcggaactgaaaaaatttggttggttttggccatcgaccggcttaatcgttctgctgttgggacgtttgcctcctggtttattggcgattctgtacaggcaaagcaatatcggcatcagctcttacaaaacaatccattattggacctactgaatcgtgtttttaatgatagtacggctgatgaacaaacttttctgcaacaacaacttttggcgcgagatatttgtaccagtttgattagcgtcgtgccggaattattgacggacgaactgtatgcacaagccgttgcctttgataatagcaacaaaccggaacctttctcatggcagtttgaatttgatgtgttttatcatcagaaaaaatag

SEQ ID NO: 376697 - DNA, 984 bp, Salmonella enterica
ttgcaggatgcatcttgttatcaattggcaagtgttttgacgctggctgcagaacaccgcgatacaccggaaaatttattgcgttatctggctaaaatacgaggtatttcgccatttttgacagcggcagaatcttgccctgaagcggcgatcccgaacgccgaatttctttatacgccatttgctaccgctcttcgccaacataacgtaccgatagtacgcttttttagccagcaactggtgggcgagacatcttccgccagagagaatcgcaatattgttgctcgtaaagaaaatccactgctgacgctttataaatctaactatatatcacagtatcgcgagcagtacagactagaaattagtcagctattgctgaatattatgccagaactgttgaatgatactgtctatatttatcccattatccaacgtaacactgagttggttgcttatttttggcagaaacaccctcccactattcctctgcgcaggctcgaagcgatggtgttgttagccaaaacggaatcgctaataagcgaggtaacccataatccagaaatattgatcacaccgccgattgagaggtgggatcgtgaaaacctactcactttcatactgagcaatggcgatctggtaatgattcagtcgcttattgatgcaaacgtagtggactggaaacgagcaatggaagacggaaataatgagcctctgcatcaggccatattacgactgcgtggtggagcattagagaacgcattgctgatacagatcattaaggcgatgcaagcgcagaaagcgttatccaacgagcaaatcgcccactatcttccctggacaccgacgtttcctgccgcttttttacaggctgggctttcctgtgagcaattgcgtgaggtgttgaatgctttagtagtggggagcgaacaagtactacacgatacgcgacaaaggctgaatgcgctgtgtccagtcgcgaagtga

SEQ ID NO: 376698 - DNA, 1425 bp, Salmonella enterica
atggattatattaatcgatggcttggctctgaactgctgatgttttgtgttctaccgtgggggtatgccgctgcggtggcatcactgctgatcctgatgttttccaaaaaacgcagccgacagattttgctgtgggtattactaccacagtgggcattcgtggtattgctgttacccacgttgcagtacacccagttgttgagtcaaacaggcacggtatggatgttgatgctcctgttgccgattctgagttgggcgggcttgctgcccgcgctgctgctgggaacctggctgcgcaagccgtggcccgcatggctactgtgccatattgtgttcattgggatgctgtgcccggtgatgccggagctgtggcgtgctattagctatcaatggcaacagcaaaatattgcgcagttgctcaggcaggttcaggcaggcgacctgcgtcagttagagagcattcatgataacagtacgttggaacagacactggttcaggcggtaaaagcgccaggcatatcagaaaaaaacttgcgcgatctgactgcacgtgtggcatcgccttttaggttctcgcgggaagatggctatttcgtcaatgcgccattttttgctgcttttgagagtggcaatatcactgcggtgcgtatttttagcgagcagctcatgggcgactccccgcaggcgcaggcaaatcgcaccatcgtacggcggcaaaatccgttggagtatctccccacgccccgttttaaacctgagggatttcgccagactttttttgagatggccgacattctgctacgggtcatgcccgatctcctcaccgatgaagcctattcgggggcgatacagcttcaggataaagagacactggcctttttctggcagcggcgtgaagcgcaaaatccgctgtatcgcgcatattatttcttgttgcaggggcaaactaaagcgctgcttgcccagataaaactgacgccgcaggtgctggggcagtcggtctatccgaataaaaatctgctggcgtcgctgtttattgatgcggatggcgagacgctgcgtgcgttggtgaaagggcagatgctgaactggcagcacatccctcaggataagttgacggacggctggaatttcctgatttcacgcacattgcatacagcctcgaaagaggacgcgctgccgccggatattctggcggggatactgcaaagtatgcaacagcaacatacggcgttgtcggaagcccttattgtagccagccttgattaccaggatgaaaggcatagcctgatgactgcctaccggatggcctggttggactgtaacaagcttaacgcaatgatcgataaggtgtatccaccagaagatacgcggcgtaccaatgtgcgtataaaattagcacagcagtgcgccgatttagactga

SEQ ID NO: 376699 - DNA, 1422 bp, Salmonella enterica
atgaaaaaatgttttttatttatatttatgtgcctgtttatcttctcagctaatgcggaactaaaattccgccctgagatcgaaaataaaaaaatctattttcagggcaaggtcacagactacacgcttaatgactttatctttttcggtgacagtcgcgaacccttttatggcagcgaaaacgatgattataccgccactgcagatgagtggctcaggttttacgctgagttgcccgacgttcgaaaatggcagcgcgttgttcctgacgatttttctatgatgagtggcgcgccgtggtgtgacatccagttttttgaacaagagaatgaccattcggtgattactggaagtgagcatacgcgctgtattgattttctcgtgacgcctaaaaggaaaggactcattcccatggggacgaagggaactctgttggattacggcagctatcttgcttttgcaccgcagatagagcacatcacgctggaaggccgatttcctgaagcctcgcggacctggcttcaggtaagaagcgtgcaaaccagcgcaacctcgatagccgatcttaaaattatgcttaatgagatttatgctcgtcacggttatattttcagaccgggcggtgagatggatcggtacttccgacagcagccgtggtatcgcccacgctatgcgaacgttgattacctcattaccgagacagagcatcgtaatatcaaactcctcaaagagctgctttctcctgagtcacagcgtaaaaaggcgctgtatattcagaacacaaccgatttttgtgaggcgctgaaagcgaataatatcaaatatgtcatggacaatacggcagaataccttacgactggtgcagatcagccaatcaatttagaaaaagtatggcaaaaatacagagacttaatgatcaatggcggcggaaactgtcaacgcgatatcgagagctataagcgctactcctttttatacagcgaacctttaggtatttattacaattccacttttgagtttgatgaaaagaaagggaaatatgttctcgcttatgtgaactttgattcttcctgcaacaaagagggtgacacgattgaactggaaggtatgatggtcaaacgcgagcacgtcattgaagataatcaaggccaacactcggataaagatctcgaattaaaaacaataaaccttcagtgtgtggcaggggccatgatggaccaacctgactgggatcgctatgtccagctcattcttccgcctgaaaaatacaattattatcaacggtttatagggaagaaaatcaccctgcgagggaaagtcatgattgcagaatccatgtatcatgtcacgccggtactgttgaatttgctcgaagaacaaaatcctattatcaaagtagcagatatgcctgctcgtccataa

SEQ ID NO: 376700 - DNA, 228 bp, Salmonella enterica
gtgattcgcgaactggcggataaatacggcaaaacgcccgcccagattgttattcgctggcatctggactgcgggctggtagtcattccgaaatccgtcactccttcccgtatcgcggaaaactttgctgtctgggatttccgtctcgataaagatgaattaggcgagatcgcaaaactggatcaaggaaaacgcctcgggcccgatccggatcagtccggcggttaa

SEQ ID NO: 376701 - DNA, 1188 bp, Salmonella enterica
atgacggataaacagttggataccaaactggtaaacgcaggacgcagcaaaaaatacacgcttggctcagtgaatagtgtgattcaacgcgcttcttcactggtgtttgacaccgtcgaggccaaaaaacacgctacccgcaatcgcgccaacggcgaattattttacggacgccggggaacgctgactcacttttcgctccaggaagccatgtgtgaactggaaggcggcgccggatgcgcgctcttcccgtgcggtgcggcggcggtcgccaacaccattctggcattcgttgaacagggcgaccacatcctgatgaccaacacagcctatgaacccagccaggatttctgcagcaaaattctcggcaaactgggcgtgacgacaagctggttcgacccgctcatcggcgctgatatcacgcaacatattcagccgaacacgaaagtcgtatttctggaatcccccggttctattaccatggaagtacatgatattccgaccattgttagtgcggtcagacgcgtcgcgccagacgccgtcatcatgattgataatacctgggcggctggcgttctgttcaaagctctggaattcgatattgatatctctatccaggcgggcactaagtatctaattggtcattctgatgcgatggtcggtactgccgttgcaaatgcgcgctgctgggaacaattgcgggaaaacgcctatctgatggggcaaatgctcgacgccgacacggcttatatgaccagccgcggtctgcgcacgctcggcgtccgactgcgccagcatcaagaaagcagcctcaaaatcgccgcgtggctggcgaaccattctcaggtcgcgcgcgttaatcatccggccctgccgggtagcaaaggtcatgcgttctggaaacgagactttacaggcagcagcggcctgttctcctttgtgctcaataaaaagctgaccgaggcagaattatcagcctatctggataacttttcgctgttcagtatggcctactcctggggaggctacgaatcgctgattattgctaatcagccggaacagatcgccgcgattcgtcccgcaggcggcgtagattttaccggtacgctggttcgagtgcatattggtttagagagtgttgatgatttgatcgctgatttagccgccggcttcgccagaattgtgtaa

SEQ ID NO: 376702 - DNA, 651 bp, Salmonella enterica
atgaaaaaaatcactatcattagtttgtttcttatcttacctttgaaagcaaatattattccatctatatcattaccagataaattaagtgagtcgaaatattctgtaagaatgcttcgcattgatgcaaggattgactatcgcgtggaaacccctgagtgtaagaacgtaaaatttaatgattactttttcttaaatgaaaatattaaagatctcaatgataaaaaccatgtttatgatcctgagttttatccaattacattatggagttgttcatatagcagagaggtgtatgatgttggtgagtatggctcacatatacagcacatcgtttttgataaaaataaaaacatatgggtgatagatgatgatgcaacaaaaacaaataatgaatttaaaccatcatttttatataatataagttcagtgaatgcacagggtttcttaatcattgatgagaatatttcggagatggataaaacaatatacgaagatgataacataaaaaagaaattttatttttgtatgattgatggctcacatgctttatgcggcgcaggcagtttaatcagaaaaatagataatcagttgattgattttacgccatacatattaaagtcactggaaagtatggagattggcgttaattaa

SEQ ID NO: 376703 - DNA, 525 bp, Salmonella enterica
gtgtcatgggtaataacgaaaaaattcatttatattgtgacaatcgccatattattttgttctgttgttatatacttatggtcaggcagaccagtagaaatcgtggatgtccattattattcaggtaaagacattaacattcttgccaggcatttccccattacggacaggggaaagctgaattggtggagagaaaatgaaagaaaaattctggaaaaatataatctccctaaaaataatttttcggtatatatatgggattttggtgacggttatcaaaaattatcgccctatgatgccgaggatgaattttattgttttcctgatataaaatcagaatcaaaatgtatcaaaaaagatatatatatgcctgctgaatctggtggtaattattatcggatgtttttattttctggttctggttatttttatcaaccgaaaaaagatgatgataagcttatcgaatcaaataactccaccaagctcaaccaggataaaagccatgaaaaaaatcactatcattag

SEQ ID NO: 376704 - DNA, 504 bp, Salmonella enterica
atggctaaatatatattcctctttatctggattgtgacattttctgtcagcgctggtgagcgaggatattatttattcgtatggggtaaccctgaagggaaggaatattttaaagaatatagagctgatgaaaggatatatgcggtcaataaatcctgttggaatgaaagagcggggaactctatacgaatagtatatgttgatacttatcctcatggaataaccgattctttaattaattcctttttggctgggaataataaatccataataaatattagagtatcattgagtaattttagtgacgatcaaatacttcatggttttgatggcatgttaataataaataaaaaaaatgaagagatcgagatttttactattccagtagttggtgctaattactcatataaagataaatttttagtaaacgtccatgattttgaattatttgatggaaagatctgtaacgctttgatgcctatagatagttatttttcaccataa

SEQ ID NO: 376705 - DNA, 279 bp, Salmonella enterica
atggaactaaaaaataaccttgaagattatacagaagatgagtttatcgagtttttaaataatttttttgagcctcctgaagagttgactggagatgaattatcgaagtttattgataatcttctacgccattttaataaaattactcaacaccctgatggcggggatttgatattttatccatcagaggaacgagaagatagtcctgaaggagttattgaagagctaaaacgctggcggaagtctcagagactcccctgttttaaggaaaataagtag

SEQ ID NO: 376706 - DNA, 267 bp, Salmonella enterica
atgaaattaaaagaaaatattagtgattatacggaaagtgagttcattgatttcttgagagtgatattttctgaaaacgagtcggatacagatgaaacattagatccattacttgagtattttgagaagatcactgaatacccaggtggaacagatcttatctattatcctgaaacggaaagtgatggaacacctgagggtattctgaacataattaaagaatggagagaatctcaaggattgccttgttttaagaaaagtaaatga

SEQ ID NO: 376707 - DNA, 318 bp, Salmonella enterica
atgcccacagccgcccgactcaacgataaaggcacccagtacgacgattattacgagaccgtgagtatagcggattcccccacggtatttattgacggcctgtccgttgccagaatgggtgatgcggtggactgtggcgggatggttaatatgactcgaatgaaatcaggtaaggcatcaaaggttagaaaagttgacagagtcggaaaacaggggttcgagcttcatcatatagatgaagttgcaaatagaggcgatgtttacaatgtagacaatccccgtgtgaacaccatattgacatacacaggcgatttatga

SEQ ID NO: 376708 - DNA, 174 bp, Salmonella enterica
atgctgggttataacaggagttacaacgccatccagatcgaatgccggattatatttaatcgttccctgctgtacggcgtggcgcataattttggtcagatgctggcgtatacgtccggcaacaacatgcacacctttatcatcaatgtctctgaccagtcgtgcgagatgtag

SEQ ID NO: 376709 - DNA, 285 bp, Salmonella enterica
atggcattaaccgacaaacaagcacgtagtgcaaagccttctgataaaccctataaactcgttgatacactcggcctgtatcttctggtaaaacccaacgattttcgtatctggtatttcaaatatcgttttgagggaaaagagtccggggtatcattcggtccttatcccgaaacctcattcgcccttgtccgcgaaaaacgcgatgccacccggcgcgtactaaaatccggctttaccccttctcagcagcgccgggacgaaaaaaggttgtcaatgaattag

SEQ ID NO: 376710 - DNA, 1035 bp, Salmonella enterica
atgcaaactgtatctcgcgttaagtgttccccccaggtttcaaccggggagtctgtagaaagaaaaccagacgccagtattcatttggcacagcaggtttcaccgcattcgttgttactccctgatgagcaacaattcccggtagtattgccagtagtatccactaagggcggagaagggaagtcaaccaaggcaggcaatattgcgggttacaccgccgatgctggtctgaaaacactgctaatcgatggtgattataatcagccaacagccagcagtatttttaaacttcactatgaagcaccctgcggactgtatgaattactcatgcagactgctgaccttaacaaacctgacagcatcatttcccgcacggttattcccaatcttgacgtcatcatttccaacgatcctgacgatcgtctttccaatgatatgctgcatgcagctgatggcagaatgcgtctgcgtaatgtcctgcagcatcctcttttcagacaatatgacgtcataatcgtcgattccaaaggcgctggcggggtgatggtggagctcgtggtgctcgctgcgactcaaagcgtcatgggtgttattaaaccgattttacccgatgtacgtgagttcctacgcggcactgtacgtcttttatccaaacttctggttctggaaccctacggtatccatattcccgatattcgaattctcgccaactgtgttgaacccactgtactggatcgaaacaccctcaacgaactcaaggcaatcgtggataaaggtcagtacccccagtcagaccgtattgccatatcaatgctgaataccgaaatagagcaactggaagtctacaaacgtgggcatgcgtgcgggcagccagtacatcgtctcgaatataaaactgaccgggtaagcctgccggcagcggagtccatgcaccacctggtctgtgagttatttcctcaatggaaagataagtttgatgcggttctggttaaccggcctcagcccggatttggtcagggggcggatgaggtatga

SEQ ID NO: 376711 - DNA, 1365 bp, Salmonella enterica
atgagccataaatctgtttctgcagtatccatgctgtttaatgtcggagctgaaaccggtgttctgggcggactgatgctcgataacgaccgctgggatgaaattgcgccgcttctgaattccggagatttttattatggccagcatcagatcatttttcgggagatagaacggttggtcagtgctggcctgcccattgacctgataaccctgtccgaatccatggagcgaaaagatctgctggagcggtgcgggggggtcgcttatctggctgaactgtcaaaaaacacgcccagcgccgccaatatcgttgcttatgccgaaattgtgcgcgagtacagtcgtaagcgacggctggttaagctggggcatgagctacatcaactggcctcagtcggcgatgcggatatacccggtctgattgaaaaggccgaaaagcagttatttagtctggctcagcaggcctgtgaccccgacatttgtctgagcgtaacgactcaggtcgctgacacggtcagctggctggaatcggtcagtgggggaagcggtgtgaccggtacagcgacaggttttgctgaactggatgagaaaacctgtggctggcaggacggtgacctgattttactgggtgcccggccatcaatggggaaaacggcagaagcactgaaacatgccgttgctgcgctggaaggcagtcccggcaagaccgttcagttctacagcatagagatgccaacccagcagctgataatgcgtctgctttcaatgctggccagagtgcccttcgataacctgcgcaaaggtctgctgagcgaagggcagtggagtttacttgcggatgccgtagcaaaactgacctcctgggaaggacgtttgctgatagacgataccagttatcagacgccttccacgttacgtatcagcgcgcggcgtaatgtgcgtaaatacggtcagccctcacttattcttgttgattatcttcagttaatgagttgtcctggccgggagaaccgcactcaggaaattcaggagatttcccgttcgctcaagtcactggccaaagagataaggtgccctgtggcagctttatcccagctcaatcgcagcgttgaacagcgtcaggataaacgtccgatggtcagtgaccttcgggattccggctcactggagcaggatgcggatgtcatcatgttcctgtaccgcgatgaagtttataacgagcactccccggatagaggcatagctgaaatcattctgggtaagcaacgtcaggggccgctgggcactgtcaaagttcgctttgagggggagtatatgcgcttctcggagtatcaccttggttatggggaggtgagctatggctaa

SEQ ID NO: 376712 - DNA, 1800 bp, Salmonella enterica
atggctaaagcaccactgttaaatcttaataatgcgctgctacagggggcgaaggaatcatctgcagctacaaccgctgctgttgcgattatgccgaccagtgaaatgccgatggtgctgacgctcgatgaggtagctcctaatccggacaatcctcgcacaacacgcaatcctaagtacgatgaaatcaaggaatccatcagagcccgtggtctggatacggtcccgaaagtgacgaaaaacccggatatccccggctctccttatattttcagcgatggtggtaacacccgctacgccattctgcgagagctgtttgctgaaacacaggatgaacgcttttaccgcttccatgctctgttcaagccatggcctggcaggcttgaatgtctggtagggcatctggccgagaatgatgtaaggggggatctaacctttatcgacaaagcgctgggaataaaaaaagcccgcgccattcatgaagaaactcttggacgaacggtaaccctgcgagagctggcggacctgctcggacagcagggataccccattcacaactcaatgatcagccgtatggaacatacggtggaatatctttatccctttatgccggagttgctggtttctgggttaggtaagccccagatagttaatttattaaatttgcgagctgatgctttaaaaatttggcagcaatattcggtgatgactgagactgatagtgattttaatgagattttcggtcatgtctgtactcagtttgacgatccggaggtgtattccttcgaaatgttcagagatgagtttatcggtatgttggtgaatgttttaccacacccttctcttaactatgatcggtggctacttgagctggatcctaaggcacgtaaccagagaaagttatttggtgagccagaacctgtggcatctcatctggtggatgcagatcgccagacatggcagagcactgcatcattgccgggtactgcaaacgatgagaatcaacaaggcggttcctctttaaaaccgaagctgaataacgcccctgtcttacctaaacaaccagatccagataatgacaatggggataacgatgatgtgaccggcgaatggttcggttcttgtggatcacctcgtttacctaaagctgaagtccagaacgatttcctcggggggccctcagttttaaccggtgatgttattcctgatgagtaccactttattcccgacgccggaaatatcgctgtcagtgcatcagctttcgctggcgctcaggtgggattgactgcggatactccttctgacgccgttagtattgccagcgagatgccgggtctctcacttttacccacagaaccagcactttcctcagttgagtttgccaacgtagggctcgagcctgttactgatatctgggtcattccggctctgcaggatgatatcgaacatctgcaggacatggcttaccggcttgcttatgaacttgcagaggcgatgggctgtgaggttcatgtcagtgaagataaaaatgccagtgcggccgggttctctgtttcagaacacggcggagaatttgctctttttctggcagggctttccggtcacgtgccgaataaacaattcaacatgtttatgttctgtctcaacttctttggctcccaatcagcgggagatacgcctgtttttgacgatgtgcatgtagtgaagagtctgcgccttattcgtgttattcgccgtctgcgcgagctgcagagaaatatggcggctgaacaaaatgacgggaggaggcatgagcattga

SEQ ID NO: 376713 - DNA, 228 bp, Salmonella enterica
atgagcattgatgttgatgattcgatggctcagaacgaatcgcaggtaaacattgacaacaggtttgccgaaatccgggctgctcttcggattaagggacatgtatcacgacgacattgtcgggactgtggtgatgaaatccctgactcgcgccgtgagtccatccccggggtaagcctgtgcatgtactgtcaggaatggcgagaatcaggagacaaaaaacaatga

SEQ ID NO: 376714 - DNA, 261 bp, Salmonella enterica
atgaagagtctgaaaaagccccgctcacattaccagtgggtcggtgccacggttgtcaccacacaggagctgagcagtggactggcggttattcctgtcggaagtcgaggcgtagtgaatgcagcaaagcgcgggctgtcggtaatatttgatgcctgcccgtgttgcggtgttcagctaaggctgacccgtattcgtcctgagatgcttgatattgtggcatatccggaaattgaggaggtgactcgtgtcggcgaatga

SEQ ID NO: 376715 - DNA, 723 bp, Salmonella enterica
gtgtcggcgaatgaaaaagttctttcacgtatcaagaagctaatggtactggccgaaaaaacaggtaatccctatgaggcatcagtggctttacggcaggcccaggcattgatgatgaaatacgatgtaaccccggcgagcgtggtaccgggagaaataacaagtgagacctgcaggaatatccccagtaatgctctttcggttccgggttggctgaatgctctggttacagtggtttgcatgaccgcgggctgtcgcagctattacggctggtatcagaacagtgatcataagaagcgtcgcagcgtaacattttacgggcttggtgaacgtccggcggtggcgggttatctgtttggcgttgtctcccgtcagttgaagcgtgatgccgaacattatctccataccgcgtgcgcacatccgttactgaaactttccactatccgtcgccgtatggatgaataccgtttgtactgggtggccggagtatggacggttctggagtcatttgaacctgaaacatcagaaaaagttctactcgaccgctggttaacacagcagcagcgcaatctgacccctgcgaaagtacggcagccggaagggtgtcgtaacgccaaaaaagtgaggcaggctgcatggacagctggtaggcaggctgagatttatccggctatggactatcgcagtgaggagcattcgcttcaggaggtatccaatggttaa

SEQ ID NO: 376716 - DNA, 558 bp, Salmonella enterica
atgactttttcacttgcacagggtgccaacagtcttttgttcaatctggttatggaactgagaggtggaaatattcggcgatgtgaggcgctggggttgaaacctgaagaaatgcgtctcctcagaagtctgacgatggaagaactgcattatctgtcaggcagccctgtttctgttttaaatgtagcaatacatcatgaaaatctaaaacgaatgctggaccaggccaatcgtgagcaaaagcgtagcgaacgaattgatcgtgctattgctcttggtgcatcaatagagatgatggggatcttctttggtctgaatgcttcagatgtcagttctaaacggcggctcgaggggatccagacacgtcagggacgttgccagtcacctgatgaggagtgtgaagcgaagatatggcgtctctggcatgaggccaatatcagcgatatagaaagtcttaactctcttgaaactatgatgcttattgcggaagaggctgatgtcagtctcacggtgatctggggattaatcaaaaactggtgtacgggggaggtagcctga

SEQ ID NO: 376717 - DNA, 249 bp, Salmonella enterica
atggattcactggcaccctcctttcagttttaccgtactgacccgagaaatgtgagtaaagctgtcacgtcaaaggcgcgtacactgctttccctgtaccagcagggaaagcgagtctacagccagataggacagacaggttatctcaagattgatctgggattacgctggcgtctgctgagtaaggatgcaggtaaaagctggttatttatgtctcaccagacctataaccgggaactgaaacgatga

SEQ ID NO: 376718 - DNA, 1344 bp, Salmonella enterica
atgagagacgcatcgataacaacagaaagaacgatgcaaactccggctcaggtgatggaagaacccggttcatccgttcaccgtttgcctgcagatgatatcattgactacaccttgtcgaagatgcaggcacggcttgacggtacgccgggttcgtcggggcaggagcgtaacgggctgctgtttacaggtaatattcacgacgcctacccgcgggcgctaatcctggatatgcgcctttctcctctggataaaatgtgctggataatgatacggcagtatgccctgcagaacgacggcgccatcttcccctcatatgatgaacttcagaaactgctttcttcccccggttccggacaggcgtcacgcgatacggtgagccgtgcgctgaccatgcttcgactaacgggctggttgagtttgtgcaagcgggtgcgtgataccgggggccgggtacggggaaatatttacgcccagcatgatgaaccagtcagtgcgaaggatgcagagatgtttgacccgggatggctggatatggtgggtaaagcctgccagcacaaatacagagaggtcagcgacacggcctttcatgtactgaacgggatacttgatgatccgatgatgcgtcacaggcattcgcggatgacggaaattgcggaacgtctgacccgcccgtccaaggtgggtgatgttgcccgcactcatcaaaatccgggtaccggactcagtctgaatagcataaaaaatgagcataaatcacttagtccggtaaacagacccagtagtgagaggggggagaaatcaccgagtccggatagcagactcagcctgaaatcagacagttacgacagagtccggcaaccggactgcaataacgtacgttctttcacacaaagtgtgattaaaaaaacgtacgtatctccccagagtggcaaaaatgcggttgccggaatacccgaggggttcgtgtggcctgatggtctgcagtccatcctgccggaaagtgaacaacccatgctggctcaacagttgaatcagcttgcacagaaatcaccagttcaggctgaacagatcgccctcagcgtggtgaatggctggcaccagaaacgtatcagcaatccggtgggctacttgctgactacactcaggcaagcgagggcaggactgtatcgtctggaacctgctgtcactcagcctgttaagagcagatctgtcgtgccagctgagccatccgctgccgggaaaatcccgacatgctcagctgaagctgatgtccctgcaggtcaggaagtcgtgaaggcgatggtggagcaaattcgtcagagaatgaattcctctcaatga

SEQ ID NO: 376719 - DNA, 777 bp, Salmonella enterica
atgagtgagaaagaacaggtatcagtgtccagaaaagcgggtgctttacgttcggcgctgaacatagcgttgaatactgattatgcaataaatttgtggcaggggcgtcctccggaagaagagggggaaaaggaggggaagaaaaaagagcgtcgtcagagtcttattttcagtatgccagccttcattcaaaaagcaggtcgtattaatgccgattcatttaatgacaatccgtatgctgatcagaagatgcttgagcttgagacacttttgcagtccgcttcggtcaagatgaatgaagagcttgttgcactcaagaagtcaatgtcaatgctaccccctcaggcgactatttctgaggtcaactgtgcttctcctttaaatattggagttttcagtcgtacacctctgggttatcgatgtgtatggcttctggttggctttgaccaactggcaatgcaggcttttcaggccgcgcattatggttttatctcccggcaagagcttcaccgtagccttcgacggggaggccatctaatccgtcagatctatggtgccgctcagaaatatcgtttttttcaggtgaaccgccgcgattttgcattacagaatgctcagtaccatgaggcaatcaggaacgcaggtgaaattgacgaagctgttttgttggggcaaaaacgttcctctttttcacccccagtcagtaaggagagtattgaacttctactggcggcaaatgcaaaagcagacaaagcagatattgtgcaattactgtaa

SEQ ID NO: 376720 - DNA, 1995 bp, Salmonella enterica
atgcgtctggtgttgtgtgaaaaaccttctcagggcagagatattgcgaagtttcttggcgccactcaaagaggcgaaggattcctgaatggtccgggagttacagtcacctgggctcgcggccatctgctggagacagctgaaccggaagtatatggcgaacagtatggtaagccatggcgcaccgatgtgcttcctttattaccacagcagtggaaactggtagtcaaagcggatgcaaaagcccaattcgcggtaattaaccgtctgcttaaacaggtagatgaggtggtaattgccacggatgctgaccgggaaggtgaagtaatcgcccgtgagttgctggattactgcaagtttcaggggcgtgtattccggttgtggatgtcagctctggatgatgccagtatccggtcagcgttagctgatttgtggccgtcttcccgaactgaatcgctttattatgctggcgtgggcaggagcagggctgactggctgatcggtatgaatctgactcgcctgtttacactcctggggcgtgaagcgggtatcggtaacgtactttcagttggccgggtacaaacgccaacgctggcgatagtggtaaagcgtgatcgtgaaattgataacttcgtgtcgaaaccgtacttcgaagttattgccacgatggccgtgaatggcgtgttgtttccatccaaatgggtaccggctgcacagtattgcgatgaagagaagcgttgtatccagtcgggggtagcggcacaggtggttcagttgtgtcggcaaacgccaacggctgcgataatcaattgccagatcgagaggaaaaaacaatcagcgccgctggctttcagcctgagcacactacaacaggcctgctcccgacactgggggatgccagcccagacggtacttgatatcgcccagaagttatatgaaacccacaaactgacgacctatcccagaactgactgtggttatctgccgttatcgatgcgagaagaaatcccacaggtactgtctgctgtggtcggaactgatccggcgctacagccggtggtcgcgagtctggacactcagtttgtgtcacgtatctggaatgataaaaaaattaccgctcatcacggtatcattccgacaaaacatactggtgatctgagcaaactcagtgatgctgagcgcaatgtctatcagctggtcaggttgcactacctggcccagttcctgccccagatggaaattgacgtgactgaggccacatttaatattggcggtcagcttttccgtacccgtggtaacgttttggtgaaacccggctggaaatctctgtttggcaaaatgtccgaagatgatgaggataatactggtgaaaccacactgcccgccatgcaggcgggccaggtctgccaggtgcagggcgctgagcagaaggtactgcagacaaaaccgcctgctccgtacaacgatggaactcttattgccgcgatgaccaatgcggcggcgttcgttactgacgccgcgctgaaaaaggtgctcaaagagaatgcggggataggaactgaagcaacacgggccgggataatcgacacgctgttgaagcgtgggtttctggtgcgtgagaaaaagacgcttaagtcaacacctcttggacgtaacctggtggatgtgttgccaggaacgttaacgaatcccggacttacggcactgtgggaacagatgctggatgaggtagctgcaggcagggtgagcctggatgactttatggcaaagcaaagtcagtgggtcagtcagctggtcgctcaggggagatcacagccactgactatgcaggcgccaccttcaccaccctgtcctgtatgtggcggcaagacgttgcagcgcaatggaaagagtggcttgttctggggctgcctgaaatatccggagtgcaaaggtatcgtgaacaatggtaacaagggccccagaggacgcagacgaaaaccttcgccagcctag

SEQ ID NO: 376721 - DNA, 177 bp, Salmonella enterica
atggctgtggaacggttcgaaagctttgcatgcctttcgcaactccagtcaggagaacgatctttactcgaaggatccgtcctcaaagcgcaatcactccgtgaaaaccgcgctgagccattgaccggcttcggagatttgattttacctcatgttctggtgcaacagtttggttga

SEQ ID NO: 376722 - DNA, 450 bp, Salmonella enterica
atgtctaaagaaactaactactttaatctgaatatcaacggtctgggctatatcacgaatgtacgtcaggttgtcaacggtaacagtaagtttacctgttgtacgctgaatgcccttagtggtccgacagataatgcagactacacccgctttgatgtcacagtcgcaggcaaagacgcaacgagtttaattaaccgctgccagaagtcctgtgatgaggacaaaaaagtaatgatcggttttgttctcagtgggatcaaatccgatatttttacccttgcaaaaggtgatcatgccggtgaaaaccgtgtcagcctgaagactcgcctcatccgggttgactggataaaaattgacggtgcaattgtctataaggcagaaaaaccggattccactcctccggcccagagccagcccgcgcagaagcagtacgcggaagattcgttctga

SEQ ID NO: 376723 - DNA, 219 bp, Salmonella enterica
atgttaacttcaccatcatcttctactggtttactggcagcaaaatttgccgggttatccttacctttacaggtccttcgcagtggtgccggatattacatcggcacgcaaaatgaagaagggccggtatcccgtgaatctgttgagtacttttccactcagtctcaggcagaacatgcgctcaaacagggcacatggtcacagcgtgaacaggcttaa

SEQ ID NO: 376724 - DNA, 537 bp, Salmonella enterica
atggcttctaaaggtgtaaacaaagttattctggtgggaaatctgggacaggatcctgaggtgcgttatatgccaaatggcggtgccgtggtaaacctcagtctggcaacctcagatacctggacagataaacagaccggtgacaaaaaagagcgcactgaatggcacagggtggttctttacggcaagctggccgaaattgccagtgagtatctgcgtaagggctcccaggtatacatcgaaggtgcattacgcacccgcaaatggacggatcagtctggcgttgaaaagtacactacagaagtggtcgtcagccagtcaggtacgatgcagatgttgggcggacgaaatagtgcgggaagtgggcagcaacagggcggctggggtcagcctcagcaaccagcagcgccttctcacagcgggatgccacctcaacagcatcctgcaaatgagccgccaatggacttcgacgatgatatcccgttcgcgccgttcgggcacagtgtggccagacatgcgctttatgtgctgtcctga

SEQ ID NO: 376725 - DNA, 609 bp, Salmonella enterica
atggataacgaaaagggtcataaccggcccgggcacgatggcctgtttaagctttttctgcgtgagccggacactgcgagggatttcctggcagttcatcttcccgcagatatccgcgcgcaggttcgtctcgatacgctgaagcttgaaccgggtagttttgtggatcagaagcttcgcgaactgcactcggatgtactgtattcggtggaaaccgcagaaggtcacgccgggtacatatactgtcttgtggaacaccagtcgaccgcagaccggatgatggcctggcggatgatgcgttactcgatggcagtgatggatgcccacctgaaaaagggtaacgggacactgccggtggtggtgccgttactgttttatcagggaatggtgcggccttacccatacagtacagactggatggactgtttcgatgtaccggcgctggcgcgggaggtttactcccgaccgtggcccctggtggatgtcagcgtcatggaggactgcgacctgcagtctcaccgtcgtatggcattactggagctggttcagcgggatatccggcatcgcgacgctgcatcgctgctgcgtgatgttgtacagctgatttga

SEQ ID NO: 376726 - DNA, 318 bp, Salmonella enterica
gtggaagccgtcctgtgttatattatctacaatggcatgacaagcgagagtatcacgccgtttttatacgaactggccggtgagatcccggagtataaggagttgatcatgggcacaattgcacagcaactgaaagaagaaggtatccagcagggtattcagcagagtattcagcaggagcgtcaggccagccttgagcgtgagcagaagacgttactggaaactgcgtatgccttgcttgacaatggtgtcagcctggaagtggtgattaaatccacaggtctgaaccgcgagacgctggaacaaccgcgtcattaa

SEQ ID NO: 376727 - DNA, 1245 bp, Salmonella enterica
atgaacacacaagcgcttttctgcctgagcctgccgctggtgattgccgggtgtgcacagcagacctccacccaaaccgctcgcgacagcgcatttgcacagagtcagcagccttccgtcttctctgatatttaccagcgatcaccggaggtgactcgcagcgggcgttacacgctggtcagtattaaaagtgcggatgcgcagcgggaaccgctcaaccagctcatcgatattactatgccagggcaactggttaactcagtcggtgacggatttcgctacctgctgtttcagtctggttattccctgtgcggacattatggtgctgacttttctgagctgctgaaccggccgttaccggccgttcagcgcaaaattgggccgatgcgactcagtgaggcactgcaggtggtcgccggtcctgcctggcgaatgtccgtggatgaagtcaaccgggaggtctgtttcgtattgcgtgatgcatatcgggtacaggctaaaactaaagcactgacatctgtcacacccgccgtgaccggcgccgcaagaacctcctccccggaaaccacccgcaatccttataccggcgttctgccggggaataaagctgaacccgtgatcgccggccagcacctggcggcgaagaaaggtactgaactgaaaccggtcagtcagtcacttcctgtccctgccctgagacctggtgggacaccggtaacgtcaggagtgtcctctgccccccccgtgaaacaagtctcttctccggctccgcgcaatccgttcacaggaaaaaacctgaccgggaccaccctgtcggcgtctcattcaccggcgcctgtgggagagaaggctcaggctaaaacaccgtctccctcaaccgttaaggctgtaaatccggcgacggctacggtactggccacgacaacaaaaccgttaaccggtacgcctgtagctgcagtggccagtggccctgagtggaaggcggttgtcggcagcacgctcaaagagtccctgactgactgggccggaagagctgactgtccggggggaggacactgggtggttatctggcagacccctacggattaccgcattgacgcaccgttggtatttaaaggcaactttgagacggcgctggttcaggtgtttgacctttataagaaagctgacaagcccttatttgctgaagcttcccgcctgcagtgcctggtttcagttgcggataaaccggctgaccggtcgtag

SEQ ID NO: 376728 - DNA, 420 bp, Salmonella enterica
atgggctggttcattgtcgctctgggcacagtatttctgcttgtcgtcggacatgtccagaccactcagcgaagcgaggttgtcaaagcgcagcagtcggggagttcgtatctgttggcccggcaaatgttattgctggctgcgggaattaatgactggcgctaccgacataccctgacggacggaacggtcgccttgtcagaactggccctgccggtggctcctgacagccgtatccgacatgtcattgtggctaaccggctgtgggtctggatgcctgaagtcccgggtctggtggatgcgctgcgtgaacagtcaggtgggtcggcattaactggcacggtgacgcaggggcaactggtctggttatccggtatcggtaatggaccattcagtgcccgcgtggtaccggacgactga

SEQ ID NO: 376729 - DNA, 936 bp, Salmonella enterica
ttggatcaactgggcggcgctgttgattcggcacgcgcgaccgccacaccagtggtactgagtggcctgcgctggcagggcaaactgtccggtctgctggacatgatttcggccaggacaggcctcaccccgcgtatggataacggggcaattctgttttcactcctggagacgcgtactttccagttcacatttctgaataccaatattaccagtaatgccagtgttacctcgggttcaacaagcagtatgggaaccagtggtggcagtacaaacagttcggtgtcaggggattcaagctcttcgcagcagacgacggtcgaccagagccgtaatgtctatgacgatatgaaaaagacgctggaaaccatggtgactccgcaaaagggacgtttctggctgtcggccagtaccggcactctgacggtaacggataccccttctgtactcaacagtatcgcggcgtatgttgagcagcagaaccgtcagatgaaccgccaggtcaggctcaacgttcaggtactgagtgtcagtacttcacgtaaggaacaactgggactggactggaatatcgtttacaagtccctgcgctcagccggtgcttcactcaataatgtaagtggtgatatcaccaacgcaacgtcggcgtcggtatctattctggattcagcaaccggaagtgcggctaaatttgccggctccagtctgctgattaaagctctgtcagagcagggcgatgtcagtgtggtcacctcgcagggtagcgtgaccacgaaccttacacctgtacctattcagatggccgaccagacggtctacgtggcacagagttcaactactaccacaaccgatgtgggtgcccacatccctgacgccgggtatgatgactaccggcttcaacatgacgttactgccactgattcaggatggtggtga

SEQ ID NO: 376730 - DNA, 360 bp, Salmonella enterica
atgatgactaccggcttcaacatgacgttactgccactgattcaggatggtggtgacgtgcaactgcaggtggcattcaacctgtctgacccaccgactattcgtaacttcacgtccaaagacggcaactcgtacatcgagatgccgtacaccaaactccgctcgctcagccagaaaactaaccttcgcgcagggcaggcactggtgctgacaggttttgatcagagtaatacccggatgaccaaaaacggcacctttaccccgggtaatttcctgctgggtggcggtcgggacggcgatgattctcgtagtacgctggtcattattatcaccccggagctgatggggaacggtggctga

SEQ ID NO: 376731 - DNA, 1287 bp, Salmonella enterica
atggcagatattccgttatccggcaagccccgtacgcaggttctgcgctggcagcgccagaactgggtagcggggcttcgctgggaagaaaagcaaaagtcggtacgtcgagcccctgtacaacgtcggggtgttctgaacgttgtgttgacggtgaagcagggcaagagccggttgaccgcgttggggcaaattgaggccggctggcgtcaccagaagctgtattccctggcggcgctgttcagccagcagtgtacacccaatggctatggggtataccagcttgatgatggcagacaggtctttctggccacggtgaaggggatgccatctccgatggcagatgtgatcggaactccagatcaaatcatccgggcgagagagctctttctgtccttcaaccctgctcctgaggacggatggacgataccttcatcaccggaattccccttgtcctggaacactttggtcggtcaggtatcttcggcacagctccggtttgccagagtggcgggcgtgtctaatcctttgcggccatacggggcgggagtgctgtcagtggctgccctgcttggtggtgcagtctggtggagcaggttacccgaacctccggtcgcgcctgtcgtgcaggagttaccggcaccggtgcaggacgtgtttaaaaaaacacctgaacctgtttaccttccacatccctgggcagatatgcctgtggccagacactttctgaaccgctgtcagcgctggcgcgccgcagttcctgtaagtcttgaccgttggcgtctcgaacggattcgttgcagtgctgaggggctggagacggtgtaccagcggcagcccggtgggacggcggcaggctttgcggagcgggtgaagcaggtttttaagcgtacaccagtattcaaccttgtttcaggtggcaacgaaggtgtggtgtttattccatgggcgaaattcacattacaggatgagactgcgccggatgcggggacccagttgatgcaggcggtgtcgtggtttcagtcacgccaggtcagtttttctctgtccgaagtgaaaactcctcccgcgatgcccggtgatggtgccggcaacgatgcgccccagccgatacaggactggcatgaatacacgttcagtatcactgataaacacatgcctgagtggattttacagggactcgatatgcagggggtacggctgagttctgtgggttacaccctgagtcctcagggacagtttacttatcagattgaggggcatctttatgcttatgccaaaaaatag

SEQ ID NO: 376732 - DNA, 588 bp, Salmonella enterica
atgcttatgccaaaaaatagtgttttcatcagtggtgttctcctgatggcgttcagcgcaggggcattttcgcagcccacactcgcagttcctccttccgcagaggtgatttctgcaatgcctgccagtgaacccgctacggaagcagcggcatcgatatcctctgcagacttatcagatacagtccccattttccccggtaacagcgtgacggccggacagctggaggcgctgcaggggaaaaacctgctcctggaggcaaaggttcaggcagcccgactgctaaaagagctgacttctgcacaaactccgggggatgttggcaatgtgcccacgaccagtccgttcgttatgggaatgccggcagagatgaatgcgactcctgttcacaccccccctgcaactggacgaattacggttctggaagtgagtggccgtggtaacgccctgcaggccacgctgtcatttccggatggccgacaaagcctggtacagacgggaagtgtgattccggggacatcactgaaggtgaaggcaataacgctctcatccgtcacgctcagtgacggtcagcaactgacgttttag

SEQ ID NO: 376733 - DNA, 1716 bp, Salmonella enterica
atgtctgaacacaacgatgcggttctgctttaccacaacccggacaccacgatcctcgagctgctggttgacagccagcggcgtaccgacgtggcggtgcagcagaaggtaatgtctctgatggaggaaaaccccggtgtcacaatgaggctggtaacccgttcagagttgctcaggtacagtgaaatggctcgccagcagtcagagaagggagaaaaaggacttcgccttgaggacatcaaaaaagaggtcagcagccgtcagggcgatgttctcaactattttatggtcgcgaaagatatcggcgcgtctgatattcacggtaccacccggccaggactgacgcgcatcgagatgcgtgtgcacggtgaactggagaccgtttcggaactggctgaagaagacggaaaagcacaggcggccactatcatcctttccatgtgtgatgtgaccgaaccccagttctacgccggccgaaaacaggatggtcgtgtggctgcaaagtttctgcgaaaggtggggttatttggcgcccgttacagccacaccccgacagcagatggccttcactttgtgatgcgcgtgatcccggatgatggtgatgtggttcccacgctcgaaaaactcggttttctgccgaaacaaatccgcctgataaagcgcactttgcgcctgccagaagggatgattattttgtccggcccgaccggagccgggaaatccaccaccctgcgtgcctgcagcgacctctatctgaagcgtacccggtataaaaagcgcctactgacggttgaagatccgccggagggacgcatcgttggggcaatacagactcctattatctgtgacaaagccgatgaggcggaagtcaggctggcctggcagcgggtgctgacctcagcgttacgtctcgatccggatgccattttacctggtgaacttcgtgaccttatctccattctggccgggatttttgccgcccagaccggccatctggtgctgagtaccctgcattcaaactcggccttttccatccctgagcgaatgataacgatgggtgcaaatgccggactggtggcagatgcccagttgttggtcgggcttatcagccagcgtctggttcaggtgctgtgtcccgagtgccgtattccctggtcggttaaaaaagaacatctcaccaccgaagaacgtgaatatctggaaaagtactgttcagtggagggggtttgtcagcccgaaaatcttcatttcagaaatgaggaggggtgcccgacctgccggaaggcggtcattatcggtggcaaacaggtggcaacagtcggtaagggggtggccggacgcagtgtggtggcggaggtggttcgcacggattctacgcttttcaggctgttattacagcagggtaaggaagctgcaaaagcttactggatccgtgaaatgggggggattacccgtcgcattcatctgcttcacaaactgaatgacgggctggttgacccactggatgccgatttgattattcctcttgatgaggatgaggtgatgcaggtggtaagtgatcaggttgcatcgtcgagtgacattgatacgtcgctgattgaacgccttgccatggtaattgcagccagcgtcagagaggggatgaagcagggtgttgaggaagccattaaagaaggcgttgctgccgggatggctgcgctgaaggaggttgcatga

SEQ ID NO: 376734 - DNA, 1086 bp, Salmonella enterica
atgagtcctttataccgtcttcgccgggcgctggcgcgacgtttttttacgtccggataccgtctgcgtttttaccgcatgctgtcgttgcagatgagaaatggcgtgaagttgttagaggcgctggagcaaatcagcaatatgtataccgattttgggcagcggactcatggtttcggttttctggtggacgactgccgggcggcactcactgacaacagcggggataactcccttgagcatgctcttgcaaactgggttccggcggaggaggcggcgctcatcagcgcgggtatgttcagtggtcggttacctgaggcgctcgcagaggcggaaatcctgattgactgccggcggcgtatccgacaggcgatcatgaggatggccgtttatcccctaggttgcattgcgatgctcggtggcacgctgggtgttattcagacgcagcttattccaacgctggccgggatgtcagatccgcagacatggaccggagtgctgggaagccttaacggcctgctgattttttttactgagcatggcgtggtgatgggggccgggctggcactgttggtcgcatggaccaggtggtccctgtcgaactggatacgtccggaccgtctgcgtcgtcttgcggacagacatgtaccctgggcggtttacagtgatattcagggcgcgatttttctcatcaatatgggggctctgctgtgcgctggggtcagaaccctgactgcgctgcaggttatccaccgctttgcttctccctggctcgttgtacgtctgaacgcagtgatggaggaagtggaggagggggcctcttttggtatggcgctgcgtgaatgtggttatgccttcccctcaaaagaagccgtgaactatctctctatggtcagtggggacggggccgctcagatgattgcgcgctttgggcaggaatggctcgaggaaactgtgaagcgagttaaccgacggggaatagccgtgatgctgttctcaatggtgatgttatttgcgcttattggcgttgtggtcgtggcggtgattgaggcgacttcgatgaccgagagtatggggcagtactga

SEQ ID NO: 376735 - DNA, 594 bp, Salmonella enterica
atgaatgaggtatcaacattaaatccatgcaacaggcctgaccggggaatgtcggcagatgccggtgccactgcactgtttattctggtgatcattggggtgatagccgcggcggtctggtcgatgtggggtaaaaaggatgcgggtacggagctgacaaactatcagaccctggccacgaacaccattggcatgatgaaaggcgttgacggttatgcttttaccagtggcgctaaaatgaccgacacgttaattcaggccggggcggcaaaagggatgacggtcagtggagaccctgcttccggttccgcgacactgtggaactcatggggtggccagattgtggtggcgccggatacagcggggggaaccggatttaataatgggttcaccattaccacaaacaaagttccgcaatctgcctgcgtatccatttcaacaggtatgagccgttcaggcggcacgtccggtattaaaataaacggcaataaccacaccgatgcgaaagtaacggcagaaatcgcgagcagtgaatgcactgcagataatggccggaccggtaccaatacgctggtttttaactacaacggctga

SEQ ID NO: 376736 - DNA, 477 bp, Salmonella enterica
atgtgtggatatttttcccgactggctttattcatgacgctgtgcagtgtgccgctgtgggtacaggcattctgctttgatgccgctgcggcgaaataccatgtctccccgctgctgattaagtccatggccattggtgaaagtaatcttgatccgcatgcaacaaatgataaccgggacaaaaaaacggggaaaatcaaaagcacggattatggactgatgatggtgaattctacgcatattccccgtcttgtctcgatgggggtcatcagggacaaaaatgatttgctgaacaaaccctgcctgaatgtgcagattggaacgtggatccttgcgaaacattttcaggtctgtggggtgagctggaactgcctgggctcttataacgcaggtttccggcctgaccggcatgaaacacgggagcgttatgcaaaccggatctggaaaatttatcagcggcaaacgggggctcaatga

SEQ ID NO: 376737 - DNA, 663 bp, Salmonella enterica
atgacagtctctcttatcggtaccatttttcctcctgtgtatgccatacctgcttttatcgggtgcgccattttcggggcggtacttttaaggccggtacgtctttatctggccgcagcggaggtggatatctcacgccattgtgccgtcgtggtgggtatctggctgtttgcggtaacgggtttgctgatacttatggcacctcaggtctggatgacacgtatcggaatgctgtttatgtgcagttttttgctgcaactgggagtgatggatgcgaccagcggttggttgccccgaccgtttaccgcagcctgtttatgtagcggattattgttctgtctcgcttttcatcgggagccggaacttcgctttatggaaactgcggcgatggcggtggtgatggggtctatttgtcacggtgttaaccgacggcgacctcagcttggcgtgggagatgtctggctggtttgtgccctggtaggctggatgggggtaacggatgcactgcaggcggcgttttttgggctgagtggttttatgttgtggcagtggatagtccatcgggactttctgcgttgtggggttctgggcccctggctgtgtgcagggtgcataccagtcattgtggataggttgtaccagcctgagtggatactgagatga

SEQ ID NO: 376738 - DNA, 1308 bp, Salmonella enterica
atgaaaaaacaaaaacatgatggcggctttgtggcgatgagcgtgggagccgggttactcattgttctggtgatggcctcgttggctgccagatatatgggagattatctgaaatcccgtgagtggcaggttgtggccatgcaaaccaatcgtttcactcaggcagtctcatcctatgttggaaagttttatccgacggtgctggcatcagcgaccacaactacacctgcagtggtaacaactcaaatgctgaagaatacaggtttgctgccggcgagctttagtgagaccaacagttatggccagcagtatcaggcgatgatagtccggaatcagcaaaatcaggagttgcttcagggcatggtggtcagccgcggtggtcatgctatgccttttacagcgctaagccagatctcgaaagacattaccgccggcttcggaggatacgttgaagacgggcaaacggcggtgggagcgatgcgcagctggcgaattccgctgtcctcctacgggaccagcaccggaagaggtcatctggccgtcatgttgagcacggatgacctgtcaggggcgcgtgaagacggggacaggctgtatcgttttcaggtcaatggtcgtccggatttgaacaagatgcacacagctattgatatgggaggaaataacctgaatagcgtcggcactgttacggccagtaatgtggctggccagaatgggaattttggcgtaagtctggtcagtaatggtccgatcactgcggggggagatattcgaagcacagggggatggattgtaacccgcagtggtaaaggttggatggatgagacccatggtggtggtttgtatatgtcagataacgactggttacggatcctgaataacaaggggttttataccggtggtgaaattcgcggtgggaagattcgctcggatggggacgtatcggcaggcggtattttaacgctggataagattaatgttgccagcactgcttgtcctgtaaatggtgcaataagtcgtgatacagcaggtgccacactttcgtgccaatccggtatttggagttcttatcggctgaactttaatattcagacatttaacgtcggtaaaaatgtaagaaatcagtatattggagtgcatgcctactgcgcatggacatatctcaatggttcacctctgggcgggtttcaggagatacactcgaacggttccaacggctggtatatctctaactacagatgggggaactacgaatccggaggtactatttcggtaacctgtttgaacttacctggcgccggattatga

SEQ ID NO: 376739 - DNA, 252 bp, Salmonella enterica
atgtgtccaactgcaataagcatgaatgcctatgtactgcgcattcacattctgccctatgtcgtagagctgtgtagtgaatctgttttgacccgacacccagataccggattggcacgtatgtccttacgaggattgagggtattagagtttttcgttacggtggagaaaaacctcaattcttctcgcaaaggtatctgcaatgtctcgcccacaacgcataaaaaaaatgtctctgtcgaaagcccttga

SEQ ID NO: 376740 - DNA, 1152 bp, Salmonella enterica
atgtctcgcccacaacgcataaaaaaaatgtctctgtcgaaagcccttgataaatactacgccactgtgtctgtgcataaacgggggcatcagcaggaattctatcgtgttagggtcattcagcgacatcctttggcagagaagatgatggatgaaatcacgacagtggatattgcgtcttaccgcgatgatcggttgtctcaggtgaatacgcgtaccggccggtgtatttcaggaaacacagtccggctcgaactcgctttactgtcatcactgtataatctggccagcgtagagtggggaacatgcagaactaaccccgttgaaatggttcgtaagccaaaaatatcaggaggacgagatcgacgtttaacatcacaagaggaacggcgcttatcccgctacttccaggaacagaatccagcgcttcacgccatatttcacctcgccattgaaacagcaatgagacaaggagagatcttgtcacttcgatgggaacatatcgacctgcagcatggcgttgcccatttgccaatgacaaaaaacggcagttcgcgagatgttcccttatcccgcaaagcgcgtcatttgctacagggaatgacggtcgcacttagcggtaatgtttttcactattcatcatctggttttaaaagcgcctggagggtggctctgcagcgcctgaatatcgtcgatctccattttcacgatctgcgtcatgaagcaattagccgactgtttgaactgggaacactcaacgttatggaagtggcggctatttccggccaccgttccctgaatatgctcaaacgttatacccatctcagagcataccagcttgtcagtaaacttgacgctcgccgaagacaaacacaaaagattgctccctattttgtcccttatcctgcctgtattgaatccgttaatgaaggatcagatggctgttgtggttttcgtgttcacctacccgattttgacaatctttcagtgtcagcggcatcgagggagagtgcgctggaggctgcaggtgttctgttgctacgaacgctggctaaagcggctcagcggggagagcgtgtgcctcgccccggggatttgccggaaggcaagcatgagcgggtaatgatccatcctcttttgagtgctgcctga

SEQ ID NO: 376741 - DNA, 468 bp, Salmonella enterica
gtggagtacgctttgtttgtgatgttctgtctggcgctgtattgcccgtgttttacgttaattgcgctgttcacgccctggaaagggtttgctgtattcagtgtaacgtatcgtcgccgtcaatactgggctgtacatcttgccttgcttgatcgggtgggggcgatgaaccgccgccaggcccgacgctatcaccaggcatttgttcaggcactggagacagccctcgtggcgcggccggtgcgtcccgtttttttccgttcacatcttatgcggccagctcaggtagcgcttacctgtcaggttctttcacacaggacgggatatcgctgtcggatcgctcccattacgcttccgcgctgggaacgtgttgctatttttgcgcaaatgctgctacaggagtggcggcttattcaattgccttctgaggaggggataatggtagtcattcatcggttggcggaataa

SEQ ID NO: 376742 - DNA, 876 bp, Salmonella enterica
atgaatgcaacttataacgcgctaattgcattaatgcgatctggtgaaataccacttgaaacgggggcatcagtatctgcacccagtgcacagttttcagtaagaatacggccggaaactcgggtatttctggacaggtgcgcagagcatctgggtatatcccgggccgctatgtttggtatgtgtattgatggcattgtagcagaggcgagagagagtatagcggacagaacgtccacgctttatgagcgattctgtctgctgttggatgctcatggattgaatgttatcgaacaggcacagctactggcttcctggggaataagggccagtgtattagcgagtcaggataggacgcttgatctcctgaacaaacctttgctgcagcaattgtcgacatggtttgatgtggatgttaactggctgctgggaaactcttcctatccggtagatatggctgacggccagcgcgactgggctgtgcagaccccctctctgttatgccgtctgcagtcaattcagtcagtggatccggttgagttaattttcttctggcagcaggggcgtaaacctcaaagtgtggggttgtgtctgcgctatcgcccccttatttcgggtgagccgatcgggctcctcagggtatatcaggcactagactggcaggatgagcaggttcagcaggcatataatcaattgcggcgtataaccagtatcactcttggcgggtatacaaaagataaagtagaaaaatatcctcctatccgattacgttatttcactttctcagcgcgacaaatgcaggcattggataatggggcggttattcctgctatgatattcgataaacctaagggtgaatttccaagcatttcctga

SEQ ID NO: 376743 - DNA, 915 bp, Salmonella enterica
atgacgacaacgacggcatcttctgtcgatattccgtcagataatgatttacctttatccgctcacctcactgaacctgccgaaccggctattgatacgtctgatatcactgttacaccagatacttcagcacagtcagctgcataccgactggggggaaagaggagtcgtctgtggcatccttcttcagaccgccgttccctcatatttaaagtgtcatccgttctggtgtactgcttattactgggtgctgtcttattcctctggctgacagtacgtcagcagcagatacagcttaccacccttgatgcggcgttccgcagcggacagctgcagacacttcccgatcgtatgcaggccatagaagacaggcagcaacaattcgttccgaaactgcagggagaaaaatggcagctcaggctgagtgagcaggagctgcggctcaccgcgtttgagcagcaactttcttcgctggttacagaggttaaagagactcaggcggcgactgccagggctgttgcccgagaggatgaaacgggcatgaagctcgacgctgttcataaagcgctgactgagcagacttcgcgtatagataccctcgcgtcttggaaagacacgtggagcaaacgcactgtggcgactgccacgaaggcgaccccgtctcccggaggtggacagtctgccgcaaaaaagtcgtcaaaaccacgggtcattaagccgcctttcacattggtgagtattgaacgcaggggagggcaggcttacgccgttattctgccggcggggaacagtggctggacacagctgcgcatggtaagcccaggagagagtctgtcaggctgggtgctggtgaacatcagcggtaaccaggctgagtttcaggttaacgggcaggtacaacgtttaacgctctga

SEQ ID NO: 376744 - DNA, 741 bp, Salmonella enterica
atgaaaccgatgaaatcaacgttaaattgcctccggcagtggactgcgtcagtcatgctggctgttatcgtaagtctgcctgctcttgcatcagtgagtacgggtcgcagtgtaagcgcaccccagcagcaaaatacgactacagaaggaaggacgcaaacgtcaggaacggcatggggactcagcgaaaaagaatggcagcagtatcaacaggtacttaaaggtcccagagcatttcagtcacctggcattgacccgttgatggcactggggctggaggccggttcggcaagcgaacgccggcgttttgctgaaatgtgggtgaaggaagagtatgcccggggtgaaaaggagctggcctttcagcgggaagtggatgctgcctggaaacgcctttatcccaatactctctccgtaaacatgggcaatgccagcggtattgcccatgatacacagggaagactggcgttatttgtgaagcgcaactgtgtaccgtgcgatgccagagtaagtgcggttctggcagataaccgtccggttgatatttacctggtcgacagtggcggcagtgatgacaccattcgccagtgggcgcttgcacatcatattccggtcgataaagttcgtagccggcagataaccctcaaccacgataacggcaactggctgaagtatggtcagggatatatgccggttatgcttcagcagggagtctccggatggcaaatcgcagcattctga

SEQ ID NO: 376745 - DNA, 687 bp, Salmonella enterica
atggcaaatcgcagcattctgacagcagccagatacagcgtccctgttctgatccttcttatcgggggtgttggtagtgcagctgcggtagaaaagggacgcggtctgcaaacaattcccccgggttaccaccttgtggcaactgaagtcggcgtacccgctgaagccctgtattcagtttctcttgcagaaacatcccgaaaactaccacatggagagcgaccgtggccgtggacactcaatgttgccgggaaagggtatcggtataactcccgccaggaagcgtatgacgcaatgttgtcgttcatgcgtcgctatccgttaaagcggattgatgttgggatcgcgcaggttaacctgggctggaatggaacttatttcagcagttactacgaagcgctggatccatataccaaccttcgggttgccgcccgtattcttaaatcctgttatgacaacaatccgggaagctggatacaggccgcggggtgttatcaccatcctgcaggtggaaaaccagcacgaatctataagtccatcgtgaaacgcaagctggcaacactggatttaaacgcgccagtaacgtactccgaacttcagatcgcacagatatcgccatcacagcgccatttctcacactacaaccgtgaattgcaatgggttgaacccagggagtcccgtcagtga

SEQ ID NO: 376746 - DNA, 501 bp, Salmonella enterica
atggtcagtattttgctgacaacatcatcgatggcagcactcaatgtgattgctgatcttggcggagaaccaacagcgccgctttttgatgccatcaataataagaacaacgagttcactccgccgaggtcactgaacgccacgggcgcgtctgtaaccgcagcccctgcggatgtaagtgatatgctgcccgtaaccacaccggaaatgcgtgcagggaaagtggaagcccgtgagttaaatctgaacgggatgacaccggtctttcttgttggggatgattcgctttcacgcgagtggttgacgatgcggcgtgatgagcttaagcgacttcatgctacaggtctggtggtgaatgtcagcgataaggacgcgttgtcggaacttcagcaaatcatacctgatgtcattctgctaccggcatcggcaagcgaaatagcgcgtcgtttgcatctcaaccactacccggtgttgattaccgccaccggtctggcccagtag

SEQ ID NO: 376747 - DNA, 570 bp, Salmonella enterica
atgatcactgccattcttcttttacttttctgtcttctcattcctgccatatggcgtaagaaaatgccgtccgcacgcgaccgccggcaccggcgctaccgacagaacgcggagcgtgtgctgtgccgtctgacagcgcttgattcagacggggcccgtctaaagtatcttcgaaaaattaacccgtatgtgtttgaagagctgctgttgttggcgtttgagaggcagggactcctggttgtgagaaaccagacctacagtagcgatggcggacttgacgggcaggtttttattgacggaaagcgctggttaattcaggcaaaacgctacagacggactatttctccgcagcatatacgtgagttcggagagctgattacccgggagcaatgttgtggattttttattcatacagggcggacgggtagtaagagcgttaattacctgcagtgctggcgaacaatacaactgatcagcgggcagcgactacttgatttgctggcggggcgccagtgctggtaccaccggccagtaacaaagtcagttgccgggcagccggttgttacataa

SEQ ID NO: 376748 - DNA, 2091 bp, Salmonella enterica
atgagtaaccgttatgtcatggaggcgttattgaggccagcagtagaactctattcagctgcggctggcggggctgccacttttgttctggttgtcgcaccatggtcgatggcgttagcaccacaggtcagttatgtgactgcagccggttttgccattttcacaacaatcagaactcgtcagggtttgcgcatcttgcgctatcgacgcaatatccgtcggttaccccggtatcagatgtccagtgaatccataccggtaagccgacattttttgtttctggggaaaggctttatgtgggagcaaaagcatacccaacgtttgcttgagacgaaacggccggaagttgctccctttctgaaaccgtcagttttttactccctggctcgtcagtttgaacgacggtatgagtatacattccctgggttatgtagcctgacaagacgagattcattttttaatccggtacgcccattaccccctgttggtggtaattcggcgatacatggtgtcgagatggaggaagataatgttttgatgagtcttaccgagcgcgttggacatcttcttgtattaggaacgacacgagttggtaagacccgtctggcagaactgttaattacgcaggatattcgcagaggaaatgtcactatcgtttttgaccccaaaggtgatgctgatctgttgaaacgaatgtgggctgagacgaggcgagctgggcgtagcgacgagttttatatctttcatcttggctggccagatatcagtgcccgttataatgcagtcggccgttttggacgcgtatctgaagtggcctcacgtgttgccgggcagcttgggggagaaggaaataacgctgcgtttaaagagtttgcatggcgctttgtcaatatcatcgctcgtgctcttgtcgttcttggtttgcgacctgattattcgcttatcctccggtacgtaacaaatattgcagagctttatgagacctatgccgagaagttactgactcaacaggctccggagttgtggctgatggttcaaaaccagatggggatcctgactgaggatgatttaccacgtacgatgcagggacaggttaatgctattcgggttatggccattgaagtggcattatccagtgagcagggcaaaaaaatatacgatcccgtactggatgggttgcgtagcgctgtacgttatgatcgaacatatttcgataaaatagtcgcttcattgttacctcttctggaaaaactgaccacaggcaaaactgcggcactattatctcctgactacagtgatatgaatgatccgcgcccattaatagactggcaggaaattatacggaaaggcggtgttgtttacgtcggtcttgatgctctttcagattctgaagttgcttctgcggtaggtaacagtatgtttgccgatctggtttcaacagctggatatatttataagttcggactgtctgatgatatgcccgaagggagtagccagcggttacccatcagtcttcactgtgatgaattcaatgagttaatgggagaagaattcattccgatgataaataaaggcggtggggcaggtattgaagttacagcctatacccagacctggtcagatattgaggccaaaattggtaatgcagctaaagctgcccaggtcacaggcaatttcaataatatgattatgcttcgtgtgagagagaaaacgacagctgagttgctgacaacgcaattacctgaagttgaaatttatacaaaaacactggtttccggtgtgacagatatatccaatccggatcaggggagtgatttcacatccaacgttcaggacagagtaagcagtacacgtgttcctcttttatctcctgcagaagtaatgaatttacctaaagggcaggcttttgcactgctggaaggagggcgattatggaagattcgtatgccgctgccggcatccgttgatgatgaaatgatgccggtaaacctgcagagtattgtcactacaatgcgtaaacactaccgaacgggagacacctggtggtcagggagtgtgctccccggagataatctggtggatgcgctatga

SEQ ID NO: 376749 - DNA, 759 bp, Salmonella enterica
atgagtacagaaaaaaacagctctcaaagttctccaccaccgcgcaagccaccaggtttgctgacccttgttttgtggatctggccagtcaggcttttggcttttctgctggtatcctggatggctggtgtttttattgaatgggcaggaatgttttttttctggtcagatcagggagctttgcattcccagtccgttatgaataaagaacttggctatttatcagcagattttactcaaagccttattttttcttcaccatcagtaactacgatgggctggatttcgtcagcttaccaatgggcatttgtggacagtggattactcacctggattcagaaagaacaaagggagacattaagcagttctgactctgttgttttttttctgggacaagtgcaggcctggttattatcagtgttaagcgattatctgcttgcgctggtttatgtcaccgtcgtttttgccgtcagggtattaattcttgttttatccatcccgttatttgttctggttatcatcgtcgctgttatagacgggttgtgtcgtcgtgacctgagacgttacggggcgggttatgagtcgagttttctgtatcaccatgccaaacggtttgttaaaccggctgtttatctcccttgcttactttacttgtcatggcctgcgtcgatttatccaaatctgttacttctgcccggggcattgttactgggactggcggttactgtagtgacatctacattcaaaaaatatctgtga

SEQ ID NO: 376750 - DNA, 255 bp, Salmonella enterica
atggtcagtgcagctgaaaaggatgaactggccctcgctctcaggcagctggaccaggtccagtctgcgcttgaacgcgcgaaaattgtagcggtacaggacaattctgacgggcgtttcttcttcgactatgagcgggcaacacgtgatttgaaaaccatgaagcaggggattgaaacttatctggagccttcccgggcacagccaagagacaaaggttctcttgttggacaatacaggaaggagcagccctga

SEQ ID NO: 376751 - DNA, 240 bp, Salmonella enterica
atggctatgaattctgaacaggcaaacgcttttaaagcagggtcaggtatcgaccctacggtacttaataagtttgttctgggttttgttctgagcgttctttttttgtggtttgcctggtcggtattagttgtgtttcgtggatggcgggcaggaaaagtcactgagcaaaatgctctccatttttttatcagtacggccattttggttgtgttttcagtatggatgttcgccagctga

SEQ ID NO: 376752 - DNA, 363 bp, Salmonella enterica
atgctttcaaagagtaaacatgggttaagagtaccacttccctgtcttttgattctgctgttactggtggcgagcttctcctctcatgcaggattacctacggtcaatattcccggtgggggcggtgggggtgacatgatgcaaacgatcaagcttctgttttctgggtttctcgtcctgatggggctaatcatttgtgctgtcggattttatatggtttccggcgctattctggcgacattctcagaaatacgctccggtaaagcagaatggggtaaatttgttgcgattgtcgttgtcggtatagccattctcgttgtcattgtctggttgtgtactgaagccgcgaagattttgaattga

SEQ ID NO: 376753 - DNA, 375 bp, Salmonella enterica
atgaaaacaatcgagtttttaccggacaggctgaatgccgaaacggtagttttcagagggtttacaacaccagaactgggctatgcagcacttattggtgccgtgtcaggcttaattttgtctctgataatgatgcttgtaacggggatcggctggccaattattccaacctgtactcttatcactccactgatatttatttttatcggtggacgctttctggttcgttttaaacgtaataaacccaatttttacctctacctccggattcaaaaaatactgagccatattggtatcgggagcaaagttctggtccgtcatgatcgacgctggtcattacgcaggagtaagcctgtacgcaaggggggaatatga

SEQ ID NO: 376754 - DNA, 654 bp, Salmonella enterica
atgagccgatttcgccatgctctgaaggatcgcgatcagcatattttgaccctgagattagcgtgtggagttctgcttctcttattgattctggttattacaggatggatgcgggcgcccagtgacctgacaatacataacccgccagatttacgcagcgggagtacgcgtaaatggtgggaggtccctccgagtacggtctacagctttgccttttatatttttcagcaaattaatgcctggccgaaggacggagaaaaagactatccgatgaaaattgcccagttgagtccttatcttacgccatcatgccaggattttttgaataaggatgctgagctacggagtcaaaaaggtgagttgcttgatcgcgttcgcgtcgtttatgagatccccaaacgtggttacaaacctgaaagtgtcatcattgagagcgatgacagttgggaggtcagtctggatttggtagtcgatgaatactatcacacagaacctgtaaaacgggcactggccagataccccctgcatattgtccgctgggaaggtgatccggagcgcaatgcttttggtctggcgcttgattgctataaaggcgtcccacaacgacttgaagctgcagtggtccctgagccagagaaaaaggggatgttttaa

SEQ ID NO: 376755 - DNA, 900 bp, Salmonella enterica
atggcgatgtttaaagtccttaattttaagtgtaaatggtggccgataattctccttttatggttttcatcagcacaggctgtggagctgatgaaatgggaacggatccctctgcttattccactttctgttaaccatgagcgaattgtctttgtcgaccgcaacgttcgtgtaggttttccggcaatgctcaaaggtaaactgagggttcaaagcagcggtggtacggtttatttacaggccagcgaaccttttgaacagacccgacttcaactgcaggatgttgaatcgggcgagattatattactggatattgctgccaaaaatgacaataaggcgcttgagcctgttcgcctggtttattcgggagaagtgttatcggtgagcgaaaaaggaatggaaacgggttcttcgttgccagtcgcctctttggatacagaagataaaaatcagactgtcagaaaaacgccggtgtacagtgctccattgccagtggtgttgactcgttatgctgcacaaagtctgtatgcccctctacgcactgttgaagctgtacccggaattcatccggtaaatttacgccttccctcgagactcacaactttatatccgtctgagaatgtagttgtttcgccaataggggcatggggtattcaggaactgaatgttgttgcactgaaaatccggaatcgttcttcctccaaagtgatacttgatgcccggactttatcaggatcgtttgtcagtgcgactttccagcatcgttggcttggggcggctggtacgcctgaagatacaacaactctttatcttgtgatcagagggcgccctgagaatgcctttattgctgaacctgcagtattgccggcagtaaaaaaaggggaacagcatgcaaattaa

SEQ ID NO: 376756 - DNA, 1479 bp, Salmonella enterica
atgcaaattaaagccaatggcctgatgaaggttttacttccagtattgatcgtggtggtttgttttattggcgttaaagcctgtggtttaaaagatactactgaacctgaacccgctaaaaccactaatgcattgactgagttgagccaggatgatttgaaagcactgggtattgagggggatacgtcagcagacacgctacgtacacttattggagcgttgcgtgatgtccgggcccgccaggctgtgctggatgagcaaaataaggcactcatttctgaaaataataagctcaagggtgagaattcatcggtaggactccagatatcaaatgctgtaaatgccgcaaaacaggaaacgaacgaggctcttgaaaaacagaaaacgttcctactggagaagctcaatgacctgaccggaacactgaaatcccagggacaaaacactgacatggtgtcgacaggttcgtcttcaggaaccgatttcccggttggccttggactggatccagagaatgcatcctctgcaactcagggggaggtgatctggatatctcctcaggatgctaaaaagacagagggtcaaagccagagtgataatgataaattcacctttcccacctcttttctggatgataaccccgtcagtcgtcagcgagctgagtacgatcgcgttgttaaaaacaagcaggaactggacggaaacggtgcagagtccgatacacggcctgtttatacgttgcctgagaactcaaccctggtaggcagtaaggcgatgacggcattaattggtcgtataccaattaatgacaaagtcaccgatccttatccatttaaagtcctgatcggtaaggataacctaactgcaaacggtatcgaattgcccgatgttgagggggctattgtttccgggactgctacaggggatatggtgctttcgtgtgtcagaggaacgatacattcgatcacgtttgttttttccgatggacgtataagaacacttcccagacccgtagcaaacactcagggcaacaataatgacaacgccggagacaggggcagcattggctggatatcagataacaacggaattccctgtatcagtggtgagcgcaaatctaatgcttcaacttatctgccaacggttgcgttactggggatgggaagctccgcaggtgatgcgttaacacaaaatcaatataccactcagaacaatgtgaatggtggggtgacatcagccttaaccggcaatgcggggcaggcggtactggggcagacgctgggagggggatttaaagaagttaccgactgggttaaacaacgttacggacagacgtttgatgcggtgtatgtcccacctggtgcaaatgtcgctattcatattactcgtcaactggccgttgattatgaagaccatggtcgtaaggttcgatatgacttcagcttgcccggaacaggaggccattatggtcttgactga

SEQ ID NO: 376757 - DNA, 306 bp, Salmonella enterica
atgatggagctctggcaggggaatgctccgacatctcacgccgttgtcaaagggcgggagactctcaggcggagtctttcgtctcaggaaacactggcttcagggcgtattgatgaaagctacagccgtactcaggagaatgagctgagccagattttcccccggttacctaatccggatatggtgatgtacatatttccgcacttggctaatggaaatacgcctgttcctggctacagcactgtctttcctttttatgctcaaacccagtatgcgcttcctggtgaacggacggaggcactgtga

SEQ ID NO: 376758 - DNA, 417 bp, Salmonella enterica
atggtcagtttttctttgtttaacaaaaacaggctgaagtcatcttctccccgggagcctgacgagttaccggaaagtgactttgctgttcatggccgtgacccactgaaacgcccgggcatgatgagtcacgctgatgaatcccgtttatacgaaacccgtccgtccattattgattttttgccctgggccgagtacctgagtcgcgagcaatgtctgctgcttgacgatggccagtctgtcggtgcggtatacagtatatcgccagtggcatcagaggggcgcacagctgcccgtctggaagaaataagggattcggttgaagatgcacttcaggacagccttgaagagtttgattctaacccatgggtagtacagttttttgtcaggatgaaactgacttcagtgcctatatga

SEQ ID NO: 376759 - DNA, 2424 bp, Salmonella enterica
atgaatcggttagccagttacatcaaaccgcatgctcagaggacggcatttacgaaggcctggctggctgaaacagaacagcatctgcgaaatatcacccggccggaaggtttgttcactgattcacttgtcaccggggttccctggcggggacaaaatcgttccgtcaggatggtggtatatcgatacctgccagcgaattacaaagatgattcgccggttgccgctctcaaccaggtttgtgagcgcctgacttcagccttatctgcagccggcgttctgagtgtccgacagaatggcgagcagatacatcgatggttgttacgtcacttcaatcctgagcccgactggatagacaaagatacgctttaccgggaggctcgttattatgatgatgcacctgattcattgcctcttggcaatgatttcactgagacgttgtggtttaaccctccacgttctgatacccgaaatggtgtgtggtggtttgataatgtggcgcatcgtgccgttcctgttgaaacattacgtcgccctccgggacccggtcatctgacgggggaggttaagcgtggcgacaatattaatactctgatggatttattgcctgagggcacaatggtatcgctcactattgtggcgcaggctcaggacacgctggaagccgggtttgacacgctgggtaaaaatgcaatagggcagaacacggaatccaggcggacccgtagtgatgtggagcaggtgaagagtttgctgggcatgcgtcacaaactttatcgtgcatcgataacttttttgatgcgtgcacctgatgtcagtgagctgaataaaaaaatacagcaacttaccgctacattgctgactgcggggctccagcccacgaaacctgaatacgaagtggcgcccctgaatgactatttgcgagcgcttcctatgtgttttaacccgcaactggataaaaaaaactggtatacccgcctgacctgggttcagcatctggctggattgcttcccgtgaccggtcgcagccagggaaccggacaccccgggtttagtttttttaaccgtggcggagaactgttgtcttttgatcccttaaatagtctggacagaacgcagaatgctcacctgttgctttttggtccgaccggggcgggtaaatcagccaccttatgtagtgcgttatcacagttaatggccgttcatcgtccacgcctctttattgccgaagccggcaacagttttggtttgctggcggagtatttccgggggctgggactgagcgtaaatgtactgagtatcaaacctggctgcggtatttctttaccgatgtttgctgatgctcattccttaatgcgagtagatccaaagaaaaacgtggtttctgaggaagctctacctgagctggagccagccaataccgacagcgcagaagatgaaagtgaagagcgtgacattcttggcgaaatggaaattgcagcccggatgatgatcaccggtggcgagaagcgggaggaggaacgtcttacccgggctgaccgcggtcttattcgtgaagctatcatgatggcggcggagaaaacatatcaggacggacatcagatgctggctgaggatttacaggctgccctgtggaatatctcacgtgataattccattggtgcaaatggcgagcctatgcggaatcagtcccgtcgcgatcgtgctgctgagatggcagaagccatggccatgttcactcagggatttgagggagagttattcaaccgtccgggaacaccatggccagaggctgatgtcacactgatcgatttaggtcatctggcacgtgaaggctatggtgcacaaatggcgctggcgatggtctctttaattaacacgattaacaatatcgccgaacgtgaccagggaacagcccgggatattgtggccgtatttgatgaagcccatatttccacgacgaatcctttgttgtcgccctatatgaccaaggttgtgaaaatgtggcgaaaactgggggcatggctgtggctggcgacacagaacctcgaggattttcctgatattgcgcagaaaatgctgaacatggctgaatggtggttgtgcctggttatgcctcccgatgaggtggagcagattgcccgtttcaaaaccctcagcgaggagcaaaaagttattttgcgatcagccagtaagctcaaaaactgttataccgagggcgtcgttttatcaaagcaggttgaggcactgttccgggttgtgcctcccagtctgtatctcgccctggggatgactgaaaaagaggaaaaagcggaacgtcagcggctgatgcgagagtatcagtgcagtgagcttgaggcagcgatccgggtggcccgcaggctggatgaggcacggggtttttgtccacaaaaagcggcctga

SEQ ID NO: 376760 - DNA, 387 bp, Salmonella enterica
atgagcctgttaaagcatgagcaatggttaattctcggtgaagatgaatcgcatcgtattccgcctgatgcgctgctgggtttgcctccgcagggtaaagcgtggatccgcaaggaacatgatgaggatatgagtcgtctgacttctcatattcagggagctcttggcaatacttatcgtggggtttgtcatccacagcgtatcgggcatcgtgcctgcctggcaatccatcttgagaatttacgcggaaaaaagctggatatattaattacggtaagcggaaagacagcattacctgcggaggaaagttacgttaatccccgatggtacatcgatgttgccgatgccgcagatgccctttatctggcgctgtggcttatcaggtag

SEQ ID NO: 376761 - DNA, 393 bp, Salmonella enterica
atgaaacgaatcctctcttcgctgatattaatcagctccttttctgcaagtgcgcaaatcgttgtttacaccgaccaggggcatcctccggtcggtgtaacaccggctatccgggttgtttatctcgatgccagcgaacgctggctgcagcaacaatttggagagctttcttctgatcctgaacaggctgtcagacaggctcattctctgctgaattctcctgactggaagagacggcaaaaagcgcttatcgaacattacaggggaatgattgaagcatggcagcttggtttactgaaatatccggcggtggtttttgacaaccgtgacgtggtttacgggactgttgatatatcccgggcagtggcgctgcgcaggggagagaatcaatga

SEQ ID NO: 376762 - DNA, 969 bp, Salmonella enterica
atgaaatctcttcgtctgaagcgagcgttactgtcagtcatgcttatcaccggcggcatggaggttcaggctgcgttgaacactgcctcgattgtggccagcagtatttctccgtcgtgtatcagctggagaatcagcggtatctgctactggctgatgtgtacccctttcggttgtacagtaaaaacctcgataaaagtgcatcactttattccggaagctgttgtttcgacttatcaggcgtctggtggaaatccgtggaccgaaatgtcattagtgagtcagacggccggaggggtagagaatgctgtaacgggggcgttatccgggcttgctgccggtggcggaaaccaggaacagaaattcccgggtacccgtaagagtaatgtgcgatttaaatatgcagatgccattggccatccttcaacatcgattattggcggccaaatccccggttactcatgcaacagcgccgccacaccactggtaccctattttcttagcacgcttgatacgcttgcctggcgtactggtgttcctgaatcggtttatcctgaggcactcattcctggcagacgcgaaatcggctccacatcggcacaaaatatatggggaaatctctatccccgaagcggctttgttactcagcaggatgactacaaatccggggcaatcgttgcgcagcgtgtagctgacattatcacccgaactaaccagatccacgtctataagcccctcaccggaaacccgtctgccggttactggcctcccgaacctgttaaagagaataccggcacgcaaaatcataaatggcagcagttatcaccaacgctctctatgtcatgcagcgtattcccggatacaggaaaaattgcggaaaacggtaattacgcctggacactctggcagccatatagctgctgtaaacgccgtgggcaaacatttctctatagcaccgacataaattaa

SEQ ID NO: 376763 - DNA, 1431 bp, Salmonella enterica
atgagatctcaatccattttatccgtctgtctcatgctgggtatcgtcagttcgggaccgttaagtgctgcattactggatgcccccacgttgagtggtgatggatatggaaagtcagtaaatggcgcggttagtgacaagctgttttacagcattggtggtggttcggtgatttccactcccgggacgatgtacggaatgaaacgtatcgggctggatgccggactgagcagtgatttgatgtgtggcaactttgatataaagactactgtcggaaaccagcttaatggcgtcacgaatggtttcaaagatttgatgggggatgtgatcaccggtgcgaccggggcggtctcaagtatgccggcgatgatccttcagcgagcaaatccgggtttgtatgaaatgatcaccaatggtgtacttcaggcaggtctggcttttgacaaatcgaaactgaattgtgaaagcatggccaacaagctggctgattacactttgggtgacaagagcagctggacagaatcagctgtgagggaagagtacaaggaggcggtcagtgccagtggcggggatgcgctgcgggcagaagaggccagaaccaaagcttcaggtaaggagggcgctacctgggtaggcgggaagaaagccggagggaaaggccagcctgccattcagccaacgcgtgatctggctaaagcaggatacaacatgatgaataacctgagcgttaccagcaacagcacggtatccgccggtagttgcaaggggtcagcatgccagaaatttaaaaactctgaagaagctgcagcagcggtcgtaaaagttctgggcgatcggagtattcgcacctgtaaagatgccacagaatgcggaagcggcgggattgataatgcccagggcacgacaattgccggtaccggttttgctcccatgcttgaggatacaaccaaagagaatctggaacagctggtaaagcttgtaaatggtactgaggctccgactcaggccaatctggataaaattaaaagtggcagccttaaggtaacgcgtggtgtcatcgatgccctgaaacgcgatcctgatgccggtgcgttggttcagagactggctggcgaactggccatgtccgacacgattgaaaccggtctggcgatgcgtcgcatgttaacgactggccagtctgaacccaatgcagctgatcagcctcaggcaatggctgaagccgatcgccgtattgaagctctcgatcgtgagcttaactctcttaagctggagatggaactgcgtcgggaagtggcaaaaaataccgcgctggttgtggttgcgcgcgaagaaaatcgttcggtcaccaatcctcaaaaagaatcgcagactaatgctgatacccggctgagtgagcttgaaacgcgtaaaccaggggacagccaatga

SEQ ID NO: 376764 - DNA, 333 bp, Salmonella enterica
atgacactgaggatcttaatcaaaacaacttcatttctgagatttattctgacgcttgtgttcatgctggttatgcttacgtgcctgtcccttgcactggctgatttagggtttcgttatcagtctgaaatagcccagttccggatctggatgaaggaaacctggttgttgtggcttctgtggcggctgatgctttacagcgtgactggttgggggatatggcgttgttatcactcccatggctcttctcaggctctgcgtcagagtcttctgcggattgctgtcgtttctgttggtttcgtcgcgatttgcgaatattcagtgttgaggtag

SEQ ID NO: 376765 - DNA, 1506 bp, Salmonella enterica
atgacgacatcgagctatcttgagtacatcctgacgattctgggctgggttgttaataacggtttgtgggatgttctgacaggcacgggactttttgcattaccactgggctttaaaatcattggtatctggatcaaaacacgggaagaaggggatgatgagggtaataaaggtatcctgtcggcccgacggatggaacatgctatttacggggcatttatcgttattatcgcctgctgtgtccccactcagacagtgtcactgacaacgctgacgtttgatacaacccgtgcgaaacagtgtggtttctggacaccggtcaagcccggggattcaggctacggtagtgtggtttcaacaatgagtggtatgactgcatctgcgccggtgtggtgggcatttatgcatatgatttccaaaggcgtcactcaggcggctgtggcaagtttaccctgccggccagacctgcggcaggtgcgttttgacgttcagcatacgcagatcaccaatcctgctctggctcaggaattgcaggattttaccagtgactgttatgcacaggcttttgcgttatggaaacggcaggatgcggggagaactacggatattgatgtactcagggatattgaatggctggggtcgaaaatatttttgaaggatttttacccgcagctgcattcgaagttgcccaggtcagcgttcccctggtcgcaaagccgcgatgacgggtacgcaaataccgggcagggggggtatccaacgtgtagcgagtggtggtctcagaacaagacaggcctgaaatcccgtgtgctggatacggtaaataccaccacgatgacacgcatggcggcagcatttaagggaatggtcagcaaagaggaatacacggaagcgctaattcgacgtctggtcagtccgacaagtctctctgtgtcacagaatggacgtacttatgcaggttatggcggtaatgccgattttacgttagataatgctgtaaatcgcatggcttcagtgctggggaccagtgtgggtgcccttggggcgttccccgcatttgatgccatgcgccaggcgttaccgatggttcaggcacttttattgatggccatgtatgtactaatccccctggtgctggtattcgggacgtatgaatataagacagtagtcactctcacttttgtgacgtttgggatgcattttcttacgttctggtgggagctggcgcgctggctggatagctggcttctggagatcatgtatggttcggacagccatagccgatggaatgtggccggttttcagaatagcgcagatgacctgatcatgaactttgttatggggacgatgttcctggtgttgccggcagtgtggatgggggcgctttcctgggctggggttagaattggcggcattgttgacactaacttaaataagggagtgcagccagctggacagcatggtggcaaagttggtgataaaattggctcgggaatagctaaataa

SEQ ID NO: 376766 - DNA, 390 bp, Salmonella enterica
atgaacgcacaagcacgcggtgcccgggccgcaaggctttataaaagggctaagtcaaagctgatttcactcgaccatttctgtgttcaaaaagccagagagcataagctgcccgcctggactggtcatctcccggtgacaaccctgacagggattctttttgctgcagtgatttttggctcactgttatttgtgagcttaggcttatttatatttgcacttattctggttacatcgtggcctggaaaaagaacaaactctgcggactcgtggagcgataactcttggggaagctcaatgagagatggaagcgagggatttggtctatacactggcccagaaaatagccatataccaacaagtaggatagataatgaggatgacctatga

SEQ ID NO: 376767 - DNA, 360 bp, Salmonella enterica
atgtgtagaagtatttacaggtttagtgtaatttcatctttaatatttcctcttgtggttttcaatgtctcagcctctccttgtttcagtgataattctgtgacaaaaggcacacaaatgatttcaaagttaccccgcgacaaggattgtaatgattcagattcaagttcacgtaaatcagtaagtgaaaaaatcatagagtccatcgccgagaaacagaagataaatcaagaaattatgaaaatagatcttgaaatagagttgttacgaacgaaaaaagggaacatgaccgcacaggattatgatagtaaaatgcgtgagctgacaaataaacattcggctttaaaaagaaaaatttaa

SEQ ID NO: 376768 - DNA, 1248 bp, Salmonella enterica
atgtcagataacgtcattatgcaacgtaatcaaatacagaagatcagaaccggggaggatgtgctgtctgcggttacaggccgtgtggagtggatatttgataccttttctcaggtttgtctgtctttttcaggtggaaaagactccaccgttctgtttcatatcgccgccacaatagcccgcaggaaacaccggcgtttctctgtcctttttattgactgggaagcccagtatcagtgcacgattgagcatgttcagaaaatgaaggatctctacagtgatgtgacggagacgtttttctgggtggctctcccgctgacgacggtaaatggtgtttcacagtttcagccagaatgggtctgctgggagcccgatgtggagtgggtgcgtcagccgccgacagatgccattactgatacgacgtattttcctttttaccgttacgccatgacatttgaagagtttgtcccggcattttcgacttggttcacgggcaatcagtgtggagtggccatactgactggcgttcgtgcaaatgagtcccttaacaggtttataggccttaccagccagcgaaagcttcgttatgccgatgacaaaccctggaccaccgcctctcctgaggggttttattacacgatgtgtcctctgtatgactggaaagcccgggacatctggatttaccatgcccgtacgggcgccatttacaacccgctgtatgacctgatgtacagagccggcgtccccctgcggaatatgcgggtctgtgaaccttttggccccgaacagcgccgcggtctgtggctttatcatgtactggagcctgagacctgggcgcgaatgtgtgcccgcgtctccggagcggccagcggggccatttatgctaatgaaagtggcgcttattttgccctgcgcaaacgcatctccagaccagcacatcatacctggcgcagctatgccatgtttcttcttgatgtcatgccacaaaaaacagccgagcattaccggaacaagatagcggtatacctgcgctggtatcagacgcacggttatccggaagatattccggatgaacaggagaatgacctgggcagcagggatattccctcctggcgtaggatatgcaagacactgattaaaaatgacttctggtgccggaccttatctttcagtcctaataagccccggcattacgaacgttacctggagcgtatgaaacaaaggaggaaggaatgggagatattgtaa

SEQ ID NO: 376769 - DNA, 642 bp, Salmonella enterica
atgggagatattgtaaccagggaacaggtggccagtctcattacccggtatttcagtcagcagctttcagatgacgaaaaagtggcagccctcaatcattttcgcctgacacttcatgagctcagcccctttgcccgggagcctgtggacctggtgctgtgggtgaaagccagcgaagtggtggccaacgattacaaccccaatgttatggctgccggagagaaaaaattgctgcagcactcactgcaggaggacggctttacccagcccgtcgttgtatctgaagagaaagggcagtacctggtcgtggatggttttcaccggcagttgctgggcagacgcgagtcaggagcaggaaaacgcctgaaaggctggttgcccgtcacctgtatcaatcccgaacgaaaggggaaggctgaacgaattgcctcgacgatcaggcataaccgcgcccgagggaagcatcagatagcgtcgatgtcagatattgtcagagaccttgcccgtctcggatgggcagatgaacgtattggcaaggagctgggaatggacagggatgaagttcttcgtctgaagcagataagtggactgacagaattatttgaagaagaggacttcagtccggcctggacggttcgctaa

SEQ ID NO: 376770 - DNA, 543 bp, Salmonella enterica
atgaaagtaacatggactgtcactcctgtggggtatcagcacatcgcaaaacgctgtccgtcatgcaatgtaaaaagagacttcacgccgtcaggtgcattcaggattaattcacaaaagaaaatactggacgtatggagtatctataaatgtactcactgcgattacacctggaatatagcgctgtattcccgccttcctgtaagcaaaataaatcaggaacttcatcaccggctgatgacaaacgatgaatccacaatcaggcattttgcctatgacactgctgttctgaagcaaaacaatgcaaaactatcaggtcaacttgatttccgtattcaggagcgctgtctgaccagtataacgaggcaatatcagatatgtgtccgaatcaggttaacccgctctttccaggtaagcctgctgtccataatgaaaatacaacttatgctgagttcggcagatatcaggaggcgaatagactccgggcagataactggcgttacggcaaaaatgcttaaatcgagaaagttaaggcagacttaa

SEQ ID NO: 376771 - DNA, 921 bp, Salmonella enterica
atggcagggaaaacagctcgttcaaaagtggagaaattccgtcgcgattttgtgaccttagcccgggatgccggcagggcatacgcgacggctgcagacagcatgcgtatcgcgaaatactttctgaactaccttcgtgataacggtattaagctacgtcataccgacagtattaaaacacgtcatgtcaccggatatctccagttcagaaaatcacaggggatttccgtgcggacaattcagaatgagcgggctgctattcgtggcgttttgaataaggcgggacgttataagctggcagacccgaataatccgctcctgagtaataaggctcttggattagaaaaaagtagcaggtcgggaacaaaattaccgttaagcccggaagaatttcaaaaggcatttaaggaggttgagaaaagcaaccggggggttgcagcaacaatgttactttcttatacgctgggtttaagaactaaagaggcagtggagtcctgtaaatccgtgatgacatggaaacgtgctcttgagtcaggggaacattcagttcgtgtaatttttggtacgaaaggaggaagaggacgaaatacgctgattgttgataaggacgctttaaggcatgcaataaattatgctgaaaaagtaatgaaggaaaataacggtaaattgattgatcgtcctgatattcgtaaggcgattgatacctaccgttatcatgtcagacgtgcgggtctgacaggtgaaaaagcacctcacagtatgcgttatcatttttcacaggaagctcgggaatattatgagaagaatggtttttctggtaaggaaatatatgctcaggtgtcaatggatttaggtcatggagacggaagagggagatatgtaaaacaggtttatttcagagatggtactgaagatgagtaa

SEQ ID NO: 376772 - DNA, 1185 bp, Salmonella enterica
atgaacagaaaagttctggcactgcttgtcccggcgttattagtggcaggcgcagcaaatgcggctgaaatttataataaaaatggcaacaaactcgacctgtacggcaaagttgatggtctgcgttacttctctgacaatgcaggcgacgatggcgatcagtcctacgcccgtattggctttaaaggcgaaacgcagatcaacgatatgctgaccggctatggtcagtgggaatacaacattaaggtgaacaccaccgaaggcgaaggtgcaaactcctggactcgtctgggctttgccggtctgaaattcggcgagtacggctctttcgattatggccgtaactatggtgttatctacgacattgaagcctggaccgatgcgctgccggaattcggcggtgatacttatacccagaccgatgtctatatgctgggcagaaccaacggcgttgccacctaccgtaataccgacttcttcggtctggtggaaggcctgaacttcgcgttgcagtaccagggtaataatgaaaacggcggtgctggtgctggtgaaggtacaggtaacggcggcaaccgcaaactggcccgtgaaaacggcgacggtttcggtatgtctacctcctacgactttgacttcgggttaagcctgggtgcggcctactcttcctctgaccgttcggacaatcaggttgctcgtggttatggcgacggcatgaatgagcgcaacaactatgccggcggtgaaaccgctgaagcctggaccataggtgccaaatatgacgcctacaatgtttacctggcggccatgtacgctgaaacccgcaacatgacctattatggcggcggcaatggcgaaggtaatggcagtattgctaacaaaacccagaactttgaagtggttgcgcagtaccagttcgatttcggtctgcgtccgtccatcgcctacttgcagtctaagggcaaagatttaggcggtcaggaagtccatcgtggcaactggcgttacaccgacaaagatctggttaaatatgttgacgtcggtatgacttactacttcaacaaaaatatgtccacctacgttgattataaaatcaacctgctggacgaagatgatgacttctacgcaaacaacggtattgcaaccgatgatatcgtaggtgttggtctggtctaccagttctaa

SEQ ID NO: 376773 - DNA, 1431 bp, Salmonella enterica
atgcaggaaaatatttcagtaacacacgcccggaacctcatcgccgacgacgccggaagcgagatccaggcgatgctgagtcaattgctggaaatctacgatgttaaaacgctggtggcgcaccttaacggcctgggcgaacagcactggagcccggccatcttcaagcgcgtaatgatgaacgcggcatggcatcgtttgagcgacaatgaactcagctgtcttaaaacagagttgccgacgccgccagcgcatcatccacattacgcctttcgttttatcgatctcttcgcgggcatcggcggcattcgccgcggatttgaagcgataggcggacagtgcgtgtttaccagcgaatggaataagcacgcggtacggacatataaagcgaactatttttgcgatccgctgcaacatcgctttaatgaagatatccgcgatatcacattgagccaccgggaaggggtcagcgatgatgaggcggcggaacacattcgccagcatattccgcaacatgatgtcctgctggcgggctttccctgtcagccattttctctggcgggcgtttccaagaaaaatgcgctgggccgcgcccacggctttgcctgcgagactcaggggacgttattttttgatgtcgtaagaattatcgacgcccgccgccccgcgctgtttgtgctggaaaacgtgaaaaaccttaaaagtcacgaccagggcaacaccttccgcattattatgcaaacgctcgatgaactgggatatgacgtggcggatgccgctgacaatggcccggacgatccgaaaattatcgacgggcagcactttcttcctcagcatcgggaacgtattgtgttggtgggattccgtcgcgatttaaacctgaaaaccgattttacgttacgcaatatcgcccgttgttatccaccgcgccgtccgacgctggcagaactgctggagcccgtcgtcgaagccaaatatatcctgacgccggtgctgtggaaatatttatatcgctacgcgaaaaagcaccaggcgcggggaaacggttttggctatggcatggtttatcctgacaatccggaaagtgtggcgcgcacgttatctgctcgctactacaaagatggcgccgaaattctgatcgatcgtggttgggatatggcgaaaggcgaagtgaatttcgacgatgctggcaaccaacaacatcgtccccgccgactcacgccgagagagtgcgcgcgtttaatgggatttgaggcgccgcaaacgtaccagttcaggatacctgtctcggatacgcaggcctatcgccagtttggcaactccgtggtggtgccggtatttgccgcggtagcaaagctgctggaacccaaaattcaccaggcggtgacgctgcgtcagagagagacggcagatggcggacgttcacgataa

SEQ ID NO: 376774 - DNA, 921 bp, Salmonella enterica
atgcgtttccggcagttattacctctttttggcgcgctttttgccttgtacatcatttgggggtctacctattttgttatccgcataggcgttgaaagctggccgccgctaatgatggcaggcgtacgttttctctcggcggggatgttgctcatggcgtttttgctgttgcgcggcgaaaaacttccgccgctgcgccagaccatcaacgccgcgctgattggcctactgctgctggcggtgggtaacggtctggtgacggtggcggagcatcaaaacgtgccatcgggcattgctgccgtcgtggtcgccactgtcccgctatttacgctgtgctttagctacttttttggtattaaaacgcgcaaattagaatgggtggggattgccattggacttgccgggattattctgctgaacagcggcggtaatttaagcggcaatccgtggggcgcgattttgatcctgataggttcgatgagctgggcatttggttccgtttacggctcgcgcatcgccctgcctgtgggcatgatggcgggcgcgattgaaatgctggcggcgggcgtggtattgctttgcgcggcgtttctttccggcgaaaagctcgccacgctgcctggtttatcggggtttatggccgtcggctacctggcgttattcggttctattatcgccattaatgcctatatgtacctgattcgcaacgtcagtccggcgctggcgaccagctacgcctatgtgaatccggttgtcgccgtgttgcttggcactggcctaggcggtgagaggttatcgcccgttgaatgggccgcgctgggcgtgattgtgtttgccgtagtgctagtgactctgggtaagtacctgtttcccgccagggcggtgatcacaccgtgtaaaacggaagattcacgccagtag

SEQ ID NO: 376775 - DNA, 255 bp, Salmonella enterica
ttggcaggaagtagcttactgacattactcgacgatatcgccacgctgctggacgatatttcggtaatgggcaaattggccgcgaaaaaaaccgcaggcgtactgggggacgacctgtcgctcaatgcgcagcaggtgaccggcgttcgcgctaatcgcgagctgccagtggtatggagcgtggcgaaaggatcattaatcaacaaggttattctggtgccgttggcgctgttgataagcgcatttatcccgtga

SEQ ID NO: 376776 - DNA, 1704 bp, Salmonella enterica
gtgccgcacgaaacactgttagacaatcaaggctggtttaaaaagctggcgcggcgttttggtcccggtcatgtcgtcaacacctgttttctgatcgtgatgctgttctcgacgctacttacctggcgggaagttatgatactgaaagacgcgtatgtcgccagtcagcgcaatcatctggggagcgtcgcgaatgtccttgaccgccaactgcaattcaacatggacaggttgatctttttacgcaacggtatgcatgaagcgctggtggcgccgctggctttttccgcattgcaaagcgcggtgacgcagtttgagcaacgacgcgtcagacatttctggcaactggagttggataaacggcggacattgccgttatatggcgtttccgatcaatttgtcgcccggacgacgcttctttcgcgggagagtcgtgacctggcaaatgaattaaccgccacgctggagttagggtatctggcgcgctcatccgccatgctgacgctggagacgatgtatgtttctcgctcagggttttacctctcaactctccctacggcgtacggtagcgatattgtttcccgttactatcagtacgtgacccagccctggtttatcgagcaaagccaacggcgtaatccacagcgcggcgtgcggtggtttacctccgcacagccctatgttgctgacgagcagaaaaaagtgacagccagtctaccgctggatcacgataattactggtatggcgtactggcaatggatattcccgtcgcgtcattacagcagtttctgcgcgatgcggccgaaaaggatattgaaggggaatatcagctatacgataaccatctccgtttgttgacggactccgcgccggaacaacaaaccgagaatacgttaaatgaccgtgagcgcgccttactggcgcgtgaaatagaaaaagataccctgggcgggctgcgtttaggaacgcattatgtaagctgggagcggctggatcattttgatggcgtcctgctgcgcgtgcatacattacgtgaaggtatacaagggaattttggcagtattagtatcgcgctgacgctgttatgggggctttttacggcgatgctgttgatctcctggggcgttattcgacatatggtcaaaaatatgtttgttctgcaaaattcgccgcaatggcaggcatggcacgatccgctgacccggctatataaccgtggcgcgctgtttgaaaaagcgtccaggctggcaaagcgctatcgggaagcccgccagccattttctgtgatacagctggatttagattattttaaaagcgttaacgatcgctttggccatcaggcaggcgatcgcgtgttgtcccatgccgctgggctcattggcagcaccattcgagcgcacgacatcgccggacgggtagggggcgaagagttttgtatcgtgctgcccggcgcgacgaaagcgcaggcgctgcagattgccgaacgcatacgccagcgcattaatgacaaagagattctggtgacgaaaagcacgacgcttcgtatcagcgcgtcaatggggatcagtagcgcggaggaatacggcgactatgattttgagcagttgcagtcgctggccgacaaacggctttattacgccaaacagtccggacgtaaccgtatttgcgccagcgacgcgactcaggagcgggaaaagaaatag

SEQ ID NO: 376777 - DNA, 693 bp, Salmonella enterica
atgatgggtattgaccgtatcgacacgatgttgtctcagttcggctatggcaaaccgacgggtatcgaccttagtgaagagtatgacgggctgcttcccagccgcgcatggaaacagcgggtccataaaaaagcctggtatcagggcgataccatctctgtcggcatcggccagggctactggattgccacccccatccagatggtaaaagcgatggtggcgctcatcaacaacagtaaggtgattgcccctcacctgttactcaatgaagagagcggcaaaacggtggttccgtatcgtccttcaggaacaccggcacagatagccgatccggcgtcgccatactggggactggtgcgtcaggcgatgtacggcatggcgaatgcacccaacggaacgggctataagttctttcacaccgcgccctacggcattgcggccaaaagcggcacgtcgcaggtgtttagcctgaaagaaaatcagacctacaatgcgaaaatgatccccattcgcctgcgcgatcatgtgttttataccgcttttgcaccgtataaaaaccctaaggtcgctattgccttgattctggaaaacggcggaagcgacggcgttaccgccgcgcccatcatgcgaaaaatccttgaccacctgtttgatccacaggctgataccacacagtcgggtcaggcgccatag

SEQ ID NO: 376778 - DNA, 126 bp, Salmonella enterica
atggacgaaaagaaactcaaattccttgcggctgaactggctaaaggccttaaaaccgaagccgacctcaatccgttttcccgtatgctgacgaaattaaccgtcgaaacggcgctcaatgcgtag

SEQ ID NO: 376779 - DNA, 234 bp, Salmonella enterica
gtggtttatgtttccgatatgtttttaaggagggagaatattgaacgcgaacaggtgatagtgagtagctcgctgcgccaggggataacactcccctggtgcagtcagttatattttattgcgatgataacaaagcatttactcgctactgatgaaattcgctatttacaacagagcacgtttactaagcaagaaaatctgcacacgctatctttttatatctatcttggataa

SEQ ID NO: 376780 - DNA, 2049 bp, Salmonella enterica
atgaacactttttttaggcttaccgcgttagctggcctgcttgcattagcaggccagtccttcgccgtggaagatattacgcgtgccgatcaaattcccgtactaaaggaagagacgcaacatgcgacggtgagcgagcgcgtaacgtcgcgttttacccgctcccactatcgccagttcgatctggatgaggcattttcggcaaagatttttgatcgctatctgaatcttctcgactatagccacaacgttttgttggcgagcgatgtcgagcagtttgcgaaaaagaaaaccgtgttgggcgatgagctgcgcacgggtaagctggatgttttttacgatctttataacctggcgcaaaagcgccggtttgaacgttaccagtacgcgctaaaagtgctggaacggccaatggatttcaccggaaacgatacgtttaacctggaccgcagtaaagcgccctggccgaaagatgaggctgagctaaatgcgctgtgggatggtaaagtgaaattcgatgagctcagtctgaaactcaccggcaagagcgacaaagaaattcgcgaaacgctgacgcgtcgctacaaattcgctattcgccgcctggcgcagaccaacagtgaagatgtgttctcgctggcgatgaccgcttttgcgcgtgaaatcgacccgcatacgaattatctttctccccgcaataccgagcagtttaataccgaaatgagcctgtctctggaaggtatcggcgcggtgctgcaaatggatgacgattacactgtcattaactcattggtcgccggtggcccggcagcgaagagcaagtcgattagcgtcggcgatcgtatcgtcggcgtagggcaggccggaaaaccgatggtcgacgtcattggctggcgtcttgacgatgtggtggcgctgatcaaagggccgaaaggcagcaaggtccgactggaaatactgccggctggcaaagggacgaaaacgcgtattatcacgctgacgcgtgaacggattcgtcttgaagatcgcgcggttaaaatgtcggtgaaaaccatcggcaaggaaaaagttggcgtactggatattccaggcttctatgttggcttgaccgatgatgtcaaagttcagcttcagaagctggaaaaacagaatgttaacagcatcgttatcaatctgcgttcaaacggcggtggggcgctgacggaagccgtttcgctttccggcctgtttatcccttctggtccgatagttcaggtgcgcgacaataacggtaaagtgcgtgaggatagcgacaccgacggcgtggtctactacaaaggcccgctggtggtgctggtcgatcgtttcagtgcttcggcatcggaaatcttcgctgccgcgatgcaggattatggtcgcgcgctgattgtcggtgagccgaccttcggtaaagggacggtacagcaatatcgttcgctaaaccgaatttacgatcagatgctccgcccggaatggcctgcgctgggttcggtgcagtacaccattcagaagttttaccgtgtcaacggcggtagtacgcagcgtaaaggggtcacgccggatatcatcatgccgactggcaatgaagagacggaaaccggagaaaaatttgaagataacgccttgccgtgggatagcattgatgcggcgaaatacgtgaaatcggacgatttggccccgtttggcccggaattattgaaagagcacaacgcgcgtatcgccaaagatcctgagtttcagtacatcatgaaggatatcgcacgtttcaatgccatgaaggataagcgcaacatcgtctctctgaattatgcgcagcgtgagaaagagaacaatgaagaagacgctctgcgtctggcgcgtattaacgatcggtttaaacgtgagggtaaaccgttgttgaagaaactggacgatctgccaaaggattaccaggagccggacccgtaccttgatgaaacggtgaagattgctctggacctggcgcatcttgaaaaagaaaaaccagcggagcaagcggcaaccgataagtaa

SEQ ID NO: 376781 - DNA, 429 bp, Salmonella enterica
atggcggttctggatggcgcaatcgctaatgtcgcgctgccaaccattgcgactgatttacatgcctcccctgccagctctatctggattgtcaatgcgtaccaaatcgccattgtcgtctcactactttccctgtcttttttaggcgacatgtttggttatcaccggatctataaatgtggtttagtggtatttctgctttcatcattgttttgcgcgctttcagactcgctgcagatgctgacgctggcgcgcatcgcgcaggaatttggcggcgcggcgctaatgagcgtaaacacggcgctgattcgtcttatctacccccagcgtcatctgggacgaggtatgggaattaactcttttatcgtcgccgtctcttccgccgcgggtccgacgatcgccgcggcgattttgtccatctcatcatag

SEQ ID NO: 376782 - DNA, 792 bp, Salmonella enterica
atggcaaacgcagatctggataagcagcctgattctgtatcttctgtgctgaaagttttcggcattctgcaggcgctgggtgaagagcgtgaaatagggattaccgagctatcgcagcgcgtcatgatgtcgaaaagcaccgtttatcgctttttgcaaaccatgaaaacgctgggctacgtggctcaggagggggagtctgaaaaatactctctgacgctaaagctgtttgagctgggcgcgcgagctttgcaaaatgttgatctcatccgcagtgcggacattcagatgcgcgaactgtctcgtctgacaaaagaaactatccatcttggcgcgctggatgaagacagcattgtctatatccataaaattgactctatgtacaatctgcggatgtactcacgtattgggcgtcgtaatccgctgtacagtacggccatcggtaaagtgcttctggcctggcgcgaccgtgatgaggttaagcagattctcgacggcgtagagtataagcaaagcacgggacgcacgattaccagcactgaagcgttgctgccgctgttggatgaagtgcgtgcgcaaggctacggtgaagataacgaagaacaggaagaagggttacgttgtatcggcgtaccggtatttgaccgttttggcgtagtcatcgcagggttaagcatttcgttcccgacgctgcgtttttcagaagaacgcctacaggaatatgtggctatgttacacgtcgccgcgcgtaaaatttctgaacaaatgggttacaacgattatcccttctaa

SEQ ID NO: 376783 - DNA, 276 bp, Salmonella enterica
atgatacccccagagattcgccgttctgttctactacagaaagccataaaactggcgctggcagggacgctgctgacgtttgcatcgttttcggcgactgccgcagacccgtcttccgacactgaaactccgcagccgccggatattttgcttggcccgctctttaatgatgtccagaatgcaaaactcttccccgatcagaaaacctttgctgacgccatacctaatagcgatccgctcatgattcttgcggattatcgtatgcagcggaactag

SEQ ID NO: 376784 - DNA, 1170 bp, Salmonella enterica
gtggatactctgcgccacccaaaacgcgctctgatcgtcgatattccggtacaaatggatgatggcactattcgtcatttcgaaggatatcgcgtgcagcacaacctctcccgaggtccgggtaaaggcggtgttcgctaccatcctgacgttgatctcaatgaagtgatggccctgtcagcatggatgaccatcaaatgtgccgcgctgaatctgccgtacggcggcgccaaaggcggcatccgcgtcgatccgttctcgctgtcggaaggtgaactggagcgtttgacccgccgctataccagcgagatcggcattatcatcgggccgcagaaagatattcctgcgccggatgtcggcaccaacggtaaagtgatggcctggatgatggatacgtattccatgaatcatggcacgacggtcactggcgtcgtcaccggtaagcctatccatcttggcggttcgctgggtcgtgaaaaggcgacggggcgcggcgttttcgtcagcgggctggaagccgcgcgtcgggcgaatatcgccgttgaaggcgctcgcgttgcggttcagggttttggtaacgtcggcagcgaagccgcgcgtctgtttgcaggcgctggcgcccgtgtcgtggcgattcaggatcataccgcgacgctgtttaacgccaccggtattgacatgaaggcgctcacggcatggcagacagaacacaaacagatagccggtttcccgggcgcggaaactatcgccagcgatgcgttctggcgtctggagatggatattctgatcccggcggcgcttgaaggccagataactcgtcagcgcgcggaagccctgacgtgtaagctggtgctggaaggggctaacggcccgacctatccggatgctgatgatgttctggccagccgtggtatccttgtggtgcctgacgtggtctgtaacgcaggcggcgtaaccgtcagctacttcgaatgggtacaagatatggccagcttcttctggagcgaagaagagatcaacgcgcgcatggacaaaatcatgaccgacgcgatcgtccatgtctgggagaaagcggctgagaaatcctgttctctgcgcaccgcagcctatattgtcgcctgtgagcgcattctgctggcccgtaaagatcgcggtatctatccaggttaa

SEQ ID NO: 376785 - DNA, 1137 bp, Salmonella enterica
atgttggattatgaaacgttgcggttcatttggtggctgctgatcggcgtcatcctagtggcatttatggtaactgacgggtttgatatgggtgtcggttgcctgctcccgctgatagcgcgcaacgatgacgaacgccgggtattgatcaatagcgtcggcgcccactgggaaggaaaccaggtatggttgattctcgcgggcggggcattattcgccgcctggccacgggtctatgccgccgcgttttccggtttttatgtggcgatgatcctggtgctgtgtgccctcttccttcgcccgctggcctttgattatcggggtaaaatcgccaatgcccgctggcgcgcgctgtgggataccggtctggttatcggcagcctggtgccccccgttgtattcggcatcgcgttcggcaacctgtttttaggcgtgccgtttgccttcacgccgcagcttcatgttgactattttggcaccttctggcagttactctcgccctttgccctactgtgtggattattgagtctgtcgttggtgattatgcaaggaggcgtctggttacagttgaaaacggagggcgttattcgtcaacgggctctgtcggccacccgccacagcgcgctgctgatcgtgatctgcttcctgctggccggttactggctgtgggccggcgttgatggctttgtcttactcacgcaggatgccaacggcccttccaatccgctcttaaaaggcgtggcgatactccctggcgcatggatgaaccactttatacgctcgccgctactgctcatcatcccgttgctcggtatgatcctgccgattctggctttctatgcctgccttcgcggtcagactattcgtggatttctgttcgcttccctgacccaggcctgcgtcatctttaccgccggcataacgctatttccttttgtgatgccgtcgagtgttagtcctctctccagcctgacggtgtgggacagcacctccagccagatgacgctcgaaatcatgctggtgattgtgctgatttttctgccaatcgtactgctctatacgctgtggagctattacaaaatgttggggcgtatcaacctggagaccctccgccgcaacgatcatgaactttattag

SEQ ID NO: 376786 - DNA, 849 bp, Salmonella enterica
atgagcaacgccttttttcatctgctggggccaggcacgcagcctgatgacgccagtttctcgatgaatcccctaccgctcacctgtcaggtcaatggcgacccaagtatggcggcgctggaacgctgcgctcacagcccggcggtgatggcattgttgaccgatctgcgaggtcagcttgcccggcgcatcccggaagtcggcgacgtgctgggatgggagttatctcccctgaatgccgatgatctctcattcctcaatacgctattgggcgaaggcgaagtctcggtacgcattcagcatccggacgggagtgaaagcgagatccaggagaccatcttctgcggcctgtggcgggtacgccatctgcataaccgacgtctgctgacggatcgtctggaagcgggtagcgcgcccctgacattgtggcaagcggcgactgccgatacgctgcctgacgactctctgctgcctccgcctgtcgctggcctgatgaatggactgccgctggcccatgagttattggcgcacgtacgcgatccggcgttgcaacctcacagcatcaatttgacccaactgccgctcagcgaggccgatcgtctttttctggcgcgtttatgcggacacgggaacatccagattcgcatctccgggtatggcgaaagccaaatcaacgccacagcattgcgccatctctggcatgtgcgctgtctggacgcccttaaagggccgttgctcgatagctatgagatttgtcctttgccggagctggtactggcggccccggaagatctggccgattcgcgccagcgcctggatgaagtctgccgatggctggagacgcgctag

SEQ ID NO: 376787 - DNA, 501 bp, Salmonella enterica
atgaataacgaggagaccttttatcaagccatgcgtcgtaagggagtgacccgacgcagctttctcaaattctgtagccttgccgccacatcgctgggactgggcgccggaatgacgccaaagatcgcctgggcgctggagaataaaccgcggattccggtggtctggattcatggactggaatgcacctgctgtaccgaatcctttatccgttcctcgcacccgctagccaaagatgtgatcctctcgctgatttccctcgattatgacgacaccctgatggccgccgccggcgcacaggccgaagaagtctttgacgatattaccactcgctacgccgggaaatacattctggcggtggaaggcaatccgccgttaggagagcaaggaatgttctgtatcagcggcggccgcccgtttattgaaaaactgaagaaagccgccgcgggcgccagcgctattatcgcctggggaaactgcgcctcctggggttgcgtctag

SEQ ID NO: 376788 - DNA, 1341 bp, Salmonella enterica
atgccgcagcccaggaactttgacgaccttaaattctcctccatccatcgcagaattatgctgtggggaagcggcggcccgttccttgatggctacgtgctggtgatcattggcgtggcgctggaacaactgacgccgctattgcaccttgatgctgaatggattggcgcgctcggcgcggctacgcttgccggactgtttatcggcacctcgttgtttggctatatttgcgataaagtcgggcggcgtaaaatgttcctgcttgatattatcgctatcggcgttatctccgtggcgaccatgtttgtttccacgccgcttgaattgctggtgatgcgcgttttaattggcattgttatcggcgcggattaccctatcgccacttccatgattacggagttttccaacacccgccagcgtgcgttctccatcggttttatcgccgcgatgtggtacgtcggcgcgacctgcgccaacctggtgggttactggctgtatgacatggaaggaggctggcgctggatgcttggcagcgcctttatcccgtgcttaatcattttgattggccgctttgacctgccggaatcgccacgctggctattgcgaaaaggacgggtaaaagagtgcgaacaaatgatgatcaaactgttcggcgaaccggtctgctttgacgatgagccgccgcaggagacccgcttcctgcagctgtttaaccgccgtcatttcccgtttgtactgttcgttgcggctatctggagctgtcaggtgatcccgatgttcgctatctatacctttgggccgcagatcgtcgggttactcggctgggaacaggggcgcaacgcggcgctcggcaatgtggtgattagcctcttttttatgctgggctgtataccggcgatgttctggctaaacagtattggccgtcgccctctgcttattggcagcttcgccatgatgactatcgcgctggcgctgctggggctggtgtcaaatctgggtatcatactggtcgtggtggcgtttgcggtatacgccttcttttccggcggaccgggcatactgcaatggctttatcctaatgaactcttccctacggatattcgcgcttcggccgtgggggtcatcatgtcattaagccgtatcggaaccattgtctccacctgggcattaccgatttttattactcgttacggtattaataacgtcatgctgattggcgcgttgatttcgttagtcgggcttggcgtatcggtgatgtttgccccggaaactcgcggcttgacgctaacacagaccggaaacatgactttgcgcggaacgccatcggataaccctcgttaa

SEQ ID NO: 376789 - DNA, 225 bp, Salmonella enterica
atgagtaataaaaaaaatctgtccgcagaagagacggatcttacgcgtaggaaactgttaaccagcgccggtattcttgccgccggcggtatgctatccggcgcggtaaaggctgatgaaaaatgcgccgtcaaggcgaaaccgacgtgggataaaccgtttactggcgaaatcccggaaaaattgccagaaggatataatattctgttagtcgtgaccgactag

SEQ ID NO: 376790 - DNA, 312 bp, Salmonella enterica
atgattaacgatggccgttataagtttgcacgctatttctcgctaagggagcataatacgccggaaacctgggaggatcttattaagtacaacgatcttgaactttacgatcttaaaaatgatcctgatgagaaccataaccttgctgctgataaacagaaatatcaggatctcattcttacgatgaatgaaaaactgaataaaattatcaaagacgaaattggcgtggatgacggcagttttatgccggatgcggcccgtgagccatgggatcttactattgagcaatttaaccgcatggcgaaagattaa

SEQ ID NO: 376791 - DNA, 1863 bp, Salmonella enterica
atggatagccatactctactgcaggcgctgatctatcttggttcagcggcgttgattgtgccgattgcggtacgtttgggcttaggatcagtgctggggtatctgattgcgggttgcattatcggcccctgggggctacggctggtgacggacgccgaatctattctgcattttgcggaaatcggcgtcgtgctgatgttgtttgttattgggcttgaactggacccgcaacggttatggaagctgcgcgcctcggtatttggcggcggcgcgttacagatggtggtctgcggcggactgattggtctgttctgtatgtttcttggcctgcgttggcaggtggcggaactgattggcatgacgctggcgctttcgtccacggctatcgccatgcaggcaatgaatgagcgtaacctgaccgtttcacaggtagggcgtagcgcatttgcagtgctcttgttccaggatatcgcggcgatcccgctggtggcgatgattcctctgctggccgccagcggcgcatccaccacgcttggcgcgtttgcgctatcggcgttgaaagtcgcaggcgcgttggcgctggtggtgttgctgggacgctacgttacgcgcccggcgctgcgctttgtcgcgcgttctggtttgcgggaggtgttcagcgccgtggcgctatttctggtgtttggtttcggcctgttgctggaagaggttgggctgtcaatggcgatgggcgcgttcctggcgggcgttctgctggcgagttcggaatatcgtcatgcgctggaaagcgatattgaaccctttaaggggttgctgctggggttgttctttattggcgtcggcatgtcgattgatttcggcacgctggtggagaatccgctgcgcattctgctgttgttggccggttttctggcaatcaaaatcgtcatgctgtggctggtcgcgaggaccctgggcgtaccggcaaaacagcgtcgctggtttgccgtcttattaggccagggaagtgagtttgcgtttgtggtttttggcgcggcgcaaatggcggatgtacttgagccggaatgggcaaaagcgctgacgctggcggtcgcgctgtcgatggcggccacgccgatttttctggtgctgctgacgcgcatggaaaagaccgcaacgggtgaagcgcgcgaggcggatgaaatcgacgaagagcagccgcgggtcattgtggccgggtttgggcgatttgggcagatagccgggcgtttactgctgtcgagcggggtgaagatggtggtgctcgatcacgaccccgatcatatcgaaacgctgcgtaaattcggcatgaaggttttttatggcgacgcgacgcgtatggatttgctggaatctgccggagcggcgaaggcggaggtattgattaacgccattgacgatccgcaaaccaatttgcaactgagtgaactggtgaagacgcatttcccgcatctgcagattatcgcccgcgcccgtgatgtcgatcattacattcgcctgcgccaggctggtgtggcgatgcccgaacgtgaaaccttcgaaggcgcgctcaaaagcgggcgacaggctttggaggcgctggggctggggcgttatgaagcccgcgagcgcgcggatctgttctgtcattttaatacccggatggtggaagagatggcgaaaggggaaaacgatccgttatctcgcgccgccgcctataaacgtaccagcgcgatgttgagcgaaattattaccgaggaccgggagcatctgtcgttgattcagcgccacggctggcagggaacggctgagggcaaacattccgggaaggccgctgatgaacccgaggtcaaaccgtcaatctaa

SEQ ID NO: 376792 - DNA, 348 bp, Salmonella enterica
atgctaatcctgaaagcctacaaattcagactggaaccaacgcctgaacagtcgcagcgtttgcggcagttatgtggttgcgcccgttttgtctggaatttaggtcttgcggagacaaagcgcatccttggttcaggcgaaaagttaccttcggctttcgagttgaacaggatgcttacagtgtggaaaaaaatgccgggacacatctttttacaggatgcttataccgacaatctgcaacaaaagttgaaagacctgcatactgcatggaaacgttgctttgataaaaagctcgcagcccggtatggaaacgaaaaaatgagggcagagactcaatccgttttgtga

SEQ ID NO: 376793 - DNA, 1176 bp, Salmonella enterica
atgcttttaaaaaacacaacatggtttgccgcctttttcctgatgatggctatcatgtccaactgttatgccataaatactaccctggccgttggcgactacgcctccagtgaacatgatggcccaagcggggattcggtattcactgataacagccacaattttgggcagaccatcgcgattcataaggaaacggcgctgcgccagattaccgtttttaactggtccggcatccagtacgttatggagatgttctgtaacggcagcggcaaccacacctaccttcaactgacccataattatatctctgctggcaaaagctataatggacatccgctgtataaaacctcaattcccggtttttatttcaccattgagatgaccttccttcagccagcagagaatatgacctcaagcaccttctggtttgataagacctcaacgccgatcaccagcgagttcacggaatttccgtcagcctgctccagaacaaatgtttatagcaaccttggcaaattaatgtatggcctgaaaatctatgcctatgtcgactctgacttcgcgccgacggaagcccagcttcaaagctttacgctgtctaaaaacggcgactccgatttctacattgataacccgggcagcggattatcaaactataaaatgaagtttaacctcgccgccacaggacttaaggccgtctggccaacctgctcggccagcaccattagcggcaccaatgtttcgggatcaacggttaagctgggtagcttttatccaaagcagattatggaagggctgtcgccgaccaagttccagatcaatctctcctcctgccagtacatcaataatattgaagttaaattggccagtaataatgtcgggacgaaaaacacctcgctactaaccaacaattcaaccagcaacacgaaagccagcggcattggcgttttaattgaaggtttgaaaagtagttcgagcgcccagatggtactcaaacctaacgactcaagctcaatttataaagataccaccaataacaccggagacggcagcccggtaggaagcgcgacaaaatcgttgtatttccaggcaaccttaaagcccgatggtgacaatccaacaatcaatccaggtgatttcaaagccaccgctcaattttcaatcacctatccgtaa

SEQ ID NO: 376794 - DNA, 597 bp, Salmonella enterica
atggtgataccaatgagacgtttgcgcgaacccacgctcgccacgttattttcagggctggcaacagccctgtttagcgcgacgctgtacgccgataccaatgtgaatttcaccgccagcgtgcagaaggacacctgccagataaagatagatggcaatggaacggtaaacttcgccaccatagcgcccgcctattttgccgatggcattaccgcggaaaccgattatgagggggggaaagagttcaccattaagcttatttcttgcccgatcagtgatggtaaaataaccaatgtcacctttaatttcgcaccactaaacgggcagttctcacctgagaatcaacaagtttttcctaatgacatcgctaccgatgctggtggcgtagacaatgtcggcgtggtgattttcaccaccgattcaccacgcaccaacgtgcttaatacggatggttcatcgcgggcgacttttgctgccagcacctacagcgacaccgtctggaccttttactccagaatgcaaaaaatacgcagtgccgaaaaagtgacgaccggtgaacttagcagccgtgtactggtgaatgtctcctatgaataa

SEQ ID NO: 376795 - DNA, 609 bp, Salmonella enterica
atgaaaaagcaaatattgcgcgtcgtgatttttagctcgctgattgccacgggagctggcatatcaacgatgacatatgccgatggaaccaacagtctggacctgaccgtgaacgccaatatcactgcgggtacgtgttctgcatccgtggttgaaggtgataccattaccgatactatcgcttttggcaacgtttacatttctgaagtatatgcaaaaagtaaaataaaacttttcaagttacggttcagtgattgtgtcggtctcaaagataaaaaagctaagttcagactagccccaaataatgtagcatgcccggggagcagcggcactgatgggcaattcgcaaatgcctcgacttcaacaacaaaggcagcaatggtcgccatggaagtatggacgacagaaacccctggaggcactggcgcggtaaaacttcactgctggtcgaaaccagaacaaaccgtggatttatctggtgcaagtgtaacaacgcctgttgattttcctttaagcgctatgatggtcgctcaaagcggcggtacgcttcaaaatatgacagcgggagatttctactcgcccaccaccttcaccatcacttaccagtaa

SEQ ID NO: 376796 - DNA, 2607 bp, Salmonella enterica
atgccgaagaaaacgatgctcgcagtttgctgtgcgctattttatagccagagcagtatttccgctgaaagcgttgaatacgacagttcctttttaatggggagtagcgcctccacaatcgatatcagcaaatactccgacggcaacccaacgcctgtcggaacgtatagcgtgaaagtttttgtcaacgaaaaccccgtatcaagcctgtccataccctttatcgatatcggcaaggtcagtgcagaagcctgcctgacacaaaaaaatctggcgcagttgcatatcaaacagccagaaatcaatgcgaccaatcaaattctgaaaaaaggggaggaagaagatcaagattgtctgaaccttcccgtcgccatcgcgcattcagaggtcaattttgatatgggcgaacagcgtctggatattaccgtacctcaggcgtggctcattgaaggttatgacggctatgttgagccttcgctgtgggaagatggtattccggcagcgcttctgtcctactcggctaacggctatcacagcaccaatggcagcgccgataatgacagtatgtatgcggcgtttaacaccggtattaacctcggcgcatggcgttttcgcgccaacggcaactataactggacgaaagactcaggaagctcctttgactatcagaatcgctacttgcagcgcgatctgccttcaatgcgctctcaacttgttgtcggtgaaacctataccacgggcgaaacatttgactccgtaagcattcgcggggctcgtctgtatagcgacaaccgaatgctaccttcgcagcttgccaactatgcgccgattattcgcggcgtagcaaacagtaacgccaaggtcagcataacccagggcggctacaaaatttatgagtccacggtaccgccaggcccctttgaaatcagcgacatcagtccttccggctacggtagcgacctcatcgtcaccgttgaggaggccgacggcagtaaacgcacctttagccagccattctcctcggttatgcagatgcagcgcccgggcgtcggacgttgggatttcagcgccggtgaagtgaatgacgatgagcttcatgacaagccctatatggcgcaaggttcatattactacggccttaataactttttgaccctctatacaggtgttcagggaacagataataactatcttgccgggttgctgggtgtcggcctcaacacccctcttggcgcatttgcacttgatgtcactcagtctcgtacagagatccctgaggataaaacctataagggccagagctaccgactgacgtggaacaagctgattgaaccgacggcaacctcctttaacgtagcggcatatcgttattcaacgcaggactacctgggcctgaatgatgcgctacagctgattgatgacgcgaaacataaagacgcggacgatcgcaacaccatgcttaactattcgcgcatgaaaaaccaggtcacggtcagcataaaccaaccgttgaggtttaaggaagtcgactacggttcctttttcctctcaggctcctggaccgactactgggctaccaatgaaagccgtaccgactatagcctcggttacggaagaggtttttcgtggggcagcctcagtatcaacctccagagatcctgggatgaagatggcgaaaaagatgattcgctctatatcaacttcaacgttccgctggagaatctgctgggcggcggtcgccgtaagtcgggtttcagctcactgacggcgcaaatgcgcactgattttgacggcgggtaccagttgagcatgaacagcaacggcagcagtgaagaccacacgctgaactacagcgttaacaccggctacaccatgcagaaaaatgaaaagaacatcaccgatgtcagcggctacgccagctatcagtccccctggggagatgttactgcttcagcctctgccaataatgacagcagccgacaatattcgctcgccacaaccggagactttgtcctgcatggcggtggagtgacgttcactaacgataacttcggtaatagcgatgccatcgtgctggtaaaagcccctggcgcgaaaggcgcgcgcatcaatggcggcaacagcaccatcgatcgctggggctacggcgcgacgaactcgctttccgcctacagagaaaaccaggtcaatattgatatcgacacgctggaaaacgatgtcgaactaaagagcaccagtacaaccctgataccgcgtgatggcgcggtagtcttagccagtttcgaaactgaccagggacgctcggtcattctcaacatgtcccgtaatgacggaaaagccctaccatttggcgcagaagtctacgagaacgatgtgcagatcgacaacatgggccagggcggtcaggcttttgttcgcggcatcagcgatgcaggcgaactctcagtacgctggtttgaagaaaaccagccagcaacttgtttagcaacctttgcgttgccggcaacgcaacaaacggtagggtccagccagaccttactgttagaccacataacctgtcgtgttaataaccttaaatcaaatggaatagacaatgaaaaggaataa

SEQ ID NO: 376797 - DNA, 735 bp, Salmonella enterica
atgttgtatgtaaaaaaaagcctgaccgccatcgtattagccagtgctgtatttagtacctttagctatgcggatattattatctcgggcaccagaatcgtttatgacgaaaataaaaaagacgtcagtatacgactggaaaataagggtacccgcccattattagtccaaaactggatagacctgggtaacgataacgacgatcccgggagtattaaagcgcctttcgtttctacccccccggtttcacgcgttgagcctaaacgtgggcaatcggtaaaaattatgtatacccaggccagcgcgctgccgaaagaccgggaaagcgtcttctggtttaacgtactggaagtaccgccaaaagcggataccagcaaagaagagaataaaagcttactgcaactggcttttcgtacccgtatcaaactgttctatcgcccaacaggactaaaaggccagcctgctgaagcggcaaaacaactgaagtggcaaatagcgagcgaacaaggctacgcggtactacgtgctgataactcaactccgtatttcgtctcatttaatgacgctacctacactgcaggcggtaaacgttatgacgttgaagccaccatggttgcgcctttcagtaaatcatccttcaccgtgaaaggcttgtcaggcgctagcgccggaaaactggagtatcacgccattaatgattttggcggtttgattgaaggttccgtatcgctgtaa

SEQ ID NO: 376798 - DNA, 585 bp, Salmonella enterica
atgaaaaaagcgattttagctgccgcaatggttatggctatgggttctacttccgcaatggcagttgaaggcggccagatcgaattccacggtttagtgagcgcaacaacctgttctaaagtagtttcctcttcacgcggtaatcaagcgactgatggtgacgtatatctgactacagcagccccaggcgatatcactgaaggcgttgctgctaacgcatacggcgcgcttccggctccgttctctatcatcctggattgctcaggcgcggctgatgtaactgatgccactaaggcttctctggtaatggattcgtcattctctaacactaccggcactcttgacaatgacaccacactgtccgtggctggtgaaactggggctgaaaacgtgaatatcgccatccatgatgccgataccaaaactcaggttaaaatcgatggcgctgaaattcatgaagcgtccttcaaaaacaaagttgcaacctataactttatggcgtcttacgttcgtgccgatgcttctaaagaagtgactaccggtcatgtaaccacgaacgcaatgtatacctttacttaccagtaa

SEQ ID NO: 376799 - DNA, 480 bp, Salmonella enterica
atgacgatcgcgtatatcgcgcttggcagtaatctggcctctccgctggagcaggtcaatgccgccctgaaggctatcgccgacattcccgatagccgtatcgtcgcggtttcttcgttttaccgcacgccgccgcttggcccacaggatcagcccgattacctgaacgctgcggtggcgctggataccgctctcgcccccgaagaattgcttaaccatacccagcgcattgagctgcaacagggccgggtgcgcaaggccgaacgctgggggccgcgcacgctggatctcgacattatgctgtttggcgatgaagtcattaacaccgaccgtctgaccgtgccgcactacgacatgaaaaaccgcggttttatgctgtggccgttattcgaaatcgctccggagctggtgtttcccgacgataaaggtctgctgatcgagctgatgtcccaaatgtctccctgtcccgatcgttggtaa

SEQ ID NO: 376800 - DNA, 249 bp, Salmonella enterica
atgtccggaacgtataatgccactattcgccgggtggtgatttccgcctggataggaaactccattgaatattatgattttctattatacggcttagcaagcgcgctggtatttggcccgctttttttcccctggcgccagcccattgactgcaacgttatcttcttttgccagtttcggcgtgggatttatttcccgaccgctgggcgcgctattttttggcaacaggggggatacgcttgggcgtaa

SEQ ID NO: 376801 - DNA, 1017 bp, Salmonella enterica
atgaagcttttaattaccggtggatgtggcttccttgggagtaatcttgcctcctttgctttaagtcaagggattgatttaattgtattcgataatctatcacgtaaaggtgcaacagataatttacattggttatcctccttaggaaactttgagtttgtacatggtgatattcgcaacaaaaatgatgttacaagattaataactaagtatatgcctgatagctgttttcatcttgcaggtcaagtggcaatgactacatctattgacaatccttgtatggattttgaaattaatgtaggtggaactttaaatttacttgaggcagtacggcagtataattcaaattgtaatataatttattcatcaacaaataaagtatacggcgatcttgagcaatataaatacaatgaaacagaaactagatacacttgtgtagataagcctaatggatatgatgagagcacacaattagatttccactcaccatatggttgttcaaaaggtgctgcagaccaatacatgcttgattatgcaaggatttttggtttgaatacagtggtgttcaggcattcatcaatgtatggtgggagacagtttgctacttatgatcaaggctgggtaggttggttttgtcaaaaagcggttgaaattaaaaatggtattaataaacccttcactatttctggtaatggtaagcaagttagggatgttttgcatgctgaagatatgatttcgttatatttcactgccttggcaaatgtatcaaaaattagggggaacgcttttaatattggtggtaccattgtcaacagcctatcattacttgaattattcaaattgcttgaagattattgcaacatagatatgaggttcactaatttacctgtaagggaaagtgatcagcgtgtttttgttgcagatattaaaaaaatcactaatgcaattgactggagcccgaaagtctcggcaaaagatggtgtccagaaaatgtatgattggactagttctatatga

SEQ ID NO: 376802 - DNA, 1086 bp, Salmonella enterica
gtgaagatacttattactggcggggcaggttttattggatcagctgttgttcgccatattattaagaatacacaggacactgtagttaatattgataaattaacctacgccggtaatcttgaatccctttctgatatttctgaaagtaatcgctacaattttgaacacgcggatatttgtgattccgctgaaataacgcgtatttttgagcagtaccagccggacgcggtgatgcatttggctgcggaaagtcatgtggaccgttcgattaccgggccggcagcatttattgaaaccaatatcgtcggcacctatgtacttcttgaagttgcgcgtaaatactggtctgcgcttggcgaagataaaaaaaataattttcgttttcatcatatttccactgatgaagtttacggcgatttaccacatcctgatgaagttgaaaacagcgttacgttgccgttatttactgaaacgacggcatatgcgccaagtagcccctattctgcgtcaaaagcatccagcgatcatttagtccgtgcctggcggcgtacctatggtctaccaacgatcgttaccaattgttctaataactatggcccttatcacttccctgaaaaactgattccgttggtcattttgaacgcactggaaggaaagcctttgccaatttatggcaaaggggatcagattcgcgattggctatatgtagaagatcacgctcgcgcgcttcatatggtagtgactgaaggcaaggcaggggagacttataacattggtggccacaatgagaagaaaaatctcgatgtggtatttaccatctgtgatctgctggatgagattgtacccaaagcgacttcttatcgtgaacaaatcacttatgtcgcggatcgtccgggccatgatcgtcgttatgccattgatgcaggtaaaattagccgtgaattaggctggaaaccgctggagacctttgaaagcggtattcgtaaaacagtggaatggtaccttgcaaatactcaatgggtaaacaatgttaaaagtggggcgtatcagagttggatagaacagaactatgaaggacgccagtaa

SEQ ID NO: 376803 - DNA, 894 bp, Salmonella enterica
atgatgaatttgaaagcagttataccggtagcgggtttgggtatgcatatgttgcctgccaccaaggcaatcccaaaagagatgctaccgatcgtcgacaaaccgatgattcagtacattgtcgatgagattgtggctgcagggatcaaagaaatcgtgctggtgactcacgcgtctaaaaatgccgttgagaaccacttcgacacctcttatgaacttgaatcgcttcttgagcagcgcgttaagcgtcagcttctggcggaagtgcaatctatctgcccaccgggcgtgacgattatgaacgttcgccaggcgcagccgttaggactggggcactctattctgtgcgcgcgtccggttgtgggcgataaccctttcattgtggtactcccggatattattattgatgatgctaccgccgatccgctgcgctataaccttgcggcgatggtggcgcgtttcaatgaaacgggtcgcagccaggtgctggcaaagcgcatgaaaggtgatttatcggagtattccgttatccagacgaaagaacctctggataatgaaggcaaagtcagccggattgtggagtttatcgaaaaaccggatcagccgcagacgctggattccgatttgatggcggtaggccgttatgtgctttcagccgacatctgggcggaactggaaagaaccgaaccgggcgcctggggccgcatccagcttaccgatgcgattgctgaactggcgaaaaaacagtcggttgacgcgatgctaatgacgggcgacagctatgactgcggtaaaaaaatgggctacatgcaggcatttgtgaagtacgggctgcgcaacctgaaagaaggagcgaagttccgtaagagcatagagcagcttctgcatgaataa

SEQ ID NO: 376804 - DNA, 405 bp, Salmonella enterica
atgaaattattaattttaggcaaccacacatgcggcaaccgtggtgatagcgccattatgcgcggtttgcttgatgccatccgtcaacaggcgccagaggcggagatggatgtgatgagccgtttcccggtgagttcctcctggttgcaggggcgaccgattattgccgacccgctgtatcaattaagccagaaacagcaggcggcggcagggcttaacggtcgggtgaaaaagtattacgccgtcgttttcagcataaaattttattgtctaaagtcgcccaggaaggatcgctgcgtaattttgctatcgcgccggaatttgccgaattcgcgcaatttattgcgcagtatgacgccgtcattcaggtgggcggttcaaactatgtcgacttatacggtttga

SEQ ID NO: 376805 - DNA, 372 bp, Salmonella enterica
atgtctcgttctatcagaatctgtagctatctgctgctgccgctgatctacctactggtcaatgtcaagattgcccaactgggggaaagctttcccattaccatcgtcacttttttaccgctgttgctgctgttatttgtggaacgcattagcgtaaaaaaattgatgatcgccttaggcatcggcgcggggcttacggcatttaacttcctgttcggccagtcgctgaatgccggtaaatatgtcacgtccacgatgctgtttgtctatattgtggtcattatcgggatggtctggagtatccgattcaaaaccatttccgcgcataaccaccgaaagattttgcgtttttttatctggtggtgggtatag

SEQ ID NO: 376806 - DNA, 2112 bp, Salmonella enterica
atggaacaggatgatcgtctgctcaacgctatgtttgagatgtgcaaccacaaaaatcccctcaatgacgggcaacgagagtggcatatcgccgatattcccggcctgctgcgcgaagaacgctatgacgaactggacgaacgctacaaccaggcgctgacggagagctttaccagccgcgaagcggaaaagcgctatttcttcgcctggaatcaaatggacaaccctttttacgatatggacacgctggttgaggctgggccgcaaggattagcgctgatcaaaaactggcagcgcgctcgtccccgctccactcacgcctggcttgccgaggcgcaatactggaatcaccgtgcgtggctttaccgcagctatggctgggcgagagaaaccacccgagcgatgtggatctgcgccgccgcctgcaacgaacggatggtcatcgccgcgctcaatgctatcgactgtgaaccgcgccagtggatggcggcggccctgaccagcaccaactcaaaagtcttcggccagcccgactggctggttgagttcctcgagggcgcggatgttgccgggcagccattaatggaagatctggctgaatatcatcgccattcaccgcaggaggtggatgcgctgatggcccattccgggctgtcgtttgccgacgcggtttgcccaaatttgccgcgcccgtccgtgctgccggagtgcaatgacgatgccgggcaaaaatactggctcgccgtctgcctggctattttcccgacggcattttacgtgctggatgaatatatcccgtttcgtatgccgcgctggggagggtctcacgaggaaatccgcgaatttctggaatcaagcgtatgcgatcacctttctgccgcagaacgtgaacatctggagctattgatctggtgggacgatcaccgcgatctgcgcatcaaagaggttgactccccggcagaacaggaacgcattatcgccaaagccgaagagattagcctgcgagcgcatatccaggaatctcgccacaacacgctgaagtggctgcgggtctgctatagcgatctggacgataatgacgcgctctggcgaacccttcagcgttcgatcgtggaaaaagttaagttcaacaattacttctttgatgacacgataaagttcgccctgcgcgattttcctgacacctggtggatgtataattttctctgtcagaatgcgcagcaaacggaattcgcagtgccgaaaatccgtcgtggctactttcagtacgccgggttattgggtttcgaaaaggatgaggcgcaaggcctcgcctggctcgatagcgtcgccgacattcaatataaccataactggcgggcggcgattaaaaatttcgactggttcgggctcccggaacattttgtgccgctggcagagctgggcgcacaaagaaatatacccgccgcgctaaacctgctgggccttgaacacaataataaagagaacaacggcctactaccttacgatcctgccatcgcgttagggtattttcagcgcgcggcggagattttgcaccggcggttagcgctgcgcgagagcaccccgtacaaattaatagataacggaggctataccgactatgaaaatgacctgcaaaatattcatttcagcatcggcatctgcaaccagcgtctgagtaaacaagaacttgataccgaaaaacgttccgcttatgaaaaagaactgctcgataatctctggctggcgcatcagttcgggcataaagaggcctggggcttgttcctgctgaatatttttgaagtgaaggatattacgctggcgcataagcatctggaactggtgcaacaagaggccaacaaaggcacgctacacgctatggtgaccctatcgcgcctgcacggtaataaacacgatcgaacgctgtttaatatgaagctaagcgcacgctgggcacattttgccttcacgctttacccggataatgaaatcgttatggattgcctggaccacctgcatttcgattctttctggaaacgctttcgtttcgcctggtataccgtccgtatcccgaattcagagctgccgggacaggtcaactcaatggtgtaa

SEQ ID NO: 376807 - DNA, 720 bp, Salmonella enterica
gtgataatacaaagaaaatctctatttctttgcgccctgcttctactcttcgccaccgccagggctgaaattacggagcagcagatcgaggccgactgcgcaaaaattccagttttggccagccagggcgaacagctttacaagacccaaaagtatgccaaagcactcgacgcttttgaacagctggccgcatggagcgaaagctgcgcccttgacgacaacgccatcgcgacggcctacaacaacgtggcgctaacctggatacgcgaaggcgagtggcgtaaagcccgcgcctggctgatgctaaggccgaatgatagcaagtcgatctacaacctgaaactgatcaaagataagctatcggtcctgccgccaccggtttccacggcgggtgaatactggcgctatgccgggcgcgcctcctggaacgtgcttagcgtgaaggcattacccaccccatcgcgctatcaggttaattttcagggttactggttcggtttaatggggatctacttcggccccaatatcggcgagttctacgcagagataacgctggaaaacgataaagccatcgtggcgcttcgggaaggcgatgatattcactgtgacatttcgctggctttttcttctgaaaccattgatgccagcactgatacgtttgtggactgcggttttggcgcaaatgtccgcgccgacgggcactatctgcgcgttgaataa

SEQ ID NO: 376808 - DNA, 714 bp, Salmonella enterica
atgccgattatgaataattatagattaactttttctttatgtttactgcgttcggccatattgtttggcattattttaataagtgttaattgtaataatcaaaagagtaaggaattggttcttcctgttgattccacgcagtttacacaattggcttgttattataaagatattaattccgatgataatataatggagttaaaattaccagatgaatataaagagaaaactaacttatttaatcaacaggaaattaaggtgccggtaaaaggtgagagttttctttctccgtatattggtgatggtgtccgttattatgaattagggtactttgaacatgatggtaatacttacaaattgataatttataataaaattggagagtctgatacgttattgcttaatgtacaaataaatagttatgatgcaaaaggaaacctggtggatgctttattgcttagtagcttttttgcttatgaagacatcgtgcgtttttctgattttgtcatccgccaggattacacaataagcattgatagttatgttatatacaggtggtatgaggacagcaaagatggtcatcttgtaactataaagtttaaagatcaggcgcctcagatttatataaaggaacaatatcaaatggaaaatggtcgattcaaattgatatccagaaatgcagtatcacagggtgaaaaaagaagcgagcgttaa

SEQ ID NO: 376809 - DNA, 429 bp, Salmonella enterica
atggttttagttttttctttttctaatgtttatgctgaagactgttcacaacaagactttgataaagcggatatggcgttagactctcttgcgtcatggaaagctgtcgatggcttttattcccgacatagtcaatgtgatgtgggctacctccgggaaggcacgtcagaaaaaattatcagattgttagtggatagatggggagaattgaatgagttatctgcgcttatcaaaaggaaaccagcacttggcgattatgttattgatcatattggagagatactcgatgtaaaagatgttgaaaaaataagggattattcagcatctcattgccaaattgatagtaaagatctatgtaaaaaactgcacgatgcagctgtttatattttaccgtacatgtcttctcagtatcaatatcttaataattga

SEQ ID NO: 376810 - DNA, 450 bp, Salmonella enterica
ttggttagttctacttatggtgaagaaaattataaaaatattcattttaaaaacgcaacgataaatattcctgccagatgggtagctaataaaaaagatgattgtttattgattagtaaaaatcatataaatgtgttcagttatctttatgtatgcacagatgcggcaacgaataaaaattctttttttacaaagaatgatgatggagaatgggaggccgttactgatggcgtccctgttttagctgatgtaaatattacgccaaaatttattggcatgagtgcaatcgtttcatgtaggtacaaagatgatgctgggtatcatatagaccagtgctttcaggcagtgatagtattgtcaacaaacataatgtttgtttttattggtagaggcgattcatccttatttaataattataaggaaatatatcgctcattcaaggttaaatag

SEQ ID NO: 376811 - DNA, 480 bp, Salmonella enterica
ttgaagtatatgaagcatttttttctaatcctttttgggatttcttctccatttatatgtttggctacttctgttgaatttaatgttacaaagggaataaaagcatcaatcacttgggtggataataaaaaagttgagtatgaaattacaggtagtgatcgtgtggcaaagagaggatattatgatgttgatacggaaaataatatccatgttaaatatggtgattataattttgatggtaaagaagattttgtgatttggtatacagatgatggtatgggaatttatgatatatatagggtttttctctattctgagaaaatggctgactttaaagaaataaagccatcatgtggcgatgattttataaatttaaatctgaataagaagaaaagagagcttattagtctgtattattctcataatgaggcgcaaagatgtattactaatgtttttgttggcgagaataaattaaagtga

SEQ ID NO: 376812 - DNA, 621 bp, Salmonella enterica
atgaataagatatatcagatgtataaaaagatagtaatattagtgattacgcttattattatatttttcggcggtgggtggtatatgcataaatcacaacaacaaatggcaacccttgttatttctgatagtgaaaatgccctcgattatccgaataaacgtaaatggtttgatgccagtagatggctcagcacatcacaatatattaaaatagatgatttttatcttttaaatcttaagcatcatccagttaacaatataaatgatgcagggattattgtaatattacactttgcaattcgggatgcgataaagaaatttccagagttatcaaaattaagccagatggataataaggaattttttcatttcatgcagaataaactttctaacgagtatcttagaaccaaattcaatgaagatacactggaacctactgatgactattttttgttcttttttacttataatgaaatatcttatgaggtggaattattacggaaagttactgagcatggtatgatgtttgtgccttatggatatcaagttaataaaaaaggggattggcacagaatgcatccatctacatattcttgttttaacgatatccaaagtaattag

SEQ ID NO: 376813 - DNA, 693 bp, Salmonella enterica
atgttaaaaatagttatgctttttttgatgttttttccctgttattgcttacctatggatattaaaaatataaaagattgtaagttggaggaaggtaatagagttaaattaatttcattgagcactgttgatggtagtacgccatacttaatctttgacaatgttattgttagcgcatttcttgatggtagtatctattctggggacattatcctctcaaaatatatccatcactccctcatttttgcgctgaattacggcgctccttatatgaaaggctgtttgataacgggtttgagtgccagtgctgagagaagctataaacccaatggcttttgttttgcagaaagaaatattccagagtctgtctggtttggtgaagatcatacgttaattattattaaaaataataatagtgttggggaatggcgtggtaattatattatctatgatagccgtggagatgaggctcaaacatttaataaattgcctgacactaaaaattataaaatttatcgattagatttatattattgttcatgctatgttttctgggaggatcgtcaggttatgcgaattcagaaaagaacatttctaaagaacttcttagtgagtataaaaatttttcacttgctgagtgtattgaaaaaaattatgaaaaaatgggcgttgtttttactaagctacctttaa

SEQ ID NO: 376814 - DNA, 501 bp, Salmonella enterica
atgacatttatatttgatgtaaataaagagtatcacgcgggtgctaacctgacagataagtttttatgtttagaaacttattcgggattggggcgctattcttcagatcctgattacccttgtcagttattatctattgattcggatgatgtatgtatcggtcatgaattattacaagcattaaaaaatagcagaacttacaccccagaagagagtgaagagtatctttctttagagaaaacacaggtggagtatgatgagtgggtcactgtattgatggcaaaatataattatagaaccaggcgtgcattatttaaaaacatgaagtattgctcaattatatgcgtgaataatattattaagatacaacctactcgacatactaaacttgaagggtggagctgggccggacatgacaaagatgtaattagattgcctgttaccagcgaaccagagaaaattggaagtgcattgagacaggcatttgaatgttgtgattaa

SEQ ID NO: 376815 - DNA, 285 bp, Salmonella enterica
atgaaatatattatttttgcatttatttttctaattccgttaagatgtatgagtgaaaaacttgtttttttagatgaagtacaaacaaaaactatgaatgttgctttttcacattttagagagcatacaaactggggcttatttaataccatgatacaggatgatgatgaaaatattaaaatcgcattctattgtaaatctcatctggaagaagcccgtggtggcggtatggagcaaattatttatataatttcaaaaaaagttatagcaaatgaaatgatataa

SEQ ID NO: 376816 - DNA, 918 bp, Salmonella enterica
atgacgatctcaaagctatgggtaagttcgctggcgttgctggcgacggtgagtttacctctacaggcggcatcgcccgtgacggtcgggtcaaagattgataccgaaggcgcactgctcggcaacatgattttgcaggtactggaaagccacggcgttaaaacggtcaataaaattcagctcgggacgacgccagtcgttcgtggcgcgattaccgccggagagctggatatctatccggaatacaccggtaacggggcgttcttttttaaagatgaaaacgatccggcatggaaaaatgcaaagcaaggctttgagaaagtcaaaaaactggatgcggagcagaataagctggtctggttgacgcctgcgccggccaacaacacctggaccatcgcgatacgtcaggacatcgcggaaaaaaataaactctcctcgcttgccgatctcagccgttatctgaaagagggcggcacttttaaactggcggcgtctgcggaatttatcgaacggtcggatgcgctgccggcatttgaaaaagcctatgattttaccttgaatcagaaccagctcttgtcgctggcgggcggcgatacggcggtcacgatcaaagccgccgcgcaacaaacatccggtgttaacgccgcgatggcgtatggcaccgacggcccggtcgccgcgctgggtctgcaaaccctgagcgacccgaaaggcgtccagcctatctatgcccccgcgccggtagtgcgtgaatcggtgttacaggcctatccgcagatagccgattggctgcagcccgttttcgccagccttgatgagaaaacgctgcaacagttgaacgccagaatcgccgtagaagggctggatgcgaaaaaagtcgccgcagattacctccgacaaaaagggtgggtgaagtaa

SEQ ID NO: 376817 - DNA, 1401 bp, Salmonella enterica
atgtcttccataacaatgactgataataaaacgttcctgaatgagctggcccgcctggtaggccattctcacctgctgacagaccccgccaaaaccgcccgctatcgcaagggtttccgttccggtcagggcgacgcgctggccgttgttttcccgggttcattactggaactgtggcgtgtgctcaacgcctgcgttaacgctgacaaaattattctgatgcaggccgccaacaccggtctgacggaaggctccacgccgaacggcaacgactacgatcgcgatattgtgattatcagcacccagcggctggataagctgcacttactggataacggccaacaggttctggcctggcccggtacgacgctctatgcgctggaaaaagcgcttaaaccgctgggccgtgaaccgcactcggtgattggttcgtcgtgtatcggcgcgtcggtcatcggcggcatctgtaataactccggcggctcgctggtgcagcgcggcccggcctataccgagatgtcgctctttgcccgtattgacgagcaaggcaaactgcaactggtcaatcatctgggtatcgatcttgggcatacgccggagcagatcctgagcaagctggatgatgaacggattaaagatgaggatgtgcgtcacgatggtcgtcatgcgcacgatcacgactacgtgacgcgggtacgagatatcaacgccgatacgcccgcccgctataacgccgacccggaccgtttgtttgaatcttccggctgcgccggaaaactggcggtttttgccgttcgccttgatacctttgcagcggaaaaaaatcagcaggttttttatatcggcaccaatcagcccgcggtactgactgaaatccgtcggcatattctggcgaacttcgacaatctgccagtggcgggagaatatatgcatcgcgatatctacgatattgcggagcagtacggtaaagatacctttctgatgatcgataaactcggcaccgacaagatgccattctttttcacgctaaaaggccgaaccgatgcgatgctggaaaaagtaaaatttttccgaccgcatttcaccgaccgcgcgatgcagaaattcggccatctgtttcccagccatctgccgccgcgaatgaaaaactggcgcgataaatatgagcatcatctgctgttaaaaatggcgggagacggcgtcgcagaagcgcaacgctggctgaatgaattttttaaatccgctgagggcggtttcttcacctgtacgccggaagaaggcagcaaagccttcctgcaccgcttcgccgctgctggcgcagcgattcgttatcaggccgtacacgctgatgaagtggttcgagcatctgccgccggaaatcgacagccaactggtacataa

SEQ ID NO: 376818 - DNA, 762 bp, Salmonella enterica
atgaccaaagtcgcaattgtaacggcatcagattcgggaattggcaaagcgtgtgcgttgttattagcacaaaacggttttgatattggtatcacctggcattccgatgaacgcggcgcgcaggagacggcgaaaaaagcggcgcagtttggtgtgcgggcagagaccattcatcttgacctgagccagttacccgagggcgcgcaggccattgaacatcttatccagcgcctggggcgcgttgacgtgctggtcaataatgccggggcgatgaccaaatccgcgtttattgatatgccgtttacgcagtggcggcaaatttttaccgtggatgtcgatggcgcgtttctctgcgcgcagatcgccgcccggcatatgattaaacaaggagagggagggcgcattatcaacatcacctccgtccatgagcatacgccgcttccgcaagccagcgcctataccgcggcgaaacatgcgttggggggattgactaaatccatggcgctggaactgattgagcatcatattttggtcaacgccgtcgcgccaggcgctatcgccacgccgatgaatgatatggatgacagcgacattgagccgggatcggaaccctcgatccctatcgcccgaccgggttctacgcatgaaatagccagcctcgtcgcctggctgtgttcggaaggcgcaagctataccaccggtcagtcgctgattgtcgacggcggatttatgctggtgaatccgcaattcaacgcaaaataa

SEQ ID NO: 376819 - DNA, 1368 bp, Salmonella enterica
atggagagttgccttgatatattcaaaatagtaataggtccatccagctcacgtaccgtagggccgatgcgcgccgcctgtcactttatttcattgctcagagaacaagagacgttgccgctaattcgggaaattgaaatcgagctgtatggcgcgttatcgttaagccgcaagtgccacaatgtggataccgccctgtatcttgggctgctgggttgccagccggagaatgtcgatctccgttcgcatatggcggtgattaagcgtgcggaaaatgaaaacaaaatcgaactcccgctctctgacgcgggcggaatcacgataaaagtcaagattatcgccaatcaccaggcgcatccaggccatccttatgccatgacgttttgcgccagggatgattattttacggtgtatgaagagacctggttttctaccggcgccgggcaggttcgtaaacatggcgagccgctgacgccatcgcttcctttgcgtacagtgtcgccctttgaatttagtcatgccgcgcagttgctggcgctgtgtcggcgtaacggcctgtccgtggcggcgctgatgatgaaaaatgagctgtgccgccactcgccacagacgttgcagaattatctggcgcaaatatgggacgtgatgcagcaggcggtttatcgcggcctgcatactgagggggtattacccggtccctatcaggtaccgcggcgcgcctgtgcgttacataagacgttacaggctaaccgctccgccagcgattttttaaccgcgctgaactgggtcaatgccttcgcgattgcggtaagcgaagaaaatgccagcggcggacagattgttaccgcgccaaccaatggcgcgtgcggcatcattccggcagcgctctgctggtatgataaatttgtcacgccgctggagcccggtgctctgacccgtttcttcctgaccgccgccgctatcgcgatgctgtttaaacaaaacgcctctattctgggatctgaagttggctgtcagggggaaatcggcgtggcgtgctcaatggcggcggcgggcctggctgaactgatgggtgcatccgtggagcaaacgctgagcgccgctgaaattgccatggaacatcatctgggattgacctgcgatccgctgggcgggcaggtacaaattccctgcatagagagaaatgccatctctgccgtgaaagcgataaacgcggcgacgatggcgatgagtcgcgtaagcgaaccctgtatttcgctcgatgagatcattgctgcgatgtacgagaccggtaaagacatgagcgctaaataccgtgaaacgtatcatggttcgctggggaaaattcagccgcgcaagagagggtaa

SEQ ID NO: 376820 - DNA, 375 bp, Salmonella enterica
atgttcaaaagtaaccgctggatgaccgggttaatcttcgcgttagcgctgtgcatatgcatcgtgctggtgccgctggttcaggatacctcttacaccctcagcgcgattctgttcaccatcatgggcttcgccttatacggaccgcatatgctttttgccgtcggctgtctggatgtgacccataaggatgcggcgggatcgattaccggctttcggggattgttcagctatgtcggcgcggcaatggccggtgtgccggtaattatggtgaaaaatagctgggcgtggtcgggcgtttatatctatgcgttaatcgccattctgctaacgactctgtcgctggcgctgctctccaggctgcatcggttataa

SEQ ID NO: 376821 - DNA, 285 bp, Salmonella enterica
atgtcagtaattttttctcaacgcactccggggcgacgctggctctcgctgtggccattggcgttattcctgctgctgatgctggttggcggtctgtggatatggcaggcctggccgcaggtgatgctgaaaagcgctctttggcagcgggacgtgaatcagcagttgagcgcgctgcttaatgcggtggcgacgcatcctgagcgggcgggcggatcgttgcttctgctgagttttatgtatggcgtgcttcatgcgtggggccgggacacggcaaagtggtga

SEQ ID NO: 376822 - DNA, 1014 bp, Salmonella enterica
atgagcattgatattgatatcattaaagcccgtgcgaaaaacgaatatcgcctatcaaaagtgcgcggcgaagccatgatcagcgtccgcattcccggcggtattttgcccgcgcatttgctaacggtggcgcgtgacatcgccgaaacctggggcaacggacaaattcacctcactacccgccagaagctggcgatgccgggtatccgttacgaagatatcgacaacgtgaacgctgcgctggagccatttcttcgcgagattgaaatagaactgtgcgacgtccaggttgaggataccaaagcgggctatctcgctattggcgggcgaaatattgtcgcctgtcaggggaaccgcatttgccagaaagccaacactgacacgaccggtctgtcccgtcgtcttgaaaaactggtctatcccagcccttatcatctcaaaacggtcattgttggctgcccgaatgattgcgcgaaggcgtcaatggccgatctgggaattattggcgtggcgaaaatgcgcttcactgccgatcgctgtatcggttgcggcgcctgcgtgaaggcctgtagtcaccacgcggtaggctgcctggcgctgaagaacggcaaagcggtcaaagaagagtccgcctgtatcggctgcggcgagtgcgtgctggcctgtccgacgctggcctggcaacgtaagccggatcagctctggcaagtccgtctgggcggacgcaccagtaaaaagacgccgcgcgtcggcaagctcttcctcaactgggtgactgaagatgtgataaagcaggtgatcgttaacctgtatgaatttgaaaaagagatgctcggcggaaaaccgatctatctacatatgggccatctgatcgacaaaggcggctatctgcgttttaaagaacgggtactgcgcggcgttcagctcaatccggaagcgatggtcgccgaacgcatttactgggccgaagacgaatccgtcgcgcggatgcatctcaaacccgccgggcactag

SEQ ID NO: 376823 - DNA, 1881 bp, Salmonella enterica
atgtcaccttatggcaagatccgtaccagcctctccgtaggcgaaggcggcgatctggacggcagttcgctggattatttcgttccctggtatgataacgaaaaaaccttactttttagccaactctcagcccaacgtaaagaagaccgcactattggtaactttgggcttggcgtgcgccagaacgtcggcaactggctgcttggcggcaacgcattctatgactacgattttacgcgcggtcaccgtcgactaggtctgggaaccgaagcctggacggattacctgaaattctccggcaactattaccatcctctttctgactggaaggattccgaagatttcgacttttatgaagaacgacccgcgcgcggttgggatatccgcatggaaagctggctgcccttttatccgcagcttggcgctaaattagtttacgaacagtactacggcgatgaagtggcgctgtttggcaccgataatctgcaaaaagatcctcatgccgttaccttggggctggaatatacgccggtaccgctggttacggttggttcggattacaaagccggtactggcgataataacgattttagcgttaaagcgactgtgaactaccagataggaacgccgctggcggcgcaactcgatccggaaaacgttaaaatccagcactctttaatgggcagccgcaccgattttgtcgatcgtaacaatttcatcattctcgaataccgcgagaaagatccgctggacgtcacgttgtggctgaaggccgacgccaccaacgaacacccggaatgcgtgattgaagatacgcctgaggccgcggtggggctggagaaatgtaagtggacggtcaacgcgctgattaaccatcattacaaaattatttctgcttcctggcaggcgaaaaacaacgccgcccgtactctggtgatgccggtggtaaaagcggatgcgctgaccgaaggcaacaataacagctggaatctggtgcttcctgcctgggttaacgccgataccgaggcgcagcgcaccgccctgaacacctggaaagtacgcatgacgctggaagacgaaaagggcaataagcagaactccggcgtggtggaaatcaccgtccagcaggatcgcaaaattgagctgatcgtcgacaacattgccgataacgatcgcagcgatcacagccatgaagccagcgcgctggccgatggcgaagacggcgtggtgatggatctcctgatcaccgactcctttggcgactccacggatcgcaatggtaacgaactggtggacgatgctatgacgcccgtgttgtacgacagcaatgataaaaaagtcacgctggcccagacgccctgcaccacggaaaccccctgcgtgtttattgccagccgtgacaaagaagcggggacggtgacgctttccagcaccctgccgggcactttccgctggaaggcgaaagaagacgcctatggcgacagtaactacgttgatgtcacttttatcggcgacaacctgagcgcgctgaatgcggtgatttatcaggtcaaagccgccaaccctgtcaacctgatcggcaaagaagataaacatcctacggttaataacacctaccgtttcctgctgtggcgcgacaagaataaagacggcgtattccagatgtccgagcagctcacggaagaagagatggccctgtacgactaccagtgggagtttaccggacagagtacaaacggacataccggcgcgctggccaacaccataaatgaagatcttgttctgccagtaaccaataaagaggcggcgcagaagtttgccgccaatgtggaagatggcgttcagggttacggtatacgcgttacgtatagtcagaaatag

SEQ ID NO: 376824 - DNA, 6375 bp, Salmonella enterica
gtgaataaagttgtacatttcttactgacattactgatcatgtttgtagcgtcgatcgcgcctgcgcaggccttactgaaaggcgggacctggcaagaattgaactcagccactgccgcagttaacggcaccgtgccccgcgccgacggcgcgattattcccgtgtatcagggaagtatgctgcttgacccgaccaaaacctacgatgttgcgtttaccgccatgccgcgcgattttagcgcggatgccacctcaacctcgatgcgtgcggtcaattccaccgataccgaaggcgatctctttagcgatccgccgaccattgcctgggaaaatcaacagccgccgagcgtgggcctgttatgggccgatgccgccacgcccgacacgccgctttcgccgcagccgacgcctaaccagaccttttgcgcccagaacctggccggacggaaactggttgtctggccgcagccagacgatgaaacgaccgtccccgcgctgtggctctatactcacaccggcgtgccgaataatgcggccatcccgctgctcagcccgaaagtgactgtcaatattgcccaggcagtaggcaatcccgtgtcggtcagcggcgatcatgttgatgccagctttaaagcctcaaaagtgaaagtaggagagagcatcaccctcaccgtcacgaccagagggtgtgatggcaaactggtgaaaaatgcgccgtttgtcatccgccgtgaggatgccaaaaaccgtcagggtgtggtcaataacactaacccggtgcacgttggcgatgccgagctaacgaccgtgcaaacggagtatcgcggcgtcaccgatgccgagggtaaagccactgtggtggtgacgcaggatgaaggccccggcgtaaaaacgcatcttatcgtcgcttcgcaaagttatcctacgctgacggacggcgtggacgttattttcaccaccatcaccagccccgacaccgcccaggccaacatgtacggccacatgctggagagcgccagcgccacgctgaacggcgcgacctacactttcactcgaccgaagctggcggtggaggcgggtaacgctgacgaaagcgtcaacgatactaacgaaacctgggcgcagtttacctggagcggcgcggataaccattgcgacgttctgccggacgccgaacaactggtggcgctaagacatgcgcatagtacgctggcaacgtacaccggctggccggcgtcgggcgatgcggaatactggtcgtcaaccaaagatcagatgaacaactaccacgctgccgtgcatatgaacagcgcgtcggtcgtcagagcgcccaacagcgatacgctgctggttagctgtgtggataaagcccagcctgcggcgcacccgcagattaccctctctccggaggggccttataaggcgcaggtgggggaatcgattgatctggtcatgacggtagtcgataaagacacgcaaaaaccgctgccttaccgttacatggagctgtttatcgacccggcgaaaaaccgcaaaggggagcatcaggacgcgtgggataaccagcgggttaccgtcagctccgaagatatgcgcgcctcttcgccggaacactataccggcgtgaccgacgtcaacggtcaggcgcacctgacgctacagcacgacagcggcatggggggcgagacgcccatccgcatcgtgatgccggacgatgaaggcggcaacgtcgagctgccctttagcgtcattttcaccgtaataaccagcccggatgtggacggcgccaacatgtggggccatatgcgcggcgtggtggatgccggcaacctgtataaacgcccgctgctggcggtggaagccagccataaagacggtcagttcagcgaaaacaacgaagagtgggcgacgtttaactccgtggcgtcggccaccgcgcagtgcggcgtcggccaggtgccggatcagtcatcgctggcgcatttatacagcgagcaccccagcggcaagatggaaatcgaacacggctggccgaccgaagactacttcatcgccgcggatagcgacgcctcgggaacggtacacgtcaacctggcaaacggcgacagcaacaaatttaccaatcagccgaactacctgacctgctcggccaatgaaatggtggcggtgctggacgtctacttcaacgacgacccaacgactaaaaatgctgatatgaccgccaaagtcggcgaacagattaagctgaatattcattcgcgcaacgcccttaacgacatggcgattgcctataccgacttcaccatcaccatggcgaacggcaagcggcgcgacggattgacgaccggctttaccgatcccagcaacggcgagatgcagtttgacggcgtgggctaccttgccgggcaggtttatcacgggatcaccgacgccaacggcgatgcgaccattatcctcacccagaataagggcgtggggctactgacgccgttaagcatcgcgcccgtcgattcattaatcaagacgccgatttcccgcagcgtcaagtttaccgtcgccaccagcccggacacggtaaaagccaaaatgtggggccacatggccgacactcttaccgtcggcgactggacttttgagcggcctaagcttgcgagtgaagtaaatagcccgctgcgtactcaggaagagagcaatgaaacctggacgcgcgtggcccatatcgacgcggcgggcaacccggatgcgggcggctgcgcggcgaaccgcctgccgcgtatcgaccagcttgaggcgttatacagcgccaacagcggcggcgcgatgaaaaagactcagggctggccaaccttaattaactactggtcgtccacctaccagagcgccaccacctggaaactgatcgcgctggcgagcggcagtgaatttccgggcagcaacacctcggtttacaccagttgtctggccagcgataacccggtgccagccgccatcaccattgaaccggtcgatccgtcgcagtggtacgacggcagtggcgtccatgcgctgaaagtgaaaaagggcgataccctacagttgaaggtgacggtgaaggacgccagcggcaaaccggtgccggaagcgccgtttgtgctcacccgcggcgacggctacgatcgcaaaggggaaaagtacaccgcccaggacggctccgatttgcaaaatatcgtgacgcccgtggtgatcgacggcgaatcgctggcctggactaccaccaaaatggggtcgcagaccggccctgatggcacccgcatcatcagcgtcacccgcccggacacccacggcacccgcacggccattaccgccacgctgtatgaaaatgtcgccgtgagcgccagcatcgacaccatctttaccgtcgtcaccagcccggatgtcagcgtcgcccgcatgtgggggcatatgacgccgtcgctgacggctgcggatagcgcggtgtacaagcgcccgctgctctacgatgaactggccagcaagaccggtgctgcggagtacccggaagacaacgaacgctgggtggtgttctatgggccgaatacgaccaaaaccgttagtccggaagcttgctccaaggggtatttcccgtccgttgagcaactggattctctgtacagcaaatacccgaacggagcgataaaaaccgcccagggctggccgatcatccgttcttactggagcggcacaaacgccgggacaatcacccccggcgcgccaccctatgactattacacggtcgatctgaatgatgatgcgcaccggaaggttcccaatattagtgatagcgacaggcaataccagatttgcgccgcgacgccgcagcctctggccgggcggattaccctcacttctacgctggcgacggatagcgatatccaggcggtgaaggcaaaaaacagcgactcgattccgctggtgatcaccaccaccgatgcggcgggcaacccggtgccttatacgccattttccctcatacgcgacgccgggacggcgcgcaacaccagctatacctttaccggcagcactaacatgatgctggcgccgcccaccggttcggcgcaacagttctactataatggctacactatttacggtgccaccggcgcggacggcacggcggtcctcacgctgacgcaggccgcagggccgggggtgaaaaacgtgataaccgcagccctgaccgacacgccgacggtaacctcgacgctgccggtggtgttcaccaccgtgaccagcccggacagcccgcaggccaatatgtatggccatatgccggaaaccttcaccgccagcaacggcgcggagtttaagcgcccgctgctgtatagcgagctggcgtcgacgttaggtgtgaagagctatgccgacacaaatgaaaactggcctatagtgaataattttgataccagtaattatggcgcctgttcgataaatcagatggccacgctggatgatctcaaggcgctgtacggcgatcaccccagcggcaaggtcacgaccgacataggcttacccgtcaggaagaaatggtgggcgggcgacagcctgctgcaaggtcaagtcatatactggcgatatatcgatctcagtacgggcatagattactccatgtcgggaacgccgggtaattactattaccagctctgcctgaccaaaccgcgccagatgaatatcgcgctctctacggacgcctggaacgcggacaaatcggcggccgtggcgaaaaaaggcgaaacgatccccatgacggtgaaggtgacgaacgctgccgggcagcctgttagcaacgcgacggtgaaaatcacgcgcggcgatgcgctgacgcgtgcggggagcgtgtataccaccaacaacgcggacgatattaccttaagtaatatccagccttccggtacggcgacgtacttgctggggtcggtggataaatatatgtatgcgcaaacggacgcccaggggcaaataacgtttagcgtgtcgcaaaataatactatgggtcttaaaacgcccatccgcgtcaccgttgcgaatgacattaccgcaacgagcagtaaggacgtgatatttaccgtccttaccagcccggacgtcgccagcgccaactactgggggcatatgccggaaaccgtggaagggccggacggcctccgctaccagcgcccgcatttgcaggcggaagcgccgtcgggcgtcaactacatcaccgtgaacggtgaaaaatgggcggcgccgaccggcgtacagacgtatacggcaggccagtctgcgtgcgacgttgagtatatgccgctgatgaatgacttaaaggcgctacagcaactgtatcctgacggcgcgctggaggatcaattcggctggccggtgaaaaccggtaaactctggtggtctgccgatctgaatagctcgaaagcacaccaggcgataaacctgaaaaccggtcagatatcggcgccaacctccaccagcttgcaggcctgtttggtcaatgcgcgtaatgtccctgcctccattacgctaacctcgacggcgatggatgcggagaaaggcgcggcggtggcgaaaaaaggcgaggctattcccttgacggtgacggtgaaaaaccgcgcgggcgttcccatagcgaatgaaccgtttaccctgaaacggggcgatgcgaatgatcgcctcgacattaaatatacgtggaatactacagcagacgatttgacgttgcaggaactgacgccgtcgccgacaacgaaatcaatgacggcttccggcaatgtgtttagcggcgtcacgggggctgacgggacggcaacgtttacggtgaaccaggacggcagtgtggggctaaaaaccgagctgacggccagcgcgacgggggatgtcacgcaatcaaccaacacagcgctgggcgtgatctttaacgtgattaccagcccggataccgataaagcgcagtactgggggcatatgccggatacgctgacggttggtggcgtgacgctgcatcgccccttgttgatgaaagaagcgcctgctggcgcgacggatagccggaaagaaaataacgaaacctgggtttcggtttatacgaaagccgatggtcttacctatgatatgagcaagaactgtggcggggtggccgggttcccggcaaaaggcgtgctggaaaaaatacgcgatgagcagatggcggtcgctaacggatggccgacagtttcgttgccttacgctagcagtacgcctgggacgtataattattgctgggtttcgttagcgaaagggggcacaacacattgcccgaccaccagcagcgattactcgataggctatgccgcctgtcttgtacagccgtga

SEQ ID NO: 376825 - DNA, 1248 bp, Salmonella enterica
ttgaaactgaaaacgaatacccatcttttatccgggctacaggcatgtctgttttgtgttaccgctttttttgcccaggcggcgcaaagcagcgccccatggcaggagcctgacgtctcaactgccgccattaacggcacgccgccgctggctgacggcgtgacgatcccggtttatcagggcagcgttcagttgcgatctgatgcagcgaatcccgtcgattattccgcgaaacccagccagttcagcaccagtgatgtcggcagcgcgctgaccttaaccaatccgcgcgatgccgaaggcgatattttcgccgagccgccgctggtctggcagagtgaacggataccctccgtcacgctggtatgggccgacgccgccacgccggagacgccgctgtctccacaatcgtcggcaaacctgacgttctgtgagcaaaatatggcaggccgccatctggtagtctggtcgcaactggatacctcaaccgctatgccgccgctgtggttgcttacccgcaccggcgtgccttataacacggcggtcgaagtgcttgaacaaaagtttgccgtggatatcgcgcccgccgtgggtgacccggtaacccttaccgccgatcatctggatgagtcgcttaacgccgcgaaggtgaaagcgggcgaaagcatcacgctgacggtgaataccaaaggttgtaacggtgagccagcgggcaatatcgcgtttgtgattacccgcggcgatgcgcaaaaccgccagggcgtggtgaacaataccgcgccggtacgcgtcggcaacaccgaactcaccaccactgccaccgaataccacggcacgaccaacgcggaaggggtggcgacggtgaccgtcacccaggctaacgggccgggcgttaaaaccccgctgatggcgcacccgtcgaacgcgcctgcgctgaaagccagcgcggatgtgatttttaccaccctcaccagcccggacagcagcagcgccaacatgtacggccatatggcggacagttccaccgccacggtggacggcgcaagctacacttttgaccgccccaaactggcggcggaaaccgagggcgaagaccgcgtcgccagtatcaataatgaaaactgggcgcagttcacctggggccatgcggataaacactgcgatattctgccggatgcgcgccaactggaagggttaaaaatcgagcgcggcgatttagccaccactctcggctggccggtggggtga

SEQ ID NO: 376826 - DNA, 3159 bp, Salmonella enterica
gtgacatccggtgacgaagagcactggtcctcctcacagggggcgagcgcaactgaccacatcagcattgatatgcgcagccgcgcccttacgcagatgccggacgccacgcaatcgctggtgagctgtgtggataaagcctcgcctgcggtcacgccgaaattagtgattagcaccgataattttgattcgacggccaacgcggcgaaagtgaaggtgggcgaagagatcaacatgaagatcgccgtcaccgacagcgccaccaataaaccgctgccttatcgctactttaatgtctacctgggcgacgagcaaaatcgccagaatcagaagaacgccgatcttgatgccgcgcatcagtggacggatgaaccggtagttatcgccaatctggacggcggcgacggtcactatcacggcgtcaccgacgccaacggccagttttcgctggcgctgacccaggacaagggcgctggcgtattaaccccggtgcgcgtggtgctgttcgacggcacggaagcgacgcagaatgtgatttttaccgtcgtcaccagcccggacgtgacgcaggcccgtatgtggggccatatgcagggcgtggtggaagcgggcaatatttacaaacgtccgctgctggcggaagaggccgcgcaggataccggttccgaatttgagaataacgagtactgggccacgtttaactcagtgacggcagcgacaaaccagtgcggcgcaggccaggtgccgggacaactgctgctggatacgctgtatgaagcccattccggcaatacgatggaaacgacttacggctggccgacacagaaacatagctatattgcggcggataccgatggttccaccactgcgcacgttaacctggcgaccggcgcggacagcctgttcagcggcgctgaaccgaactatctctcctgctccggtaacgagttggtgaccagcctggacgtgtactttgatggcaacgagtcgttacgtaatgcggtagccaaagtgggcgaaaaaattacgatgaacgtccattccgtcaacgcgctgaacgggttaagcgtgcccaacgccagctttaccgtcaccatgtcgcacggtaaaaatcgcgccaacgccaccacgggctttaccgatcccagcgacggaacgctggtgatgggcggaacgtctttcggctcttccctggcgtcgatgacgtaccagggcatgaccgatgccgcaggcaacgccacgctggtcattgaacaaccgcagggtgtcggcttgctgacgccgctgaccgtactgccggttaactcgctgatcaccacccccgttaaccgcagcgtgaagtttaccgttcccaccagccccgatacgccggatgcgcaaatgtggggccatatgtccgacgccatcacggtgggcgatatgacctttgagcgaccgaaactggcggcggaggttgccgcgacccgcacccaaaccgaggccaacgagagctgggcgcgcgctacccatgccgatgcggtaggcaatacggcggcgggcggctgcgccgctaaccgattgccgcgcgccgatcaactggaggcgctttacgccgctaaccgcgacggggctatcaatagcacgcacggctggccggtgctgattaattactggacctccacctggcaaagcgccacaacgtggaaactgatagcgctttctaacggtagcgaatttccgggcggcgctggcgcatccgattacgtcagttgccttgccagcgataacccgacggcagcctccatcaccattgagccggtgaatacgtcattgtggtatgacgagaacagcgaacacgcggtgaaggtgaaaaagggagatacgctccagcttaaagtgacggtaaaagacgccagcggcaatccgctgccgcaagcgccgttcgtgctcagccgcggcgacggcatcgtctcggcggtagtgattgacggcgattcgctcaacgacaccgccaccaaaatcggcggcatgaccggtgaaaacggcagcaaaatcatcaacgtcacccgcccggatgcccacgggacgaaagtcgcgattacggcggcgctgtacgataacgccagcgcgacggccagcatcgacactatttttactgtggtcaccagccctaatagcgacaaagccaaaatgtggggccatatgccggaaacgaccacggcggccaacggcgtggtgtttaagcgcccgctgttatcggctgaaatcgccagcggctttacccacggcgacaatacggaaaacaacgaagcctggggaatcgtcgattttgaagtggcgaacgacgcctgtggcgcgggatacgtaccgacacttgccgatctgcaatcgctgtacgacgccaggcccggcggcaccatgaatacgcagcagggctggccgctggatggtaaaaactaccagaacagcaccgctgatttgagcaggagtacggaaaaccgctacgttaagtcgattgatctgcgcgatggcggtattagctcgctggcgtggagtgaacaactctatttcgtctgcttgcaaaacgcccatccggcggcgacgcagataacgctcacttcgcctttgtataacgacagcgacggatttgccaaagcgaaagtcggcgagaccatcccggtcatcatcaccacgcgggacgcccagggcaacctggccgccgacacgccggttatctttacgcgcggcgacagcgtcgggcgcgcgaatcaggaagtgaatagcgcgtcggcggcggagatacagataaaccacagcgacgggcgtagcagcggcgttaaatattacaccgccaccggcgctgacggcacgctgacgctgaatatcagccaggacagcggcgcgggctttaaaacgccgctgacggcggtgatagagcacaacggcgtaacgagcgcgctgctaccggtcatttttaccgtcgtcaccagcccggacacgccgaaagccaactactggggccatatggcggaaacgctgaccgacagcagcggcgtggtgtacaagcgcccgttgctggccagcgagttcagcgtcacgcccggcaaatcgctgaccatcgccaacggttactacgacaaaggcgaaacctggggcatgataaccgtcgataaagcctag

SEQ ID NO: 376827 - DNA, 1191 bp, Salmonella enterica
atgcgcagttgtaacggctggccgatgaccagttctggcaacaataacgtcagccgctactggtgggcgggggattacgtgatgtcgtcagacggcgcgcagtcgctctacgcggcggtcaacctgtttaacgacggcaatgatgtcaaaacgacgaccagcaccacgacgtactatatgcagacctgccttacctcgccacgcagcgccgccgccagcctgacgctgacgctggcaggccaggatgcagccaccgggatcgcaaaagcgaaaaagggcgagcagatggccgccaccgtcacggtgaaagacgccgcaggtcagccgatgaaaaacgtgatggtgaaaatcagccggggatcttcgtacaaccgcgtcaacagcgccacatcgtcctcaagcgctgcagacgatattacgctgcgtaatgtgatgccgtccggcccggcgacatacctgctggatacctccgcgaaatatctgtatgcgcaaaccgatgcccagggacaggtgacatttacccttgcgcaggacagtaccgcaggtttaaagaccaccatcagcgccgccacgatggacggcagcaacctgacagacagcaaagacgctatctttaccgttatcaccagcccggatagcgacaaggcctcatactggggccatatgccggaaacctttaccaacagtaagggcgttgagtttgcgcggccgctgctgcgcgccgagctttcttcaacgacggataccacgtccttcctgtcaaataatgagcactggtacacctggaaccgctatccaaacctgtatcaggactccgccagcccgtgcgatcggctgggattgccgacgctggatgatttaaaaacgttgtataacgactatccgaatggtggactaacggccgcctttgggttgcctgtagacgcggggaaatactggggagcaggggattcgaaagtcaacgatacgcactcgacgaataatttccagtatatcaggctaaataacggcgttacgcaggtcacaaatacgaatacctcaacggcgcagctctgtctggcgaagcgcagggtgttggcgatagcgttgacctccagcgccatgaatgccgaaaaatccgccgcgctggcgaaaaaaggggataaaatcccgctgacggtgaccgtcacggacggcgccggcacgccgtag

SEQ ID NO: 376828 - DNA, 4089 bp, Salmonella enterica
ttgaacaggacctacagtatcgtctggagcgccgtgcgaaatatgtatgtcgtagcttcagaactggcgcgaagccacagcaaagttaaaatacaggcgcacgctaatgaagtcgccccttctattaaaaagcctgattcaggatgggcaagacaccatgcgctggccctggcaattgttgccgcgcttggctttgccagcccgctggccatcgccgataatccggtgtcatacaccgatggggtcaagcacgacctgagcgacgattcgccgatttcctactcaggcactggtgaaggttctgcactgcacctcgaaggccttgcaacgcccgaagggggctggcaggcaacgtcgggtacaggtacaaatgtcgtgattaacaccaacggcggcggcgatcctgttcagggaactcatgctatcgccacggcagttaccctcaacaagggcgcaacacttgacctgaccggggcgcagatctctacggaaggaacctacacggcaggtatcgacctccaggcgcaaagcagcatgacgctgaatggcgggagcatccagatcggaagtaattacggcatcctgaccctctctggcgagtcatgggctgccctgattggcaccgacgttacggcaacgacgcaaagccgtagcagcatagtgtcacaatcaggtagcacgcttaacattaaggacgggagcgtaattacgctgacaaacggccaggtgcgcgtagtaggcgagacgacatacaactcctggctgaatgtgtccgatagcacgatgagctccacgggtacggatagtacgcttcttgtgtccaacaagggcgttcttgatattacgaactctaccgtcacgcacgataatgccacaggcgccgctattgaggtgaaaaacgcctcaacggtgagcatctctgatgataaagattcgatggccatcaactccaaaggcatcggtattaaaatcctcgcctccagcgtggatattaacggcgccaccatcaacgccgacggcgacggcatctttataacaagcaaaggtaaaagcggtgggtatgatgatatcaacgcgctgacggttaacaaagcacaggttaattcagagacgattgcgctgcatgtggactctggcacgacgattaacgatcctatcgtgctaaccgatagcgcatttgacgcgccggcagtgatcaagctgggcagcaaggcggtcattcaggccgacaatacgacattgaacggtgacgttgttcagagtgacatgtcatcgtcatcgctgtctttaagccagggttccacgttaaccggtagtgtagatgcgatgtttactacactgtcgctcgacgatactagccagtggaatatgaccgactcgtcaatcatcggcaacctgaccaacaacggcgacattacgctgaacaacgagagcggttcgacaggcacgctgctgacggtgggcaataccctgaccttgcaggacggcagccagataaacgcgacgctggataccgccaacagctcgccaattatcaaagccgccaacgtgacgctggatgggacactgaaccttagctcagcggccacctttgtcgcgcccgaaaccgacgagcagttaggatcgttcacgctaattgattcgcaaaccgcgattactaccgattttgacagcgtaacgctggatgccgacacctctgctatgccggattacctgacgatcaacgcgggcgttgatgcgaatgataataccaactacgtgttgtctacgggcctgagctggtacgcggacgcaaaatctgcgcgcgttgcgcacggcacctttaccgttgacgcaggcgatacctttaccgtcaccagcgaactggatgaaaccgcggccacctccaactgggacggtaaaacgctgttcaaagaaggcgacggtacgctcgtcctcagcaacacggcgaacgacttcggcaataccgacattaacggcggtacgctgtctgcgaatgatgccgccgcgctcggcagcggcgacgtggccattgcagaaaacgcaaagcttgagttgagccaaggcacgctggataacaacgtgaccggcgagggccaaattgtcaaaagcggtagcgatgagctgatcgtgaccggcgataacaactacagcggcggtaccactatttccgacggcacgctgattgctgaccatgcagattcgctgggtaccggggctgttgccaacagcggcgtgcttcaggtcggcgaaggcgagctggaaaatacgctttccggcaacggttcgctgatgaaaaccggtacgggcgagctgacgttaagcggcgacaacacttactccggcggcaccactatttccggcggtacgctgattgccgccaacgttaacgcgctgggcggcggtgatgtcgataacgcgagtacgctgaagctggacgcggagggcgaattcaaccttgcgaatgtcacgacccagtctggagcaacgactgagctgtccaaaggtacgacgctcaacgtcgactcgctgactcagcaagccgatagtacgctgaatattgacctcagtaagactaatggtgaaagcgccattaccgctgacagcgtctcgttggctggtgcgctcaacattaccgggatcggcaacgtcacagacagctggacgcctgaggcatacacctacacgctgattgacagcgacagcgccattacgaccgatttcaatgatttgaccgtcgcgggaatgaatagcgaagatgttgacttcctgactatcgacggaaaagtcgacgaagcagatagcacaaactatgatctgacggcctccctctcctggtatgcggacagagacaacgcttctaccgacgcccacggcacctttacgctaagtgaccctgacggcagctttaacgttgcggctaaactgacagatgttgatgacgcgctggatccgggcagcacatgggacggtaagtcgctgaccaaagaaggcgcaggcacgctgatcctctccggcgacaacgactacagcggcggcactacaatcaatgaaggtacgctggtcgccgccagcacgacggcgctgggcaccggtctggtggacaataacgccacgctggtactggacgcagacggtgaagtcagcgcggtgggcggcatcaccactcatggcggcgcgacgacccaactggcgctcggcacctcgttggatctcggcgacagcgcgttaattcaggaagatggcagtacgctgaacgttgagctgaatagtgactcagcgcaaccgctgattaccggtggcagcgccacgcttggcggtgatttggtcgtcagcgacgccagcctacaagcgcgcgcctccgacgcggagttccagtcctttaaactgatggatatggacagcgatatcagcggcgactttaccagcctgacgatgaacctcaccgacaagccggactatctgaccgtaaccggaacaatcaatcctcaagaccagtctgaatacctgcttaccgaagggctgagctggaatgcgaccgccacgtcagcgacgccagcacacggcaccttcactctgggcgcaggcgatagctttgaagtcaccagcgtactgggcgataaaaccggcaacggcggctcgctttacctgaataccgtcctgggcgacgatgattcggcgaccgataagttggtcattaccggcgatgcctccggcaccaccgatctgtacatcaacggcatcggcgatggggcgcagaccactaacggtatcgaagtggtggatgttggcggcgtatcgaccagcgatgcgtttgtgttaaaaaatgaggtaaacgccagtctgtatacctaccgtctgtactggaatgaaagtgacaacgactggtatctggcgtcaaaagcacagtctgatgatgacgacagcggtggcgatgtcacgccttcggacgacggcggcgacggtggcgatgtcacgcctccggacgacggcggcgatgtcgcaccacagtaccgtgcggatatcggcgcgtacatgggcaaccagtggatggcgcgcaacctgcaaatgcagacagaccctctatga

SEQ ID NO: 376829 - DNA, 378 bp, Salmonella enterica
gtgttgagaaaacattacttgaaagggtataccgcgcggcaaattgtacagcgagccatgaaaattattccttactcggtaaacgtcatggatgagcatggcgtcattatcgcgtctggcgaaccttcgcggcttcgccagcgtcacgaaggggccattctggcgctgaaggaaaaccgtattgtagaaattgattccgctaccgccaatcagcttaaaggcgtgcgatccggcattaatcttcccatctcttttcatgaacagcttatcggcgtggtcggcattaccggcgaaccggaggaggttcgcgcgtatgccgagctggttaaaatggcggcggagctggtgatcgagcatatggtgctgatcgaacagtga

SEQ ID NO: 376830 - DNA, 753 bp, Salmonella enterica
atgaaaagtcgttatttactattttttctaccactgatcgtagctaaatatacatcagcagcaacaatgcaaccctttcattctcctgaagaatcagtgaacagtcagttctacttaccaccaccgccaggtaatgatgatccggctttccgctatgataaggaggcttattttaagggctatgcgataaagggttccccacgatggaaacaagctgctgaggatgcagatataagcgtggaaaatatagccagaatattctcgccagtagtgggtgctaaaattaatcccaaagatacgccagaaacctggaatatgttacagaatcttctgaaaatgggcggctactacgctactgcttcggcaaaaaaatattatatgcgtactcgtccctttgtcttatttaatcattctacctgccgtcctgaagatgagaatactttgcgaaaagatggctcttacccttccgggcatactgcttatagtacacttctggcattagtattatcccaggccagaccggaacgcgcgcaggagctcgccagacgaggatgggagttcgggcaaagcagagtgatatgcggtgctcactggcaaagcgatgttgatgctggccgttatgtgggagcagtagagtttgcaaggctgcaaacaatcccggcttttcagaagtcactggcaaaagtccgtgaggagctgaacgacaaaaataatttattgagtaaagaagaacgccccgaacttaattactga

SEQ ID NO: 376831 - DNA, 780 bp, Salmonella enterica
gtgcgtgctattcagacgctgccagcgttaaccggccacttcgggcggcccggcaccaataatggcaactggccttacggtacgccgtatggcgtgccattgttgcctgtcggtaagaatccgatcacaacctctattccttgctatctgtggacggacgccattcagcatccggagaaaatgaccgcgacgacaatgggcgtaaaaggcgcggacaggctaaaaaccgggattaagctgtttttcaaccaggccggtaatactttgcttaatcagcacggcgaaacaaaccgcacccgtcaaattctcgcggatgaatcgctgtgtgaaaccattatcgtgattgaaaaccatatgacgcccagcgcgatgtatgcggatctgctgttgccggagaccagctatcttgaggcggaagacctggtggacagctcctatgcggcaggatcgcataactatatgattgcgattcagaaaaccgttaaaccgatgtgggaagtgcgcagcacgtatgacatctgcgcggatatcgccgggcatcttggactgcgcgagcaatataccgagggccgaactcaggcgcagtgggcggagatgcactatcagcagatccgtgaaaaacgtccatacctgccggagtggagcgtggcgaaagagatgggcgtgattgaccagcgtatcgctaccgagcagcagagccttgcgtttgctgatttccgcgccgacgccgaggctaatccactctccacgccgtcgggcaaaattgaaatttactcctag

SEQ ID NO: 376832 - DNA, 1119 bp, Salmonella enterica
gtgacgctaagtcaggcgattacgctgccttttgctaccactgcccaggcgcaggataccccgataccgaaggatgccaacggcgaaaccgtcaggcacagcgcctgtctggtcaactgtggcagccgatgcccgcttaaggttatcgtgaaaaatgatcgcattgtgcgtattgaaccggaagacgcgaaagatgacgcggtattcggcgagcatcagattcgtccctgcctgcgcgggcgttccagtcgctggcgcgtttatagcccggatcgcattaagtatccgatgaaaagagtgggaaaacgcggcgaaggaaaatttaaacgtatttcatgggatgaggccacagcctttattgcggcggaattaacgcgcgttagcgaaaaatatggccgggaagctatttattataattatcaatccggcgcgtattatcacacgcagggtagacccgcctggataagattactaaatctcaccggcggttatttaaattatcacaacacctattccacggcgcaaatcgccgccgccacgccttatacccacggtgattatgtcggtagccattttacgcagatcgcgcattccgatctggtggtgctatttggcctgaatctctcagaaacgcggatgtccggcggcggtcaggttgaagagctgcgccgggcgctggagacctcgaaagcccgagtcattattatcgatccgcgctataccgattcggtgattaccgaacacgccgaatggctaccgattcgcccaaccacggacgccgcgctagtcgccggcatagcgcatacgctgattaccgaacagcttctcgacgaggcgctggtaaaccgctattgcgtcggctatgaccgtagcaccttgccggacacggctgcgcctaacgccagctataaagattatgttcttggcacgggcgatgacggtatcgcgaaaaccccggaatgggcggcggatatcaccggaattccggcaacgcgtattcgccaactggcgcgcgaaatcgcctcgcgcgcgcctgctatatttgccagggctgggggccgcagcgtcatgccaacggcgaacaaaccgtgcgtgctattcagacgctgccagcgttaa

SEQ ID NO: 376833 - DNA, 1884 bp, Salmonella enterica
atggatccacggctactggagtattacaaccgcgaactgagttacctgcgggagaccggtgctgagttcgccaccctccatcccaaaattgccgcccgactggggatgcagggaaccgatattgccgacccgtatgtggaacgcatgatcgaggcgttcagctttctgagcgcccgcactcagctaaaaattgacgccgaatttccccgcttcacacagcggttactggaagtcgtcaaccccaattacgtcacccccacgccatcgatggcagtggtaaagctgtatcccgatacgcaggaaggcgacctggcgaaaggggtcaccgtgccgcgcgataccgcgttcgtttcccccatcccggaaggcgaaaataccgcctgccagtttcgcagcagccaggacgtcacgctgtggccgctgtccatcgaggaggtacgcctgaccgccgcgccgccggatatgcccgccctgcaccgctatctgccgcctaatattcatgtcgccggggcattgcgcatcaccctgcgaaccttcggggaactggctttcagcgagctggccggtccggcacggctgcccttttacctctgcggcgaagaacgcattgcgtcacacctgtttgagctgctacataccagcgccgtcgccacactggccggagaacccggtcactttgacggcgaactgaatgtgaatcttcaacacccggtggcgcacgaagggctggagccagggcaggggctgctgccgctcgcctggaacgtgtttcatgggcataatctgctgcatgaatttttcgcctgtccggaacggttttacttcttcaccccgaccggattgtctgccggtctacaaaaggtgcagggcaatgtggcggaaattgttatactgcttaaccgcctgccgccggactggctgattcatcagacggacgccgcacagttcagcctgttctgtacgccggtgatcaacctgtttccccgcaccaccacccggattgaagtcactcacagcgtgacggaacagcatctggtggtggatcgtacccgtccgctggattacgaggtgttttctgtccaggaagtcgaaggcctggaagcggaaaccacacggaagatgatttttcgtccgctgtatcacacccgtaataatgacgaaggcaaccacgggcgttatttttcactgcgtcgtgagccgcgccgatcgtcagaaagcgcccgccgctatggcacccgaaccccctataccggctcggaagtcttcctctcgctggttgatcagcatgaagcgccctacccggaaaatctgcgccatatcaccgtcacggcaatggtgactaaccgcgatctgccctgccttattccacgtaatggccgggatgatctgaccgtagatgcggcgattccggtggcgggcgtgggtcttatcagaccgccgcgcccgccgcagccgccgctggctgaacgcgaaatggcctggcggctgatccggcagttgtcgtttaattatctgccgctggccgatctggatcaccgcaccggcggccaggcgctgcgcgatctgctgaacctgtttatcccggctcacgacagcccgcagtcgcgccaggtgcgcagcctgattggctgcaaaaccaccccggtgacccgccgcctacccggctccggcctgttggtctatggccggggcgtcagttgcgaactgaccgtggacgaagaaggattttccggtatcagtccttacctgttcggtctggtgctggaacactatattgcccgccatgtttccattaataccttctcgcagatgacactgcactcgatgcaacgcgggcatgtcatgacctggccggtcagaaccgggcaacgggggagcgtatga

SEQ ID NO: 376834 - DNA, 402 bp, Salmonella enterica
atgccatatgtttatgctaatgcaaaggctttacaggatacagaaaaggtaggaaaccaccatcagtgtgttgaacttattcaacactatatacgagtaggacaagcgagtacatggcagcaaggggccgcagtatttggaaacaaaaacattgaagtcgggacagttatcgctacttttgtgaatgggcgatatccgaaccacaatagtggcaaccatgctgcattttttttggggcaagatactggcgggatatgggtgatggatcaatggaaagatgatatcgcaaaaccccgtgtgtccaaacgttatataagaaagttgcataatggaagtgttcgtagtgacgggacttatataaggatgagtaataatgcagaagcctattttatcgttgaatag

SEQ ID NO: 376835 - DNA, 495 bp, Salmonella enterica
atgaaacctttattctcagtgctaaagtctaatcataattcatcatcttttgaaagtcctgattttgttgattcgaaagatttctatgcaggcattggttatgaccaggggaaacttggtgctcagtttgaaaatacctgtgcggcccgtatgagcgtggcattaattaaatcaggtgtgaagtttaaaggccgtcttctcccgataaaagagggcaagtggaagggccggagcattgaaacaggcgctaaaaatctggcagatatactttcgcaggcaactgttttcggtaaacctgcggtctggcgtgatccgactaaatttcagacagaactgggtaataaaaaaggtgtggtcttcttctggaaaattgatggatataatggtgggagtggtagtcatatcgatctgattgagccgaccagtgccggggcagtatgtcattcacactgttatttttcctgtaagcaaatttggttctgggaattacgctaa

SEQ ID NO: 376836 - DNA, 471 bp, Salmonella enterica
atgggtaattatgataaagcgtgtaataacacagaggcggtaaggtttattcaaaaatataagaatgattgtgagataatcgctaatcaacttgaagtgccagtggagtttatactggcggttgcagcaaaggaaagtcgttatgggcagggaaggattgcaactgaatataataattttttttcaatgcatggtccggcaccattgcagttgagtaaagttcatcctcagggaagtcacgacgtgtgggttgccacctatacgtcttttttaaattgcgcgaaatcattcgccatcaggtttggtagtgcagtcagaaagataaacgatcctaaaaaatttgcacaagcattgattgagtcacgatttaattcaggtaaaagtagtaatggaggacataccggatacgccagtgaactggtggctatgattggtatggttaagcggagaatggcatgttcagtaaaatag

SEQ ID NO: 376837 - DNA, 474 bp, Salmonella enterica
atgttcagtaaaatagtgtcattgcttttgtttactattttatccgtgagcagttatgcccaggttcttgtatcaaatatcccggtgtttgatttggctaaattaaatcaggaagggcttgccgagacacaggctcaggcattattggttttatcattaaaaaataaaaaatataatattacattgcctagcgtttttatggacgaggccttaaaaaatgatcagggtaagccatttcattctggatattatagctttggtgtgggctatgactctccttctgttggtgctacggatatctggggattattttccgtcagtccgaaaacaggtgatatctgggaagaatattcatgtgagagaatatcatttccggcgctacaaaaaatacaacaagaaataatgaaaaaaactggcgcgacatttgccagtgaagtggtgcaacggcgagggctgggctgtacagatgaatag

SEQ ID NO: 376838 - DNA, 678 bp, Salmonella enterica
atgaaatataaaaaaataagagtatcttatgataccgaagttactggaaatgttaatggagtctactcggtagagataaaagatagtctttcctttaaaagtaaagaagataaaaaatatttcgaaggcttttttttgaaaaatagcaaggattataatagagtgatgattgatgactttaaatgcattgatgttaataaaattcaagaaatatgttttttccctgtaaggaaaaaaataaaagaaatagatatgattgatttttgtccattcaaacttggactcgattttctgatatctaaaaaattatttgatatcatgaataactttaacctgcctccagttaataaaataccaaccagaatcaacacattcaatacagaatattttttgattggttttccaatgataccacaagaaagaattgatttaaataaatccatattttttgatacaaaaaaaagaagcgaatttaatttaaaatcatacgacgcatttataaatacagatttttctgttaaacccagaaaaatatatccagatgtattttacgatgttgatactatcggttttcaggggaaagggctatttttttctgacagactgatcgatgcaatacaggacgccgggattgtcgggctgcatgttgatgacactgaaatggaaatgaatccatag

SEQ ID NO: 376839 - DNA, 324 bp, Salmonella enterica
gtgccggattttacccactgtgagttctattcacgggttgagggacgttcagttcgtttatgcggtgaatggatgccgcaggccgggtttattaacggagtgcccgttaaaattcgggtgatgaaagactgcatcgtgatcacgctgcaaaatacccgtgaactgttgggctgtattgaagggatgggcgtgacctatatcaaccagcgaaacgttaaagcatggctgaaagattttcccggtgcgctgaatgacaccggggatattccggtgatgagtcgggatcttcagtgtattactaccaattgccggtttgctcactaa

SEQ ID NO: 376840 - DNA, 2532 bp, Salmonella enterica
atgacgatgcaccgggagccgggcggcgaacggtattactacacctgggcgtggtttgaaggcccggacgatgcggcgtggcgggtgacgggccatcatacggacagcggcgagcagtaccgtctggactggaatctggcagaacgttcgctgtgcgtgacggatagcatggggcgtacgcgctgccactggtgggatgcgcagggcctggtgacggcgtaccgggacgaggccgggcagatgaccactttccgctggagcgatgaagagcggttactgctggggatgacggacgcgcagggtggcaaatggcgttatgtctatgaccgtctcggccacctgacggagacgcatgacccgctgggccgggttgagcagacgcagtggcacccggtgtggcaccagccggaaacggaggtggatgccgcgggggtggcgtggcgttatgagtatgatgagcggggcaacctgcaggcggtcagcgacccgctgcaccagcgcacggtatacgggtatgaccggcacggccaggtggtgcggataaccgacgcgcggggcggagataaatacctgcagtggaacgaagacggacagcttatgcgccacacggactgttctggctcgcagacggcatggttttatgatgaacgcacgcggctggaaagggtgatggacgcggagagtaacagtacgcgttacagctatgacggcaacggacatctgacggaggtcatgttcgcggacgggcgtacggagcgttaccagccggatgcggcgggacggctggtgaaatatacgagcccggcggggcaaataacacgctggcagcgggacggccaggggcgggtgcgcaggcagacggatgcgacgggtcgcaggacggcgtatgagtacgacgcttacgggcggctgaccacgctcacgaacgagaacggggaaagctaccggttccggtacgatgttctggaccgggtgacggaacagacggaccccggcggcagccgccgggcatacgggtataacgcgctgaatgcggtgacggcagtgatatacggcggggagcgcgggggagaaatccgccacggtctggagcgtgatgcggcggggaggctgacggcgaaaatcacgccggagacgcgcacggaataccggtacgacgcggcggaccgtctgctggaaatccgccgcaggcggcatgatgcggcggaaggcggagagccggaagttatccggttcagctacgacagtgcgggtaacctgctgagcgaggagacggcgcagggcgtgctgcagcaccggtacgatgttcagggcaaccgcacagaaacgcagatgccggacgggcggacgctgcggtacctgtactacgggagcggacatctccagcaaatcaacctggggcgtgatgtcatcagcgagttcacgcgcgaccacctgcaccgtgaggtgcagcggagccaggggcggctggacatgcggcggatgtacgaccggacgggccggttaacgcggaaactgacctgtaaaggaatgcgcggtgtggtgccggagacgtttattgaccgggaatatgcgtacagcggccaggatgagctgctgaaaaagcggcacagccggcagggggtgacggattatttttacgacacgacggggcgcatcacggcgtgccggaatgaggcatacctggacagctggcagtacgacgcggcggcgaacctgctggacaggcggcagggagagaccgcgcaggcgggtgcaggcagcgtggtgccgttcaaccggataacgtcatatcgcgggctgcattaccgttacgatgaatatggccgggtggtggaaaagcggggccgcaacggcacgcagcactaccgctgggacgcggagcaccggctgacggaagtggcggtcacccgggggggcaccgtacggcgttacgggtacgtgtacgacgcgccgggcaggcgggtggagaagcacgagctggacgcggaaggaaagccgtataaccggacgacgtttttatgggacggaatgcggctggcacaggagtgcaggctgggaagaagcagcagcctgtatatctacagcgaccgggggagccacgagccgctggcgcgggtggacagggcggcgccgggcgaagcggatgaggtgctgtattaccatacggacgtaaacggcgcgccggaggagatgacggacggcgggggcaatattgtctgggaagcgggctatcaggtatgggggaacctgacgtatgaaaaagaaacccggcccgtacagcagaacctgcgtttccaggggcaatatctggacagggaaacggggctgcattacaatttgtacagattttatgatccggatatcgggaagtttatatcgggcgatccgatagggttagcgggtggaataaacctctaccaatatgcgcctaatccgctaagttatatagatccgctaggtttatgtaaaaaatttgctggtaaaggttctccggcagaaagggccaggaattatagaagcactggctag

SEQ ID NO: 376841 - DNA, 444 bp, Salmonella enterica
atggaacagcgagcttttttgattgaaattaagaagttaattgcatcgataacgtcaaaaaacatgactgtcaaggggtgttctacagaggatatactgtatctggaagaaaactatggagaattaccaaagtcttataaattatttttatctcttttgggtgtcgaatctggtgactttaaggaagggactgatcttctttttaaagatataaatgatataaataagtatacagttgagttgatgcaagaaaataatataagcattccagatggaatgtattcttttttattgcatcaaggatattctgcgttgttttttattgaaagagatgatgacccttctgtatattgctatacagaagggaaggagataaagaaaactaaatatgttttcagtgaatatgttctggctgaaatagaattgtataatagataccagtaa

SEQ ID NO: 376842 - DNA, 2562 bp, Salmonella enterica
atgtcccccaccattaatttgaaccgcaaaagccttgcgctattgatcgccatagtttgctcaggctccgcgcagggtgaagagtattattttgatcctgcgctacttcagggggccacttacggacaaaatattgcccgttttaatgaacagcaaacgccttccggagactatcttgccgacgtttacgttaatggcacgctggtagcctcgagcactaatattcgatttaatgctgtaaaagagggtcaacaggctgaaccctgcctgcccttatcggtgatgaaagcggcacaaataaaatcactccccgagaccgacgctgcgaccgagtgtcgcccgctcagggagtgggtacctcatgccggctggcaatttgatagcgccacgcttcgcctgttgctgacgattccaatgaccgaacttacgcacaaaccgcgcggttatatctccccttcagagtgggatagcggcgcgctggcgctgtttttacgccataacacaaactggacccacaccgaaaataccgatagccattatcgctaccaatacttatggagcggtttaaacatgggcgttaacctcggactttggcaggtccgtcatcaaagtaatctgcgctatgccaatagcaaccagagcggaagcgcctggcgctataatagcgttcgaacctgggtgcaaagacctgtcgcatctattaacagtatcctgtcgctgggcgatagctatacggactccagcttattcggcagtctgtcctttaacggagttaagcttgtcaccgacgagcggatgcgccctcagggcaaacgcggttatgcgccggaagttcggggcgtagcggccagtagcgcgcacgtggtagtaaaacaactggggaaagtgatttatgaaaccaacgttccgccgggcccattttatattgacgatctgtacaacacccgttatcaaggcgatctggaggtagaggttatcgaggccagcggtaaaacctcacgtttcaccgtgccttattcttccgtgccggattcggtacgtcccggtaactggcactattcgctggccttcggcagggttcgtcagtactacgatattgaaaatcgtttctttgagggaacgttccagcacggcgttaataacaccattaccctcaacctcggttcacgaattgcgcagcgttaccaggcatggctggcgggcggcgtctgggccaccggtatgggcgcgttcggccttaacgccacctggtcgaatgcgcgcgcagagcataacgagcgccaacaaggctggcgcgcggaactcagttacagcaaaacgtttaccaccggcactaacctggtactggcggcttatcgttattcaaccaacggctttcgcgatcttcaggacgtgctcggcgtacgccgggaagcaaaaacggggattgattactactccgacacgctgcatcaacgcaatcgcctgtccgcgacggtaagccagccgttaggacggcttggcacgcttaacctcagcgccagcaccgcagactactacaataaccaatcgcgtataacacagctacaaatggggtatagcaaccagtggcggaatataagctacggggtgaatatcgcgcgacagcgcaccacctgggattacgatcgcttttatcacggcgttaacgaaccactggacgtgagtagccgacaaaaatataccgaaaccacaatgtcgtttaatgtctctataccgctggattggggcgaaaacagaacgtctgtcgctatgaattataaccagtccagtcaaagccgttcctcaaccgtatccatgaccggcagtagcggtgaaaacagcgacctgtcatggtcggtttatggcggctacgagcgttatcgcaatagtaatagcgatagcagcgcgccaacgacgtttggcggtaatctacaacaaaacacccggtttggcgcacttcgcgccaactatgaccagggtgataactatcgtcaggaaggactgggcgcgtccggcaccctggtactccaccctggcggtctgacggctggcccctataccagcgatacctttgcgcttattcatgccgatggcgcgcagggcgcgatcgtacaaaatggccagggcgctgtggttgatcgctttggttacgccattctgccttcgttatctccttaccgcatcaataacgttacgctcgacacccgtaagatgcgcagcgatgccgaactgacgggaggaagtcagcagattgtgccctatgccggcgccatcgcgcgtgtcaatttcgccactatcagcggcaaagcggtgctgatctccgtgaagatgccggatggcggcataccgccaatgggcgctgatgttttcaacggtgaaggcacaaacatcggcatggtcggccagagtgggcagatttatgcccgaatcgcccatccgtcgggttctctactggtgcgctggggaacaggggcaaaccagcgttgccgggttgcctaccaactcgatcttcacaccaaagaaccgtttctctatctgaacaaaatctgcgagaaggaatag

SEQ ID NO: 376843 - DNA, 735 bp, Salmonella enterica
atgaatgaaagcatatttttacttgataagcgtgttgtatttgatagtacgaagatgaccttatctcatggtaatgagataatcagaatatcagaagctgatacccatctgcttcttgctttttggcatggtctttacaaaaaagaagatattattcattttgtttgggaaaatcgtggaggctgcgtctcagaatcaagttactataaactcattaatcaaatgagaaatgattttagtagcatcggtctacagctatctggcatcgtaactcgccctcgggtgggggtgtcgctgtctgttgccattgaacctataaaaaaaatcacctccctaaaggtgagtgatgaaaacgttaaaggcccctcgactcgggagaaaatattttacaaaattaaacgtcacagcgtatttgtagtattaacaggagccattcttctggcattgttctatggtgtatttactatctataaaacgcctgttcgtaacagccctgatagtttttttacatatcttggcgaatataacgattatgcaatctataaaacaaaagaggataaggtcacattaagtgaagtagtttttgcttttaactctctaaaaattaaaatttaccggcaaaatggacgccatctttattatatcagggagccaaatatgaatatttttctgcaatgcttgaatcctgttgaaatggcggtgccaaaatgtattacagtaaaagaacgttactga

SEQ ID NO: 376844 - DNA, 279 bp, Salmonella enterica
atgttactaccgatacgaaagagaaacggctttttttttcgtgacatctgcatcagcaaactgcgcagaacgggtatgaaaacatttacttttaaagtcaattcagttaagacctttgagtctgatactgctggcgatttattttcctggttgaggttgttacaacccggtacgattaatgagctaaaaattgtcaaaattgggaaaaacacctacatgttttcgcttaatcggcatttgtataatgtgtgtaccaccagtagtaacgttgagttgtaa

SEQ ID NO: 376845 - DNA, 543 bp, Salmonella enterica
atgatgaatattttgctggaagaacttccccatcaggaacaggcgttagcggcgattctggcgagtttcaccggtatcgatcacgcgcaggccgatcataatcactatgctaatccgctgattaagggacgttacgacgataaggccaatattgacgttaaaatggagaccgggacgggcaaaacctatgtctatacccggttgatgtatgaactgcatcagaagtatggcctcttcaaatttgtgctggtggtgccgacgccagccattaaagaaggcgcgcggaactttatcaccagcgattacgccagacagcatttttcacagttctacgaaaatacgcggatggaattttgcaccatcaacgccggtgattttaaagtaaagtcggggcgtaaaaattttccggcccagttattaagttttactgatgccagccgtcgtgatagccatacgattcaggttttgctgatcaatgcgcaaatgctcaattccgccagtatgacgcgagacgattacgatcaacgctactgggcgggctga

SEQ ID NO: 376846 - DNA, 1320 bp, Salmonella enterica
atgacccatcagttaaaatcgcgcgatatcatcgccctgggctttatgacatttgcgctgttcgttggcgcaggcaatattatctttcctcctatggtcggtttgcaggcgggtgaacacgtctggacagccgctattggctttctgattaccgccgtagggctaccggttcttactgttgtggcgctggcgaaagtcggcggcggcgtagacagcctcagtacgccgattggtaaagtggcgggactcctgctggcgaccgtttgctatctggccgtcgggccgttatttgcgacgccgcgtaccgcgacggtgtcgtttgaggtcggtatcgctccgttgaccggcgattctgcaatgccgttgctgatttacagcgtggtctatttcgctatcgttattctggtttccctctatccgggtaagctgctggatacggtagggaatttcctggcgccgttgaaaattattgcgctggtcatcctgtccgtcgcggctatcgtttggcctgccggtccaatcagcaacgccctggacgcttatcagaatgcggccttttctaacggatttgtgaacggctatctgacgatggatacgctgggcgcgatggtgtttggtatcgttattgtgaacgcggcgcgttctcgcggcgtgaccgaagcgcgcctgttgacgcgttacacggtctgggccggcctgatggcgggcgtggggctgacgctgctttaccttgccttgtttcgcttaggttctgacagcgcgacgctggtcgatcagtcagcgaacggcgcggcgattcttcatgcctacgttcagcatacctttggcggcgcgggaagcttcctgctggcggcgctgatctttatcgcgtgtctggtgacggcggtggggctgacctgcgcctgcgctgagtttttcgcgcagtatattccgctgtcttaccgcacgctggtctttattctcggcggcttctctatggtggtgtcaaatctcggactgagccatctgattcaaatctccattccggtgctgacggctatctatccgccgtgtatcgcactggttgtattaagttttacccgctcatggtggcataattccacccgtatcatcgcgccggccatgtttatcagcctgctttttggtatccttgacggcatcaaagcatctgcctttggcgatatgctgccagcctggagtcagcgtttgccgctggcggaacagggactggcgtggttgatgccaacggtggtgatggtgatcctggcgattatctgggatcgcgcggcgggtcggcaggtgacctccagcgctcactaa

SEQ ID NO: 376847 - DNA, 732 bp, Salmonella enterica
atggctttactggaactaaaagagataagtaaggaatattcaggaaaaaaggttcttgatgcggttagtttgaaaattcaatcgggagacatgaaagtagtcatggggccatcgggttgtggaaaaacgacgcttttacgctgtctgcttcgattagaagaacctgattatggcgatatttattttcacggggaaaatatttacgacaaagaatttactattcttgagttcagaaaaaaagttggttgtgtcttccagaattacgcattgtatcgccatcttaacgtcatggataatattacccttgccctatgtaaagtgtttgggatgccgggacaactagcccgggagaaagccttacatgagctacaaaaacttgatatggtctcgcatagcgcgaaatacccttcgcaattatcgggtggccagcaacagcgcgtcgccctggcccgtacaatggtcaccgacccagaactcattatttttgatgagccgacgtctgcgcttgatccgctcatgactcgtgaagtcggaatgttgatcaagcaacttcacgacaatggcgtcactatattatgcgtcactcatgatattcgcctcgccagattactaagcgataacgtaacgtttcttaatcatggcaagattcgtgcagaaggcgcttttaccgatcttgccttacgagaaacggatccagatatccactgtttttttagcgaggcacaacgatga

SEQ ID NO: 376848 - DNA, 450 bp, Salmonella enterica
atgaaccagtcgctgacgcttatctttttgatcgccgccggcgtcgggctggtggtacaaaacagtattatggtgcgtattacgcagacatcatcgacgattctgatcgctatgctgttgaactcgctggtagggatcgttttatttgtgacgatattgtggtttaagcaaggcgctacgggcttcggcgagctggtcgccagcgtgcgctggtggacattgatccccggtttgctggggtcattttttgtatttgccagcattagcgggtatcagaacgttggcgccgcgacgactatcgcggtactggtcgccagtcagttaatcggcggactggcgctggatattgcgcgtagccacggcgtcacgttacgcgcaatggtcgggccggcgtttggcgcgctgttgctggtcattggcgcatggctgattgcgaagcgccagttttaa

SEQ ID NO: 376849 - DNA, 1389 bp, Salmonella enterica
atgacacgacaaaacgagaattataaccgttatctcttgagtgactggcgacccgaaaatccagccttctgggagaataaagggaaaggcatcgccagaagaaacttatggatttcagtaagttgtttgctccttgcattttgcgtctggatgttgtttagcgctgttgccgtcaacctcaataaaattggatttgattttacgaccgaccaactctttttattaaccgcattaccttctctttccggcgcaatattacgcgttccctactcctttatggtaccactgtttggtggtcgtaaatggaccgtattaagtaccgtaatattgattattccttgcgcctggctgggattcgccgtgcaaaatcctgccacccctttcggggtatttatactcatcgctctgttgtgcggttttgcgggggcaaatttcgcgtccagtatgggcaacatcagttttttctttccaaaagccagacaaggtagcgcgttgggtattaacgacggactgggaaatcttggcgtcagtgtgatgcagttgattgcgccgctggttatttttttgccgatatttacttttttaggcgtccggggcgtgccgcaacctgatggctccctgctcgccctcactaacgccgcctggatctgggtgccgttactggctgttgcgacgcttgccgcctggtttggtatgaacgatatcggcagttcaaaagcgtctgtcgcctcgcaattgccggtgctaaaacgtctgcacctgtggctgcttagcctgctgtacctggcgacattcgggtcattcatcggcttttccgcaggtttcgccatgctcgccaaaacgcaatttcccgacgtaaacattctgcaactggcgttctttggcccctttatcggcgcgctggcgcgatcggcaggcggcgtgatctccgataaattcggcggcgttcgcgtcacgctcattaattttatctttatggcgctgtttaccgccctgctattcctcacgctgccaggctccggcgcaggcagctttagcgcgttctatcttgtttttatgggcctgtttttgacagcgggtctcggcagcggttctaccttccagatgattgcggtgatcttccggcagatcacgctctacaacgtcaaactgcgcggcgggagcgatgagcaggcgcagcgcgaagcggtgacggataccgccgccgcgctcggttttatctccgctattggcgctgtgggcggcttctttattccaaaagcgtttggcacctctttggccttgaccggctcgccggtgggcgccatgaaaatctttttgctgttttacatcgcttgcgtcctgctgacctggctggtctacgggcgtcttaagcctaaacaacaataa

SEQ ID NO: 376850 - DNA, 1785 bp, Salmonella enterica
atgagttcaaaaattttttgcaaaagctggggggctgaatatatcgccgctgatgtcgtccgctttcgtctttgggccaccggtcagcaaaaggttatgctcaggcttgcgggtaaagaccaggaaatgcaggcgagcggtgacggctggtttacgctggatgtatccggggtgacgccaggtacggagtataactttgtactcagcgatggcatggtgctccccgatccggcttcccgcgcccaaaaaactgacgtcaatggtccgtcatatgtgattgatccaggcagctacgcgtggcgcaacaccgggtggaaaggcagccgttgggagcaggccgtggtgtacgagatgcatacaggcacgttcactccggaaggcaccttccacaccgcaatagcgaagctgccttatctcgctgaactcggcgttaccgttattgaagtgatgcccgttgcgcaatttggcggcgagcgcggctggggctatgacggcgtactgctttacgcgccgcattctgcctatgggacgccggatgatttcaaagcgtttattgacaccgcgcatgggtatggtctttccgtcatcctggatattgtgctgaaccatttcggcccggagggaaattatttaccgctattggcgccggcgtttttccacaaagagcgcatgacgccgtggggaaatggtatcgcctatgatgtcgacgccgtgcggcgctatatcatcgaggcgccgttatactggctgacagaataccatctcgacggcttacgctttgacgctatcgatcagattgaggacagtagcgccaggcatgtgctggttgaaatcgcacaacgtattcgggaagacattaccgacagacccattcatctgactaccgaagatagccgcaatattatttctctgcatccccgtgatcaggatggcaatgcgccgctgtttaccgccgaatggaatgacgattttcataatgccgtccacgtttttgcgaccggagagacccaggcctactacaacgattttgctgatgccccggaaaaacacctcgcaagagcgctggccgaaggattcgcttatcagggggaaatctcaccgcaaaccggcgaacctcgcggcgtaaaaagtaccggacaacccccggtcgcctttgtggattttattcagaaccacgatcaggtcggtaaccgcgcccagggcgacagactgataaccctggcgggtgctgaacgaacaaaagtattgctcgccacgttgctgctttcaccgcatattcctctgctttttatgggcgaagagtatggcgaaagccgtccttttcttttttttaccgatttccatggggatttagcccgcgccgttcgtgaaggtcgcgcaaaagagtttgccgatcatgcaggggaaaatgttccggacccgaatgcgccagagacctttcaacgctcaaaacttaactggaagcaacagcacagtgaagagggtaaagcgtggctggcatttacccgcgaactactgcttttgcgccagaagcatatcgtgccgctgttgtccgctgcccgtgagagctcaggaacggtattgcaaaccgcgcccgggtttattgccgttagctggcgttttccgggaggaacactgtcactggcgctgaatattagcgccacgacggtattgctgcccgatttaccgggtaagactctcttcgcctggccgaatgaatccaccgggtcgctttcccaacattctcttattgtccgcttagcccagggagagtctgcatcatga

SEQ ID NO: 376851 - DNA, 534 bp, Salmonella enterica
atggcatatccttatcagactcagggttttacgctggacaatagcggacggcgaattgtggtcgatccggttactcgcatcgaagagcatatgcgctgcgaagtgaatattgacagtaataatgtcattactaacgccgtgtcgaccggcaccatgtggcgcggcctggaggttatcctgaaaggtcgcgatccgcgagacgcctgggcatttgttgagcgcatttgcggcgtctgcaccggtacacacgcgctgacctcaatccgtgccgtagaaaatgcgctgggaatcgcgactccggacaacgcaaactgtatccgtaatatgatgcaggctacgctacacgttcacgatcacctggtgcatttttatcatctgcatgcgctggactgggtcgatgtagttgccgccctgaaagccgacccgcatcagacctccgccatcgcgcaaagcctttccgcatggccgctatcctcgccgggatatttccgcgatttgcaaaatcgactgaagcggtttatcgagtccggttaa

SEQ ID NO: 376852 - DNA, 771 bp, Salmonella enterica
gtgcaaagattgaccgtctattctcacccgctatggattacctggcaggaggcgccgatcggtcgtttgttacagggcgcaacgccggtatacgcaaaaacgcttatttcacgtttgtttacgttgtgcgctcaggcgcacaacgcagcggcggctttactgttgtttcctgaagagaagccagatatgcaggccgcacaacaagagttggcgcgagaaacgctccgtcgcgcgttgaccgactggctccccctgtttagccaccgacaggcaaccgctgaagaatgggcgttgttacgtcgcggagagttatccccgctggcaagcacaatcttttttgacgatgatcctcagacctggcttgccgctggcgtaaagggctgggaagcctggtttttgcaagagcgttctgaaaccgcccgctggctggcggcagtacagaatatcattacacctacactaccgatggcgtcgtccccggaccatacgttaataacccatggtcccctggatgtctcgcctctggctatcgaatatccgctgctgtcagcctgttgtcttagcggaaaaacgactgcgctacgtctgctggcccgctgcattacgctcgcccgaagtttgagcgcccttcctaccctacgctggaatcgttttgatgatggcgagtggaaaatagcagtagtggaaaccgcgcgaggatggttagttcatcaggccagactgacgacgtcaggtaatattaccaaattcaggcagtacgtcagtccatga

SEQ ID NO: 376853 - DNA, 3885 bp, Salmonella enterica
atgacgcagcgtttaccgttagtcgccgcccagccggggatctggatggcggaaaaactctctgatttaccctccgcctggagcgtggcgcactatgtggaactgaatggcgagctggatgcccccttgctggcaaaagcggtagcggtagggatgcaacaggcggatacgctacggatgcgttttaccgaagagaacggcgaggtctggcaatggatagatcctgagcacaccttcggcgaacccccgattgccgatttacgcgaccagcccgatccgcatctcgcggcgctggcgttaatgcaggcggatttacggcaaaacctgcgcgcagatagcggtaagccgctggcgtttcaccagttaatccgcattgatgatacccgctggtattggtatcagcgctatcaccatttgctggtggatggctttagcttcccggcgataactcgccagattgcggcgatttatcgcgcctggcagagcgacgcccctacgccggagtcgccttttaccccctttgtggatgtggttgaggaatatcagcgctatcgccagagcgaggcctggcagcgtgacggcgccttctgggcgcagcagcgccgcgagctgccgccgccggcgtcaatgtctgccgcgccgttgccggggcggtcggcgagcgcggatattctgcgtatgaaattgagcgcgccggcgggggcgtttcgccaactggcggcgcacatgcctgagataccgcgagcggatcttgccctggcgctggtgacgttgtggctgggacgattatgtgggcgtatggattatgccgccggatttatctttatgcggcggatgggctcagcggcgttaacggcgaccgggcctgtccttaacgtgttgccgctggcggttaaccttcatgcgacggaagatctgccaacgctggcgaagcgtcttgcggcgcagttaaagaagatgcgccgccaccagcgttacgacgccgaacagattgtacgcgatagcgggcgagccgcaggggaaacgccgctatttggcccggtgctcaacataaaagtatttgattatcatctggattttcctggcatacaggcgcaaacccataccctggcgacggggccggttaacgatcttgaactggcgctttttccggatgaaaacggcggtctggatattgaattgctggcgaatgcgcagcgttacgatgacgccacgctttcccgccatgccttacggttgatggcgcttatcacgcagtttgctgataacccggcgctgcgctgcggcgatgcgcaaatgctgctggcggaagaacaaacgcaattaacacaccttaataatacggcggtaacgattcccgccgccacgcttagcgatttggtggcgcagcaggcgcaaaaaacgccagaggcttccgcgttggcagatgcgcattatcactttacctaccgtgaaatgcgcgaacaggttgtggcgctggcatacgcgctgcgggaacgcggcgttcagcctggcgatagcgtggcggtggcgttgccgcggtcggtttttctgaccttagcgctgcacggcattgtcgaagcgggcgccgcctggctgccgctggataccggttatcctgacgatcggctgcgaatgatgctggaagatgcgcagccgaaactgttaattacgactcaggcgcagctggcgcgctttcacgatattccggggatggaatatttgtgttatagccaaccgctaccggtcagtgacgccactccgctggggctgtcgctaccgcatcataccgcttacatcattttcacctctggttcgacgggcaggccgaaaggggtgatggtgggacaaacggcgatagtcaaccggctgctgtggatgcaggatcactatccgttgacggcggatgatgtagtagcgcaaaaaacaccgtgcagttttgacgtctcagtatgggagtttttctggccgtttatcgccggggcgaaactggtgatggctgaaccggaagcgcaccgcgatccgctcgcgatgcagcggttctttgcgcaatacggcgtcacgaccacccattttgtgccgtcgatgctggcggcctttattgcctcgctcacgccagcgtcggctgggaaaagctgcgcttccttaaagcgcgttttctgtagcggcgaggccctgccgacggcgctgtgccgcgaatgggagacgttaaccaacgcgccgctacacaatctgtacgggccaacggaggccgcggtggatgtgagctggtatccggcctgtggcgatgagctggcggctgttgacggcaacagtatcccgattggttatcccgtctggaataccggtttacgtattctcgatgcgcatatgcagccggtgccgccgggcgtggctggcgatctctatcttaccggtatccaactggcgcagggctatctggggcgtccggatcttaccgccagccgttttatcgccgatccttttgcgccaggtgaacggatgtaccgtaccggagatgtggcgcgctggctggattccggcgtggtggagtacctgggacgcagcgatgatcagctcaaaattcgggggcaacgtattgaactgggtgagattgaccgcgtcatgcaaacgctgccggatgttgaacaggcggtagcacatgcctgcgtctttaatcaggcggcggcgacgggcggggatgcccggcaactggtcggctatctggtgtcgcactccggtttaccgctggatttaccggcgctgcaggataaattacgccaaaaacttcccgcgcatatggtgccggttgtgctgttgcaacttgccagcttgccgcttagcgctaatggcaagctggatcgcaaagccctgccgctgccggatctgacgccgcgcgtgaaagggcgtgcgccgcagtccgcaacggagattgctgtcgccgcggcgttttcccgcctgctgggctgtgagattaacgacgttgaaagtgatttctttgcgctgggcggacactcgctgctggcgatgaaactggccgcgcagctaagccagacgtttaaccgccaggtgacgccggggcaggtgatggtggcgtctgacgtggcgcagttgagtaagctgctcgatactgacgatgacgaacgctcgcgcaatctggggttcgggccgctgttgccgctgcgtgaaagcgatggtccaacgttattttgtttccatccggcgtcggggttcgcctggcaatttagcgtattatcacgctatctcagcccgtcgtggtcgattatggggattcagtcgccgcgccccgttggccctatgcaaatcgcaaccacccttgatgaggtatgtgaacatcatctggcgacattgctcgcccggcagccgcatggcccttattatttattaggctattcgctgggcgggacgctggcgcaagggatcgccgcccggttgcgcgcgcgcggtgaaacggtggcgtttttggggttactggacacctggccgccggaaacacaaaactggcggggaaaagaggcgaatggcctcaatccggacgtattggcggaaattgaacgcgaacgcgcagcgtttgtcgccgcgcagcagggaaatgcctccgacgccttatttaccgccattgaaggcaattatgcggatgccgtccgtttgctgacgacggcgcatagcgcaccgtttgatggacatgccacgctctttgtggcggataaaacggtgccggaagacgtatcgcctgaacagagctggtcgccgtggatagcgtctttggctatttatcgccagccgtgcgcgcatgtagatattatttctccctccgcttttgaaactatcgggcccatcatcagcgaacttattaataaataa

SEQ ID NO: 376854 - DNA, 237 bp, Salmonella enterica
atgccatctcttaatgtaaaacaagagaaaaatcagtcatttgcaggttactcactgccgcccgccaacagtcatgaaatcgatttgtttagccttatagaggtgttatggcaggcgaaacgtcgtattcttgctaccgttttcgcctttgcgtgcgtggggttgcttctgtcctttctgctgccgcaaaaatggaccagccaggcgattgtcacaccggcggagtcggtacagtag

SEQ ID NO: 376855 - DNA, 903 bp, Salmonella enterica
atggctaacctttacgaccttaaaaaatttgatcttaacctgttggttatatttgaatgtatttatcaacatttaagcattagcaaagcagcggaaacactctatattacaccttctgccgtcagtcagtcattgcaacgcctgcgcacgcaattcaatgatcctctatttattcgctcaggcaaaggaattacgcctaccgtaacaggcattaatttacattatcatttagaaaataaccttaacagcctggaacaaactattaatataatgaatcagtccagtctgaagaaaaaatttattatctacagcccacagctgttgatcacccaatatgcgatgaaattagttaaatatatccgcaaagatccacaggttgaaattgaacatcacgacattttgaccactgacgaactgcctgaagatctgcttgcctaccgcaaagcagatgttgtggtttcaatggccccacttaataatcgttctattgtttgtactcactttaataggctagaatgtatcctggtttgcagtgaaaatcatccccgactaggcgacaccgccactatcgatgaaattctacaagagtcatttacgcaactcgtctcccgggcaaccggtatgaaagagtatcattcacttatagatgatgtgctgggggagagaataattggtttaagaagcaaatcggtgatgactatcgccaactccatcagctccacggagcttattggttttttaccacaaacatttgttgactattactcttcctctatcaaacttaaaaaagtcgccacaccttttaccattgctcctatacaattctatcttatgtacaatagagcttcgctgaataatagcggatttgctgagctcattgagtacatcacaaaaaagcgttaa

SEQ ID NO: 376856 - DNA, 747 bp, Salmonella enterica
atgattaaacgtacattgctgcttgctatgctgcccattctcgcccacgcggaagaactgcctgcgctggttaaagccattgaaaaacagagcataacaatcctgaaatccttcgaggcgccggggggcatgaagggctatctcggaaagtatcaggatatgggcgtcacgatttacctgacgccggacggtaaacacgcgatttccggctatatgtataatgaaaaaggtgaaaatcttagcaacgccctgatagaaaaagagatctatgcgccagccggacgtgaaatgtggcagaaaatggaaaaagcgtcatggatactcgacggtaaaaaagacgcgccggtggtgctgtatgtctttgccgatcctttctgcccctattgtaagcagttttggcaacaagctcgtccgtgggtcgaatccggcaaggtacaattacgcacattactggtcggcgtgattaaaccggaaagcccggccacagccgcagcgattttagccgcgaaaaacccggcgaaaacctggcatgactatgaagcctccgcaggaaagatgaagctggaggttcctgcgtccatccccccggcgcagatgaaagtcattaatcagaatcagcagttaatggacgatcttggcgctaacgcgacgccagcaatttattacatgaataaagataagattttgcaacaggttgttggtttaccggaaaaagcgcaactggacgccatgatggggcagccttaa

SEQ ID NO: 376857 - DNA, 156 bp, Salmonella enterica
atgactacccgcgaaatcatcgccaccttcaaagagatgtacgacgctgatgtgtcgcccatgctgatacttaagatcaccgccgcagtaaaagagttggtcaaaggggcgtcaaaaaatggagtatgccgatccaggactggtcgctggcaatga

SEQ ID NO: 376858 - DNA, 1203 bp, Salmonella enterica
atgaaaattacgtctattgaagtttttgactgtgaattaaaaaaaagagatcaaacgatgtcatcctataatccagtacttatccgggtgaataccgactcaggattaagtggtattggcgaagtaggactggcctatggcgcaggcgctaaagctggcgtagggatcatcagagatctggcgtcattgattgtgggtgaagatccattaaatatcgaaaaaatttgggagttctttttcagaaagactttttggggaatgggaggcgggaacgttttttatgccggaatgagcgctattgatattgctctttgggatatcaaaggtaaatatttaggtgtacctgtttatcagctccttggcgggaaaactaatgaaaaattaagaacctatgctagtcagttacaatttggttggggggataaacgccagatattagtgacacctgaggaatatgctgaggcggcgcgtgcggctcttgacgatggatatgatgcgattaaagtggatccactcgaaatcgatcgtaatggcgatgactgtgtttttcagaatagaaatcgtaactattcaggattgttactggccgatcaattaaaaatgggggaagcgcgaattgccgctatgcgtgaagcaatgggggatgatgctgatattatcgtagaaatccattctcttctcggtacaaactcagctattcaatttgcgaaggcgatagaaaagtatcgtatctttctttatgaagaaccgagccatccattaaattctgataatatgcagaaagtttcccgttcaacaacgattccaatcgccactggcgagcgttcctacacaagatggggatacagggaattactggagaaacagtctattgccgtagcgcaacctgatttgtgtctctgcggcggaattaccgaaggaaagaaaatctgtgactatgctaatatttatgacaccactgtacaggtgcatgtttgcggcggtcctgtttccacggtagccgcgctgcatatggaaacggcaattcccaactttattattcatgaacatcataccaatgcgatgaaagcatctattcgggaactttgtacccacgattatcagccggaaaatggctattatgtcgcgccggaacagcccggattgggtcaggaattaaacgatgaggtagtgaaagaatacctggcctatgtgattaaatag

SEQ ID NO: 376859 - DNA, 1266 bp, Salmonella enterica
atgaagctcaacgccagacaggtcgagaccgcaaagccaaaagacaaaacctacaaaatggccgatggcggcggtttgtaccttgaggtttcggccaagggatccaaatactggcgcatgaaatacagacgcccctctgacaaaaaagaggatcgcctcgcttttggtgtttggcctactgtgacacttgctcaggcaagagcaaagcgcgatgaagccaaaaagttgctagtgcagggcattgatccaaaaaccgaacagaaagaggctcaggccgagaactcgggggcgtatactttcgaaactatcgctcgtgaatggcatgccagtaacaagcgctggagcgaagaccatcgatcgcgcgttcttcgctatcttgaactttatattttccctcatatcggttcgtccgacattcgccagctcaaaaccagtcacctgttagccccgatcaaaaaagttgatgccagtggtaaacacgacgtcgctcagcgcctgcaacagcgcgtcacggctattatgcgttatgccgtacagaacgattacatcgactctaatccagccagtgacatggccggtgcgttatcgactaccaaagcacgacactatccagccttaccttctagccgtttccctgagtttcttgctcgccttgctgcatatcgtggccgtgtaatgacacggattgctgtcgagctttccttactaacttttgtacgttccagcgagttacgtttcgcgcgttgggacgagttcgacttcgataaatccctttggcgcgtaccggcaaaacgagaagaaattaagggtgtgcgttattcgtaccgtggcatgaagatgaaagaggagcatatcgttcctctcagtcggcaggcgatggttttgttagagcagctcaagcagattagtggtgataaagagctgttgtttccgggggatcacgacgcaactaaggttatgagcgaaaacacggtaaatagcgcattgcgtgcgatgggttatgacacaaaaaccgaggtctgcgggcatgggtttcggacgatggcgcgtggtgctttgggtgagtcaggattatggagcgatgacgcgatagagcgtcagttaagccattctgagcgtaacaatgtgcgtgctgcctatattcacacttcagagcatttggatgagcgtcgtttgatggtgcagtggtgggctgattatctcgatattattcagtatgagcatattacaccttatgaatatgcaagagtctgcaacataaaatga

SEQ ID NO: 376860 - DNA, 1077 bp, Salmonella enterica
atgattgaagtcggaagaatcattgcagaacgctataagattttatcttatgttggtaaaggtgggatgcaagacgtatataaagttttagatctaaagctggatttagatttagctttaaagactccacttcctggtttggaaagcaaaagatttcttaaaagtgccaaaatcgctgcaaaaataaaccatcacaatatagcaaaaacctttgattatgttgaagataatggcaatatatttttagcggaagaatttgttgaaggtgaaaaccttgaggaaaaattgcgccactttgattttttagacccacattatggcgcttgtatactacataaccttgctaaaggaataatggcatctcataaagcagatgttattcatagagatttaaaaccgagtaatgtaatggtgtctggcggagtacaaatttcgaatctaaaaattacagattttggaatagctacgctaacacaagaactttttgatgaagctgctgccagtggtgacctaacaagatcgacctctggtacgataaaaggtgctttacccttcatgtctcctgaattaatgtttggtaaaaagggtaaacctatagaagcatcaactgatatttggccattaggtgcaatgatgtttaaattattaacaggagactatccatttggcgtttatttagatgctgctgttaatgttaaaacaaaaaatagaatggaatggccaacctttatgactgccaatccacaatatcaaagtttatcacaagatctacaaaaaattgtagataagtgcttaagttatgactcggacaagaggcctacagctgaaacgcttgttaaggcatgtgaaaccctttgttatttatccgaagaacgtcatgtcggtcgcgtcaataatcttattcaaggagggataagtggatttattgatgggacaccttctaactccttttttagtatggaaagtgtatacggttcgaggtacccaaacacctcaacaagaaatactgtttgttattccacttttgatggacacccatggcctagagcacaccctgtaattctttggaaagattga

SEQ ID NO: 376861 - DNA, 1059 bp, Salmonella enterica
atgaagattaatcacgtcctaccagaaagatattcattaaagagcactgaactcggtggtggcatgggggacattttaatatgtaaggataatcatttagatagagatgtaattgtaaagttgttaaaggatggagaagaagagagacgtttactagatgaacagaaagcgctactcaaacttcgttctaaacatgtagtacaactttatgatttaattgacataacagtctccgaaaaaactaaaaaaggattagttctggagtatattaacggagtggatttaaattataacccgtcagaaagtcaccccgaaaaactaaagaaattatggcagatagcatgcgggttaagtgacatccactctgctaaagtaattcacagagatataaagcccaataatattagagtagacgagaataaaattgttaaaatattagattttggtttagcaaggacctcaggcacagaagcattcactcattctgttattggaaccttaggatatatggctcctgaactatggaagagaaaaaacattagtttcgatcaaaaaattgatgtttatgcatatggtgtcctcgttttagatttattcggcatagaaaaaccagatgaattatacgaacatcccccggccgcgataaccaatatacctgaattaggaaagatacttccaaaggacttagccagaactttcattagttgcttaagccatgacaaatatgctcgaccggcaatgtcttcggttagagatcaaatagctaaatacctattaaaagatagacaccgtgccctcttcgtcctgaatggaaagaaatatgaaataaatgctaaaaataaaagtgttacgatcacttggggtactagtggaagtatggaaatagtatatgatggtttcgactttaaagtaggtaatttttcaggaagtgcgacaattaataaccaacaagtgataacaaataaagtatttcctagctgcagtgtaattactcttataaatgaaaaatctagaagctttgtcacctttgatatatctagaccggaggtaatatcatga

SEQ ID NO: 376862 - DNA, 1164 bp, Salmonella enterica
atgtttacagaacgacttgctcgctggttagctcgttcttcggccaaaagcggcattaaccggccagaagacctcaacgctgtccttagcacggatataggactggttagagctgagaatcaggatctaatagccgcgattagagttaacactccgtcaaacgttggcaatcctttttttgcaatggcgttattagatggcatgggtggaatgcaagatggaaagcaatgcgcaacaattgctttatcaactttattctattctttgattaagtttagaagtgatcctcccgagtctcggttattaaaagcgactttagaagcaaactccgttgtatatgactatgcaaaaggacatggcggttcaacattatccgctgtaattattgaaaatgggtctgctcctgtaattgtcaacgttggcgacagtcgaatatatagcttttctctggactgtggacttacagcaattagcagtgatgactctctagaagcattgggtggcagagggcgcggattactccagtttataggaatgggggaatctataaagcctcatatcaatatcttagataaaaatcataaaaatataatattgacatccgatggaactcatttcatttctcattcagcattcgaagagttattaagtcattcatctgatttttctacatcagcgcagagaatagctcaatatgttcaatggtgcggtgcgaaagataacgcttcatttggaattattaattgcaatgatatagaaaacagcctcaactcccataaagatattggtgtagagttatgggaccctcatgggaatctacatatcatgtggatgaaaaattatcctgcagcgcagaattacttctctcaaaatatagtggatgatcaagataaagaaccttcacctattatagacgatgatggttttgaaaataaaaaaacactaaacaatccttcaacaaaaaatctagaattagattctgaaacaccacaaagagagctattctcaaacgaatccccagaaaaatctcaagatccatccattacaagcaaagcaatcaaacaaagaaaaaacaaagataaaaagaaagctattgaaaagatcaaaaaagaccaatctgtaatgataaatatcaaggatgaggaaaacaaaaatgaagattaa

SEQ ID NO: 376863 - DNA, 267 bp, Salmonella enterica
atgcaggtgcatgaacgtcctcaggccgcaccagcactggtgttgcgtgggataaaaaatacggggatttgcatgcaaaaccatgcaccttatggatgcatggcttttttcaggaaaaatagcggaattttcgggggattttttcgcgtactaccgtgtggccagttctgcacgtcggcgggtgtaaatcaggttctgtgccggagtgaatttctcgcgattatcatcccgcgaagccgcatcaggcctgaatccgatggtcgttaa

SEQ ID NO: 376864 - DNA, 567 bp, Salmonella enterica
gtgaccactgtgaccatacagcaggcctttgaggcctgtcagacgaacaaaaatacctggctgaaacgtaaagccgaactggcagaccttgaacgggaataccgtgaacagctccttgccggtgacgaacaaatcccgcgcagaatgcaggatttgcgcgacaatatcgacgtgaaaaagtgggagattaatcaggccgccggtcgctatatccgctcacatgaggaggtacagcacatcagcatccgcaaccggctccatgactttatgcagcagcacggcgcggagctggccgccacgctggcgcctgagctgatgggatatcacgaacaaattcccgcagtaaaacagagcgccatgcagcactcggttgattatctgcgtgaagccctgtcggtgtggctggccgcaggtgaaaaaattaattattccgtgcaggacaacgatatgttaacgaccatcggattcaggcctgatgcggcttcgcgggatgataatcgcgagaaattcactccggcacagaacctgatttacacccgccgacgtgcagaactggccacacggtag

SEQ ID NO: 376865 - DNA, 240 bp, Salmonella enterica
atgtttcactgtccgttctgcaaaaagaccgcgcacgtccgtaccagccggtatctgtcggaaaacgtcaaacagcgttatcaccagtgtaccaatatcgaatgttcggccactttccgcaccattgagtcggttgacggtgtgatacgtgctgcaccggagaaacccgaccccgcgccggtgacgccaccgccgccgcgtaaagtacagggctgctacagctcgccgtttcggcattaa

SEQ ID NO: 376866 - DNA, 744 bp, Salmonella enterica
atgaaacccgaactcattatcaaatccatgcagaccgttatcagtaaacaggatgaaggcgcggaacaacgcattgccggtgcgctggtcgcacttaacgaagcaaaagacgcacacacggccagcatgggtaaactcagcgacattgaggcttccattcagcgttgtgagcaggaacgacagaccgccctcagtgaaagtgcacaggccgaacaggactggcgcagccgctttcgaactctgcgcggcaacctcactcctgaactgaaagctgaacacagtaaacgtatcgccagccgcgaactggctgatgagttcaccggtctgattaccgagctggagaaagacaaaagcctcgccatgcttggtgcatgctcctccggtacggcttatatcagcgcccatgaaaaagcgttcactacctacgccaacagcgagtggaagaaggcgttagccggtatcagccccgcactgttacgtgcctttctgttgcgtattcggtcgctggaaatgagcggagaaacctcgctgcgtgcgaccgtgacccgtgagctgggtgatgccctgaatatgcagtcagccctgtatcattttgatatggagcaggagccggttctgtccgtaacgggcatgaatcgcccggtcataaccggggttgatatggcgctgttaagaagcccggccagacggatgaagcttgccgctgaactggccgcaaaagaccacgaacaggcagagggctga

SEQ ID NO: 376867 - DNA, 195 bp, Salmonella enterica; identical to SEQ ID NO: 372955

SEQ ID NO: 376868 - DNA, 159 bp, Salmonella enterica
atggctctcaccgatatcaaagttaggactaccaagccctccgacaaacccttcaaactcacagatgggcagggtatgcacctgctgatcaaccccaatggttcaaaatactggcaactccaataccgtttcgggggtaaactgatcctacccgcgtaa

SEQ ID NO: 376869 - DNA, 360 bp, Salmonella enterica
gtgaagctttcgcccgcagcgcctgccggcgcaggctggccgctacggtatacacccgtccctgagcacgaagctcatccgtcaggcgtggcgcaccatagcgctgtttgcgtcactgaatgcctcccgggcgacgttatcacagacaaggcggaactgctgacgctggtttatctgatgacgacgctgatgccagacgtaccagccactacgggcaacctgaagtacacggcacatggctttgatactgaactcagcctgatgtttttcgatgaagacatacttcatttcaggcgtttcgcgaagtatgtcgcgaccttctggagaatagtcagttcctcatcccgttctgccagttga

SEQ ID NO: 376870 - DNA, 2511 bp, Salmonella enterica
atgaagaaaaccacaattactctatttgttttaaccagtgtatttcactctggaaatgttttctccagacaatataatttcgactatggaagtttgagtcttcctcccggtgagaatgcatcttttctaagtgttgaaacgcttcctggtaattatgttgttgatgtatatttgaataatcagttaaaagaaactactgagttgtatttcaaatcaatgactcagactctagaaccatgcttaacaaaagaaaaacttataaagtatgggatcgccatccaggagcttcatgggttgcagtttgataatgaacaatgcgttctcttagagcattctcctcttaaatatacttataacgcggctaaccaaagtttgcttttaaatgcaccatctaaaattctatctccaatagacagtgaaattgctgatgaaaatatctgggatgatggcattaacgcttttcttttaaattacagagctaattatttgcattctaaggttggaggagaagattcatactttggtcaaattcaacttggttttaattttggtccctggcggctaaggaatctatcatcttggcaaaacttgtcaagcgaaaaaaaatttgaatcagcatatatttatgctgagcgaggtttaaaaaaaataaagagcaaactaacagttggggacaaatataccagtgcagatttattcgatagcgtaccatttagaggcttttctttaaataaagatgaaagtatgatacctttctcacagagaacatattatccaacaatacgtggtattgcgaaaaccaatgcgactgtagaagtaagacaaaatggatacttgatatattctacttcagtcccccccgggcaattcgagataggtagagaacaaattgctgatcttggtgttggtgttggtgttggtgttggtgttggtgttggtgttggtgttggtgttggtgttggtgttggtgttggtgttggggttcttgatgttagcatttatgaaaaaaatgggcaggtccaaaactatacagtgccatattcaactcctgtattatctttgcctgatggatattctaaatatagtgtaactattggtagatacagggaggttaacaatgattatatcgatcctgttttttttgaagggacttatatatatggtctgccttatgggtttactttatttggtggagtgcaatgggcaaatatttataattcatacgccataggcgcaagtaaagatattggtgagtatggtgctctgtcttttgactggaaaacatctgtttcgaagactgatacatccaatgaaaatggtcatgcatatgggattagatacaataaaaatatcgctcagacaaacaccgaagtatctttggctagtcattactattattcgaaaaattatagaactttttctgaagcaattcatagtagcgagcatgatgaattttacgataaaaataagaaatcaacaacctctatgttattaagtcaggcattaggatctctgggttctgttaacttaagctacaattatgataaatattggaaacatgaaggtaaaaaatcaataattgctagttatgggaagaatttaaatggtgtttcgttatcgctttcatatacgaaaagtacatcaaagattagtgaagaaaatgaagatttattcagttttctactcagtgtacctttgcaaaaacttacaaatcatgaaatgtatgctacatatcaaaactcatcctcttcaaagcatgatatgaatcatgatttaggtattactggtgtggcatttgatagccaattgacatggcaagcaagagggcaaatagaagataaatcgaaaaatcaaaaggctacatttttaaatgcttcttggcgaggtacttatggggagatcggagcaaactatagtcataatgaaataaatcgtgatattgggatgaatgtttctggtggggtgattgctcattcatcaggaattacgtttggtcagagtatatcggatactgctgcactggtcgaggctaaaggtgtaagtggggcaaaagttctgggcctaccaggtgttagaaccgattttagaggctatacaatatccagttatcttactccatatatgaataacttcatatctatagatccaacaacgttaccaataaatacggatattaggcaaactgatattcaagtagttcctaccgaaggtgctattgtaaaagctgtatataaaacaagcgtgggtactaatgcattaattagaattacaagaacaaatggaaagccactagctcttagcacagttctttcacttaagaataatgatggagtaatccaatcaacatctattgttggcgaagatggtcaggcatatgtatctggattgtcaggagtgcaaaaattaatcgcttcgtgggggaataagccctccgatacttgtacagttttttactctcttcccgataaaaacaaaggtcagattagctttttaaatggagtgtgcaaatga

SEQ ID NO: 376871 - DNA, 3846 bp, Salmonella enterica
ttggctatcaggggctggagaaggcaggctcacagtgttcctactcactggcaggctaaaggcttaacccttgatgactggcgcgattttctgaaggtgacgctggatttctatgtcagagaaagcaactacatccaactggatgacgatctaagaaactggatcggtagccgtttctcttccaaatttgtccgcaacccagattcgaaagagccagatgacaaccaggttaaacgctggccgcaaattcgccacggtaatgtgactcagcgcctggtcaagctgttgattttaggggccaaatttaacaccgtaaatacggtaactattgatattgttaacgcctggctgaaagaagcctggctccagctaacaggatctctggcggtattgaagcctgatggaaaccgtttttatttaccgaaagagcatctgacattctctctggtgcaaaaagcacgcatttgtccagtgaccaataaattactggcgacaaccttcaaaggtctgaccccctatttgcccatgcatatccagttcgagcgactgacgagtgcacagtacgacgcgtttttggctcaggaagtcacgctgccagcgatctgggaacacgatcgctctcaggatgattatgtcgacgggttaacaaaagtgcgtgactgggtaagccaggatccgcaagtgctaccattacgctcgcaaaacctctggacggacattaacgatcgcgtggtagaaggtggattttactaccgcaccgcagaacactcggcacagcaatcgtcggagcgcctgcaaagctacgaaagaatgtttaaaaacgggcagcttaacgtccttaactgctcaaccacgatggaaatgggtgtggatattggcggtatttctgcagtggtgatgaacaacgttcctccgcatccggccaactatttacagcgagccgggcgtgccgggcgtagtaaagagtcacgcgctatttcgtacaccttgtgcaaagggaacccgcacgatcagcaggtttttgctaatcccctctggccgtttgagacggtgatcccggctccaatggtggcaatgaactcagagcgtctggtgcagcgtcacgtcaattccctgttactgtcagaatacttatgccatgtggtcggtgaaaccgaaaaagagcgtaccagccttaatagccagtggttctttggcgaagagctcgaccagtcggtatgcaatcgttttaaagcctggctcgaacgtccgacgctgagcattgataacgcgctggagcgtctggttaaagggacggcattgcacggcgttacggcagaaaaactgcgggataaaacgcaggaggctattgccgtcttacagacacgctggctggggatcttccgcgatctcgtgaaacaggaaagtgaatcgcagcccaatacgccgtaccgcaggcgactggaactggagaaaaaacggcattgtggtgaatacctgttacgcgatctggcggcccgaactttcctacccggatatggcttcccaacggatgttgtcacttttgataacttcaccatggaagattatatccgcgagaaaacgcacaaaagccgtgataagaatgaccgggaggataacgtttcgcgttataaagggctgccttcgcgcaacctttccgttgcgatccgtgagtatgcgccgggcgcggagattatccttgatggtcgggtattccgctcggccggtgtttcgctgcactggcataaccttaacgccgatactaacgaagcccagcgtctggacagcgcctggcgttgccataaatgcggtactttaggctatgaggaaggtattggtggctcgggggatttattctgtaccaatagcgcgtgcggggagcggatcacgctggataaccgacgtcaggtattacagcccgccggttttgtcaccgatgcccatactcccgttacgaacaacattgaaacaatgaaattcatcccggtggtgcctgcctgggtgtttgtgaaagcagaacgcgtgccactgccaaacccgctgatgggttttatggcgtcaggcgcggatggtcatgttttccagcagagcatgggcgaaggtggacacggttatgcgctgtgcctgagctgcggccgggcggagtcaatgctcaatgccaccgatacgccgaaatcgatggaagcgcattatcctccgcgccccggtaaatctgatcgcgacagccagaatcagcggattatctgccctggctccacggcgctgaataagaatgtcacgctgggtgcgctggcgcgcaccgatgtgtttgaactcattttgcgccgtccgcaaaacggggagtatatccccgataattctgatgaaggccgtattgtggccatgacgctggcggttgcactacgtcgagcgctggccagcgtgctgggggtatcggcgacagaactgggctatgcggtgcgtccggtcagactggataatgagcaatcggtcctggcggtgcagctttacgacattatcagcggcggtgcggggtttgcttccagtgcgccattgcatattgaagcggtcctcaaagggatggtgaaacagctgggatgccgccactgtgataccgcctgtagcgaatgtctgctcgattcgcagacccgccacgatcacgatcagctggatcgtaaagccgcgcaggcctggctgggggaggatttcagtcactatatcggtttgccggaggcggaaaaattctccctggccgacgcgcagtattgcccaggcagcattgaggatgctatccgtcgtgccattaacgacggggcgcgcaaactcacgttgtggatgaatgggccgcttaacgagtgggatttgtatgcccgccagttccgaacggcgatccagaactatcggctgaaagatgaggttgaggttacgctggttgtgcccggtcatattgaagatccggagcttttacaggagattgcgcagtttgccgccattggtatgcagctttgccagtctgagctgaatacggatacgccggttgtcgcacaggtagcattcaacgatcgcctgatgatgttgatttctcgcagcccagaggccaccatccccggcccgaactggcatctgaatagccagatggttattcgcagccatgcgtttgagccgataacgcttagtaaagcagagctattatccgatgccgcaggtagcagaggcctggtcaacgatattgagatccataagcagcttaatggcccggtttctcaatttggtcagcgtttctggggcgtgttaaccggggcgcaggaagatattcagacgctgctgaaggaaaaccaggtgacgcgcattcactatagcgatcgttatctgcaaaacccggtggcgctggcgttattaggcgggctgttaaaaccgctgaaatcgatcctggcgcaggatgcgcaagtgacgattgatacgctgtttaagagtaaagagcggccaggcaacaagccgttccatgactggatgagtgaagcggattttcaggattttgccgaccagtggtttgcggcatctatgggcagagccgtcgtggttaacaccgttggctcgccgcgtgatattccacaccatcgtaaactgatggtgaccttcagtaatggtcaggcgctgaagatccgttttgaccaagggatgggatactggcgcatcgtctttgcgcgagcgtatcgcgattttgattttaacgatgatgtggctttccagctcgggaatatggcaaaagcctgcgttgaaggtcaggtggtcaacagcgaggaaagttgggcaaccgatgtgctggtgcaggtgatagtcccttaa

SEQ ID NO: 376872 - DNA, 2538 bp, Salmonella enterica
atgactacacgctatttttcttcgctgattgaacaatcactgtcgcgttctacggaggcgacgctgagtattatgggggtgaccaacccgaatcttcgcgagcatctcacgcaacaaatggcggccgattgcgggaaagaaggatcgtttcttgcctcccccgtatttgaacagacatttggctggaaagagtccaacagcacaatgaaagaccttgcaacaaaacaaacgttgctaagcaaggaggtggtggactcgctggatagtgaggaaaatggtcgttatcgttttggctctgactggaaacctttcacgcatcagttagccagctggcaatcattacttgagaaaaaacactcagtcgtggtgaccagcgggacaggctctggcaaaacggaatgctttatggtcccggtactggaagacctctatcgtgagcttcaggtcaagaacaaaaaaccgttgataggtgtgagagcactttttctttacccactgaatgccctgattaattcccagcgcgagcgtttagatgcgtggacccgtagttttggttccggaattcggtactgtctgtataacggtaacacagaagaattgcacgctttggtcaaaagtgagcaggcaaacaggcctaatgaggttttgtcacgagagaagatgcgtgaagaacccgcccccattttagtgaccaacggtaccatgctggaatacatgatggttcgtcaggttgatgcaccgattattcagaaatcaaaagctgaaaaatcattacgctggatagttctggatgaagcccatacctacgttggttctcaggccgctgagttggctctacagctccgtcgcgtcatgacggcatttggcgtcacgcctgatgatgttcgctttgtggcgacgtcggccaccattgccggaagtgatgctgaaaagcagctgaaaaaattcttgtctgagctgtcaggagtgccacaggaacgtattgatgttctgggcggaagccgcgttattcctgagctcgaaccctgcaaacaatattctctgtcactggatgagattgagcatatccctgattcggagagtgaagggatcagtccggagcgttatagtgcgttgacccactctccggaagcgcgctgtttacgcgaaatgctggttagccaaccccgaccaatgaaacttgatacgctgacccagcgtttgaacgagctgaccaaacatcagtacacgcagcaggatgttttacgctggatcgatctttgctctggcacactccctaatgcaaaggatcctgcatttctgaaagtcagagcacatattttccagcgaaacacccagggcatctggacatgtgtggataagaactgtgcagctaaaaaaaataccgcgctggaaaaaaactggtcttttggcaatgtgtatgtaaatcagcggcaaaactgcgagtgcggcagtcccgtttttgaactggcattctgcaatgagtgtaatgaaccgcatcttcttgcacgggataaaaaaggcaaactcgtacagtgggataataaaggtggagatgaattctccctacaggatgaaatttctgacgattttgaaacatccggagaaaagattcagaaggattttgtattccagtcgccacaaattattgctgcggaatgtaatacggaagctggctatattatgcagcggctcgatcgtcagacccgcagtatcggcgtggtgaacccggacagtattccgctggcaattaatgatatcgaacaaatctgtagtgccagcaattgtggctataaaggcggaaagggtaaacagcccttccgaagggcgttactgggcgggcctttttatgtcaccaatattgtgcctacggtgctggagtattgtcaggacttcactagtgatgaaggtaaagatggtgtcggcccgctctctttgcctggtcgaggtcgtcgcctgattacctttaccgacagtcgtcaggggacggcgcgaatggcagtacgtatgcagcaggaagcagagcgcagccgattacgtggtagcgtagtagaaattcttggctggcaccaacgaaaacagccaacgagtgctccgaatgaccaggctgacgtgatgaaactggttgcaagggtgacacaataccgtgaagaagcccgggagtatcgcgagtggggaatgcccgaggaagcaaaactttctgaagctcaggccgaacgccttgaacaggcaatccagacggcgacggggggaaaggctgcaaccattttagtttgccgaacctggacggaaatggtcaatgatctgaaagagaaagccgatatacagggaccaattttacaatataaccattatctgaagcctgaaattttcaccgaaaatggcggccctttgaaactcgccgaaatgctgcttttccgtgagtttatgcgacgcccgaaacgaaccaacagcctggaaacccaggggctggttcaggttggctatcaggggctggagaaggcaggctcacagtgttcctactcactggcaggctaa

SEQ ID NO: 376873 - DNA, 3300 bp, Salmonella enterica
ttgagtcagtccgaatacgcatccattctaaagtgtaccccatggctagctaaattcctcacccgcagaggattgaagcaaccagaccatcgtccgttatatgaataccacgcaacgagtgaagaatatgatgaattgaaacggctgctgcgagctataggggtacccgatggttataaaagtgataaagggtacgcagcctgtttcacattgttctgctcagagtggtatcgaagagattatgaaagagagtatggatgggcatgggagccaatttacaagacgataggtatctcagcatcttcctcgaaaatggggaaaattatccctaaaggcctggatggttactgggggcgtccagtgcggttttatgacacagaaaggcggaatttcttaggctccttattcagtgaaggcggtctacctttcaggttgctaaaggaatctaatagccgttttcagtcgatgttttctctcattctaaatcaatacgatcaggctaaatcttctaacatttccacgttcgcgttagtccatgcagcggtagaaaaatcatccctgccagtcgttttcaaagaggatacttcagttgagcttattagtcggatggctgaacagttagtatctcttgttcaaatttatgatttaagtaatcataccgaacccgtaaaagaacttgaacgtgttcatcctaagtggcgtgacagtttccctgtccctctcgatgatgatacgggtaccagtttccttaatggacttttacgaacagcttctactgaatcaaaaccccgccttcaaaagaataaaaccactctctgtcagtttttatggtcagaaaatcatcctgaagccctccaggcactcatttctctgcctgaagaactgagtttttcaattgatattgagccttcaacaacgcgcttcgagcttgctatctatgaagatggtaacgaaatcgcaagtctgggacctgcatatgcaacgctaagtaactcccaggcaaaaataaaagttcgtaagcgcgagattaaattttaccgaagaaatcccacggtcagtttgtttattgtggcgagagctgggggtatgtttttcggctccaatcttttagaaggcagtgaagttgcggttggcgatgttccattggtttttgtttctgataaaaatgaatggctgttacagggacaagcctcttgcagcgtacgtggcagccatgtacttattgtgctgccaaaggatggctgtctggcttcagaacatgaggattgtgactctggcttttcggctttgggatgccatgctctgaccatcaaaggtcgccaggatatcatcattaaaggcgatgaaacgtaccggataaagataggaagagatcagattatccatactggattctctttccaggggaagcgattaaattggacaagttatccggatgaactcttcctcggtgttcctggaattactcaacattctgagaatctatcaacgcgccattacaagcgttttttcaacggaacatttatagaaaattgtgatgtacaagaaaaaatgggagcacagtttatttcggtgcgtaacgaaaatgatgaaacgttactgcgtaagaaaattggcattctccccaatgattttagtctggaaataaaaaatggacaacaggcgaacgaaggttctgtcattattactactcagcacccttgtttgtatagcttgaaggaaaaaacacttgaagttggacggaagcggttgcccgatagtacagaaataatgatgaaggcggagggcattcctcctgcatcaatttcattacaaataacgccaaacctcactgcaaacccgattgttatttggttaccatttcctgcacgaggctgtcttgcgttcgataaagatgagaaacctctcccgaaaaatttaacgattaacgatcttctgggtgccagagcatatcttttcggaaaaaatggtgagcctacgcgataccagcttgaactacgtttacgttcgcgtagtggaatgcaggcctggtatgagtggcactacagtgcgggagaatgtccggtagagcttactttatatagcttaagggaacatattgataatttactctccctggaggaaggaattgatcaaacagttgatatgcgcataaaaggaggtggtagttcttttacctggcagatccgacgttataaatatagtctggactatgatcgtggcaggcagattcttctcgcaaactcaataagtaatcgtacaggccagatcccttcgcccgtcattatgttactcagcgaaccggagagaaaagttgtactgctgacgtcaagaatgagcgaaggtgtaccagttggtgaatttgaactaagttcgataatacaaaagaatggcccatggctggtgctgccgaaaccaggtgaagaagcctcatttcgaccttgctttattgcaggtgagccggtaattcaaagcgacgcgacagcaatacagtctttacaaaaagcaacgcagctttttaatcctcgttcagatgtcaacaccattatgttagttctggaacaaatggcgagcgacccggcacactcgggctggcagttcttacgcaatttatacgatcagttcgggtatttacctttggctacctttgaagtatggcgggcacttgttcagcatccacaagcgttggcgatgtcgctgttcaaatttgaaatgtccattgattatctcagccgtattgaaagtgagtttcccgttttctgggagtttttatccattacagaagttaaacgttccgccacacgttttcgtgcttttttgactcataaaggtgcaccggaggaaatgcagataaggttgctgtacagaatgtatcaacagctgggcacaacattcccgacttatgccagtgaggtgcaattatggttgagtcaagggaaattaccaccggtttttcctgagttgacgatgaaaggtattatccttgagtggtatcaggaacttctacgcgaacatggtgaatctcgctggccagaatttggtggcccaggccttttacgttggtatatgtcgcaacaaaatcctgttatcgatatttcccctgatgccagctaccgctattccgtcaccttgctccccgtatttgctgctgctgttgccagcggtaaaacaacatttgaaagtgtttttgagaataagcccggcgccgtatttttcttgagacaggttagagattttgactcacgatggtttaacgccattttccaatactgtctattgcgtaatgttactgaaaaataa

SEQ ID NO: 376874 - DNA, 195 bp, Salmonella enterica
atggagctgaataacgaataccaaaactacgaagacgaggacgacgaaagcgctgacgacctccctccatcccaccacccgcgctctttccagtccatcatcggttggctctacgacaaagcagtcagtggtatcgcaggcatcgaatccgctgaaatgcttgccgcccgttatcttgaggacgcgaaagggtga

SEQ ID NO: 376875 - DNA, 237 bp, Salmonella enterica
atgaataacaatgatatttatcgtcagtatatgtacagttatccgcataagacggcttatcgggagctggagaacgtcagctttagcaaagtaaaaccgcgcatttacgagcacgacacacatctgtatgttcatatgccgttttgtcaaagtcgctgcgggttctgtaatttatttacctgcactggcgcagataatacgttcattgatagctatatcgacgcgattattacctag

SEQ ID NO: 376876 - DNA, 246 bp, Salmonella enterica
gtgattacgctcattggcccccatcagagcaagcgcacgcattattttatgcaggctgccgccatacttggggaatccgtcacggcgctgactcatccgcaagcgctggacgcttcgctgacctctggcatcgttaaaatcgacccgccagtacacaatgaaactaacatccgcaaaataaacgcgatcggtctggactatatccattttttgcagaacatggcagcgcgtcctggcatcacctag

SEQ ID NO: 376877 - DNA, 420 bp, Salmonella enterica
atgaagcaacctggttttatacgtctggctacgttggccttactctccacactctctttcttctcccacggcgaaaccattttgcgcctggcctacgctgaaaatagccagccggtaaaagatgcgttgcacttcctggggcagcaagttgaagagaaaacgggcggcgatatcaaagtacagtacttcccggacggacagcttggcggcgagcgcgaactggtggagttgacgcaggtcggcgtcgtcgacatcactaaagtgtcgtccgggctgatggagagtttttcgcctgagtacggcgtgttctcacttccctacctgtttgccaccgtcgatgaatactaccgcgtaatggataacccacaggtgaggagcctgtttatcagtccaccgccgcacagggttttgtcggcgtag

SEQ ID NO: 376878 - DNA, 471 bp, Salmonella enterica
atgttatttacaaggaaagtcttacctgtattatgctgcctgtgtttgagcggcagcgttttggcctcaggcgttttagacccaaacaggccaatggtcgcatcagcagatgtcattccagtacatgaagggccattaggtatggtcgatgtcgccccctacggcggcgttttcccattaacagcaatcattaataaagccaatcataatgtacagaacgtgaaggttaccgttttagggaaaggggaaaaaggtatccctatcagttatgatgtcggcccgcaggctataaatacccatgacggcatacctgtatttggcttgtatccagattatgtcaataaggttaaagttgactggactgaagaaggtaaaaaaacaaacttatacgtggtccatttacgccgcaccggtatcattaccctctactaccgggcaaactgccgttcttcctacggtagaaccggttaa

SEQ ID NO: 376879 - DNA, 573 bp, Salmonella enterica
atgcaaattggctacattcgtgtgtcaacaaatgaccagaatacagatttacaacgaaacgcactgaactgcgcaggatgtgaactgatttttgaggataaaatcagcggaacaaagtcagcccgaccgggattgaaaaagctgctcagaacgttatcagaaggagatacgctcgttgtctggaagctggacaggctgggcagaagcatgaaacacctcatcactcttattgaggaactgcgggaaaaaggggttaacttccgtagtcttacagacagcattgatacgtcaacacccatgggacgtttcttttttcacgtcatgggggctttagcggaaatggagcgtgaattaatagttgaacgaacactggccggacttgaagcagcacgtgcacaggggcgtattggtggacgtcgtccgaaactgacaaaagagcaacatgaacaaatagcaaggctgatcaaaaatggctatagcaggaaacagttggcaattatttacgatatcggtatatcgacgatttatcgttatcaccctgtagaggaacttcaaactcaagctgagttgtaa

SEQ ID NO: 376880 - DNA, 1701 bp, Salmonella enterica
atgatcagtctcgtcccgcctctgctttccagaaccgcgcttctctttctgctcacggccacaggcgcagccaccgccgcccgcccggcagcggatattattttgcataacggtaatatcatcactctgaatgatgcccagccgcaggccagcgcgctggcgatttccggctcgcggattgtggcgattggcgatgatacggcgacaaatgaatggcgcggcgaccatacccgtaccatcgatttacagggtaaaaccgtgatacccggcctgaccgatacccatattcacgccattcgcggcggacaaacctggacattcgaaacctactggtacgacagcccttcgcttaaagacgcgctggataaattacgcgccgacgctaaccgtcgtccccacgatcaatgggtagccgtagtgggatcatggataccggcgcaatttgcagaaaaccgggcgtcgacggtagccgaactgagccacgcccttcccgatcatccggcttatattcagtatctttacgactatgcgttagtgaatcagcgcggtatagacgtacttggccttaacgacacccctcctcctgatttagcgggaatccgcgtagagcgcgacgcaaaaggtagcgccacggggaaattatttggtgacatcgccgcgtttaaccagctttttgccagcataagtagtaacgccgatcgcgagggcggtctgcgacaatttttcgctgatatgaacgctcgcggcgtgaccggcatcattgacccctctgccgggcctgccgccgcttatgagcctttatttgcaatgcgaaaccagggggatttaccgctgcgcgtggggtatcgcattccggtacagccggaagcgaaaggtcatgaagcgcagtggttcagcaacctgatggcctttcgcccggcgcgtgccgacgacgggcaactggcttttcttggcctgggggaaagcctggtggcaggaatgaatgacggcgtgcggatggccccagggttttcttcctcagagcaggacaaaaccgcgcttcgccaggtcgcgacgtttgcggcaaaacggggaataccgcttgagatccacgcctataccgatgacagcgccgacgcgatattgacgatttttgagcaggtagcgcagcagtacgatctgcgccctctccgctggtctattgcgcatctgaataccggttcgccacagacacttgagcgaatgcgtaagctgggtctggcatacactgtgcaaatggggccttactttgaggggcttgccatccgtgacgccaacccacccggtgcgacggacaattcgccgccggttcgactggcgctggataaagggcttgtcgtagctggcggcaccgattcgacgcgtattggcattgccggtgtctggcacgctatcgaatatcatatcaccggtatagcgtcaggcggttccgtgcgtaaacccgccagcgagcggctcacgcgtctggaagcgctagcgttatatacacgtcatgccgcctggctcgcctttgccgaacaacaccggggccagcttagcgtcggaaaacaggccgatctggcggtgctcaatcagccctttatgacgatgccggaagacagaattgataccattcgcgctgttttgacgcttgtcgatggacgcattgttcacgaaagtccggaccttaacgccggacaatga

SEQ ID NO: 376881 - DNA, 564 bp, Salmonella enterica
gtgtcaataaccacgcgggggttctcgctactggaggttgtgctggcgatggcgataggttccattttactgcttgggtccgcacgatttttaccggcgttacagcgtgagatctggcacaacacgcgacagttatcgctggaagatgaaatctggcagcgaacctataccgtagcgaagcatcttcaacgtgcgggttactgtcatggccactgtatcggcgaagggctacatcttgccgaacaggggcaatgcgtcatcgttcagtgggacgggaataataacggggtctgggataccataccggcgaaagaggccgaccagaccgggttccgtatgaaggataacgttctggagacattacgcggagcaacatcttgccagggtaagggatgggaaaaaatgaccgatcccaatacggtactcatcacggcgtttaacgttgagcgccgggatataacgggattctcgccagtgctcatgctgcatctgcgtggcgccagcaaagccgagcctcagacggttattgacgcgcaatatagcgtaacgggatttaatctgtga

SEQ ID NO: 376882 - DNA, 1119 bp, Salmonella enterica
atggaaataaaaaaaagcatcttggttagaaaaaatatacgcttgtcaggaatcatcattgacatgctcattttaaccatacttttaatcagcacgtttgatgctgtatctgactcttccccggtaaaagcaagcgctatcaatattgcacttcaaggaactcccaacacagattatgaattaaatggcgatctccgctctaacggagggataatgccaaagacgctttatatggtatgttcaggaggaaaattcagtgcaagccaggctgattgcgttgccggtcaatgggtagatatcgaagttgtaatatctgcggacagtcatacgttcatgaatttgacaaatatgggcaatttgagttcttctgcatttcaggaaaaaaggcgtgctcgctgtacagcgaaaaatagtaatacgatggattgtatttgggaaagtaacttcgacattaacttgtttttttcaccttctacaaacatctcctcaattgaaagacaatctctgactctccatatcgagcctacgaataatgcatcaccttctctacagcaaatcaatatcagcggcgacttaatctaccagccttctgactacgcagtgtataatcaaggatatactcctgacgtcttagcctacgttaatttttatgctaaatacaatatcgtccaatcaagctttggtacacagacaggcccggcgacgggcgccctgccgggacgcctcaatctgaacgggaacgtagcgaccacagtttctttatatcctgaacaacttgatgcctctttttcgaaaacagaattttccatcacatctgccagcaaagaatttacgggttctggtaataatgaactactggcagaaatctatctaaactatggactacagcattgccagccgcaaacggcagatagtatttgtggtcaaatattagctaacgcgaacgtttcaacatcgtgtggtgatcataatattactatcacaaccaatatgtgcaatacaggtaatgaccaatgtgatagtgatgaaacatggaaaattgcagagatcttcgggacatggggccgggttaatgtcgacactatatgcgctattacagtattgcttccctatgaataa

SEQ ID NO: 376883 - DNA, 492 bp, Salmonella enterica
atgttatgggcggtttgcaatacgctacctgctgccacgcctaatgtgcactacagcggtaagctggttgccggagcctgtaacctggtagtggataatgacacgatggcgacggtggattttcatactattggcagtgacaatttcgacgccagcgggcaaacgactcctgttccattcacacttagcctccaggattgcaaaacagcgctagccaacggcgtggtggtgacctttcagggtgttgaagacagtaccctgcccggactgctggcgctcgaatcgtcttctattgctaacggttttgctatagggattgagaccgcagatcagcacccgttaattatcaacgcttctcaaggtacggaatttatgttggcagagggaaataccattatcaatctccaggcatggctacaaaaaacatcaggggaaaatattatgcctggggaatttaacgccagcgcaatggttaattttgaataccaataa

SEQ ID NO: 376884 - DNA, 174 bp, Salmonella enterica
atgaaatcgataataaattgggatacgggtaattggccagtttttttgtctggattaggttatccccgctggcgcggggaacgctgcgctattaagactgcatctacggtttatcccataattttagggaacgtattaaagataacagataactataaaaaatacatagtctga

SEQ ID NO: 376885 - DNA, 1632 bp, Salmonella enterica
atgctaaggtatgatgagaggaagttgaataatttaacattgtcttcattttcaaaatctggcgtgtcgagtgatacccggctatatattgctaaggaaaatactgataaggcatatgttgcgcctgaaaaattttcgtcaaaagtattaacctggcttggaaaaatgcccttatttaaaaacactgaagtggtgcaaaaacacacggaaaatatcagagtacagaaccaaaagattttacagacatttctccaggcattaacggaaaaatatggggaaaaagcggtcaataatgctttgtacatgtccagtataaatatgaacaaaccccttacccaacgtttagtagtgcagatcacggagtgtgtaaaaggtgctgacggagggtttataaatcttattaagaacaaggataatgttggtgtcatgaatgccgctttagtcataaaaggcggcgatacaaaagtgacagaacaaaataacgatgttggtgcagaaagtaagcaacctttactcgatatcgcgctaaagggacttaagagaacaataccgcaactggaacaaatggatggaaatagcctgcgagaaaacttccaggagatggcttcaggtaacggcccgctgcgttcattaatgacgaatttacagagtttaaataaaattccagaggctaaacaacttaatgattatgttacaacgttaaaaaatattcagataggagcagacaggttctcacaatggggaacctgtgggggagaggttgagaggtggattgataaagcctctactcatgaattaacccaagcggtaaaaaaaattcacgttattgctaaagaactgaaaaacgttacagctgaacttgagaaaataaaagccggtgcgtcaatgccacagacgatgagcggaccgacactgggcctggcacggtttgcggtcagcagcattcccattaatcagcaaacccaggtgaaactgagcgatggaatgcctgtgccagtgaatacgttaacttttgacggtaagcctgtggcattagccggttcgtgcccaaaaaatacgccggatgcgctggaagcgcatatgaaaatgcttcttgaaaaagaatgttcgtgcctggtggtgttaacgtcggaagatcagatgcaggcaaaacaattaccagcctatttcagagggagctacacctttggcgaggtgcataccaacagccaaaaagtgagctcagccagtcagggaggagcgatagaccaatacaatatgcaactgtcctgcggggaaaagcggtatacaatcccggtattgcatgtgaaaaattggccagatcaccagccgttaccgtctactgatcagttagaatacctggcggatagggtgaaaaatagtaaccaaaatggcgcgccggggcgtagttcatcagataagcatttaccgatgattcattgtctgggcggagtgggaagaaccggaacgatggcggcggctcttgtacttaaggataatcctcatagtaatctggagcaggtacgtgcagatttccggaattcacggaacaatagaatgctggaagacgcctcacagtttgtacaactaaaagcaatgcaagcccagttgcttatgacgacggcaagctga

SEQ ID NO: 376886 - DNA, 174 bp, Salmonella enterica
atggaaaataataatcgttttatgccccatataaggcggacaacgcatattatgatgtttgcccaccgtaatagtttcgactttcatttctttaatgcccggtattttttctgctacgggtacttcagcatacaggtctttccgacccttatgtcattcaggtctattgcctaa

SEQ ID NO: 376887 - DNA, 414 bp, Salmonella enterica
atgtcagaattaaaaattgccgttagccgtcattgcccggattgtttttctacacaccgtaatattgtaaatgttgatgagagtcgtttcatcgacgtggctgcatccgtgttatccatcgacgacattgaacacggaaaactcgatgaaatcgacgcaacgggttacggtattcccgtgtttgtcgcgactcatgacgaaggacgcgtaccgcctgagtatttgccgcgtatctctggtgtattcgaatataatgaatcccgtactgccttctatggtcgccagttggaaaccgcagcaagccactacgaaacgcagttacgtccgccgtttttccgcgcgctggtggattatgtcaaccagggcaacagcgcatttgactgcccggggcatcagggcggcgaaagtctttaa

SEQ ID NO: 376888 - DNA, 279 bp, Salmonella enterica
ttgactgcccggggcatcagggcggcgaaagtctttaacgccgataagacctactttgtgctgaacgggacctcctcctctaacaaagtcgtactcaacgcgctgttaacgccgggcgatctggtactgtttgaccgtaacaaccacaaatctaaccaccacggcgcattattgcaggcgggcgcaacgccagtttatctggaaaccgcgcgtaaccgtatggttttatcggcgggatcgacgctcactgcttcgaagaagattacctgcgcgagctga

SEQ ID NO: 376889 - DNA, 2280 bp, Salmonella enterica
atgagtaatgagacgggacatctgaacagacgttcttttttaaaggggatagtggcgctgggcaccgttgcggctttacccggaggattactgacctcccgatgcgcgcttgcgcagccgcctgttccctttaaccctaaaacgtacaaaatttatcgtaacgcgtgtccgcgtaactgctatgacacctgtagcctcaagacgtgggtaaaggacggggtcattactttcgtggaaggtgcgccggaatcaacatttactcacggtacgccttacgtcaaagggttgagctatccgcgccgggtttatagtcccgatcgtattaaatatcccatggcgcaggacgttcgcggtagcggcaactggcgtcgcatctcatgggaagaggcgatgcagcgtattgccgccaaaatgctggagattaagaaaaaagacagttctatgctcggtctggcgctgaccaaatattccggtaagtttggcgtgctgaactatgccgttgaagggatgatgtcctcgcttggctataccacccgttttgccggtacgccgtgctggcctgccggtattgacgcgcaaaactacgacatgggcgacatgtggtgtaacgacccggaagatatggtgaaagcaaaatacatcattatctggggcgcgaacccagcctggtgctcaatgcactccatgaaatatatctatcaggcgcgcgagaaaggggcgaaggtcgtggttatcgacccgctgctgtcgcagactgccgccaaagccgatctctacctgcgcgtacggcctggctcagacggcgcgctggcgctggggatggcgcgccatctggtggataagggcctggtggatcaggattttgtcaacaacgacgctcatggctatccggaatttgaagcctatctgcgtaaccatgtaaccgtggagtgggcggcagaaatctgcgggttgtcggcacaggtgattcgtcaactggcggaagagtttacggcggttaacccggccacggcctggattggttacgggatgcagcgtcatgtcaacggcggcgccaacgttcgcgctatcgatgcctttgtcgctatgtccggcaacatcggtgtcgaaggcggcggcgcgcgttatggccatctgcatacctggggctttaactataacgccatgctgcagaagccgccggtgggcgctattggcataccgggagcggcgggcaccaccagtgaattcggggctgccgctggcagcgacgccgtgcagtactccgatcgctctctgaatattaaccagacggcgcaggggattctggaggccaacgatccgccggttcgtatgctgtgggtcgcctgtaaaaacccgtttgcccaggatttcgatcgcagcaagatgaaaaaagcgtttgaaaaactggaaatggtggtctgcgccgatcagttcttcaacgaaacggtgcaacacgctgatatcgtgctgcccgttaccaccgcgtttgaagagtggaacgtggatgcttcttactggcactactggctttccattaatcagccggcgattaagccgatgtatgaagcaaaatgcgaccttgaaatcgctaccatgctgtcgcgcaccattaataagatggcgccgggttcctgtaccttcccgcaagagttcgatcacaagcgctggctggatcaggagttcaacgacggtatggcgaaaatgttcggcatctcttcctgggacgatctgctggacgggccaaaaaaagcgatcctgccaagctctgccgcctggtacgatcgcaagttcaaaacgccgtcaggcaagtatgaatttaaatctgaactggcggagaaaaacggccacaccgcgctgccggaatacaaaccggaagccgagagcaaactgcctttccatctgtttacgccgcacgtgcagtttggcctgcactcgcagtttatcaacctggactggatgcaggtgttctatccggaaccgtttgtttatatccatccttcttccgcgaagaaaaaaggcattagcgaaaatgaccgggtcaaagttttcaacaacattggcgaggtggaactgcgggcaaaagtcaccaccaacgtgccggaagattttctggtgatgtatgaagcgtggttcccgaaacggcagtacaacgtgcaaaacgtcgtggccgatacgcctgctgatatggggctgatgaaaactggcgcgccgggcgccgctatccacagtcagtttgctgacgttgtattgatcggtaaaggggaatccgtagcatga

SEQ ID NO: 376890 - DNA, 180 bp, Salmonella enterica
atgaacataatgaaaaacgcagaatttccagacgactggcttttagggctacgccaggtcgtacgcgacccagtgctctatgaattactcaaatactgcccgttggaaatcatgcagtgctggcgatttgacgacatttcccgcggcgcgcttatctgccgccagggggaaacatgctag

SEQ ID NO: 376891 - DNA, 1053 bp, Salmonella enterica
atggcagtacgaaaactcaccacagggaaatggctttgcgaatgttaccccgccggacgaagtgggcgtcgtgtgcgtaaacaattcgccaccaaaggcgaagctctggcttttgagcgtcacactatggaagaaaccgaatcaaagccatggctgggcgaatcagtggatcgtcgaaccctgaaagacgtggttgagctatggttcaaactacatggtaaatctctgactgctgggcaacatgtctatgacaaattgctgctgatggttgacgctctgggcaatcctcttgcaaccgatctcacctctaaaatgtttgcccactatcgagataaacgcctgacaggcgagatctacttcagcgagaaatggaagaaaggagcaagcccggtcaccattaacctggagcaaagctatctaagtagtgtttttagcgaactatcccgtctgggcgaatggtcgtatccgaacccactggagaacatgcgaaaattcaccatcgcagaaaaagagatggcatggcttacccatgagcagattgttgaattactggctgattgcaaacgtcaggacccaattctagcactggtagttaagatatgcttaagcacaggcgcacgctggcgagaagccgtaaatcttactcgttcacaggtgaccaaataccgaattacctttgtaagaacgaaggggaagaaaaacagaagcatccctatcagtaaagagctttacgaagagatcatggcgcttgatgggttcaatttcttcacagactgctattttcaatttttatccgtgatggaaaaaacgtctatcgtgctccctcgcggtcaactcacacacgttctgcgccatacgtttgcggcgcacttcatgatgtcgggtggaaacattctggccttacaaaaaattctcggacaccacgatataaaaatgactatgcgttacgcacatctggcaccggatcatctggaaacggcgctccgtttcaatcctctggcaacgctgccaagtggcgacaaagtggcggcagcggttggcattaccccgtaa

SEQ ID NO: 376892 - DNA, 192 bp, Salmonella enterica
atgcttggtaaggtattttttgtggttttgtcatgttctttgttattaaacccactaactacctatgctagaaattatccctgctcagggaaaaagggaggtgtttctcactgtacctcagatggcaaattcgtttgcaatgatggaactattagtaaatccaaaaaaatctgtactaaaaactcacgataa

SEQ ID NO: 376893 - DNA, 570 bp, Salmonella enterica
atgaatttggagaaaggcggacgaggcgctatagagcgcatggtagaagcttatggattcaaaactcgacaggcgttgtgcgatcatttaggaatctctaaaagtacactcgccacacgctacatgcgtgactcattcccagcagaatgggtaatccagtgcgcccttgaaacgggcacctcgcttaattggctcacaaccggacatggttcaaagcaaacttcaggtaatacaaatactatggaagttgctaaatatgtattatctgatggtgccttgcgtgaagacggtttttatatttttgataagggatttctaccctctacgtttaaaaaaccttttgtcatcacagataacaattctgaatttatttgtgataaagaatttgatgatatacgtgatggtaaatgggtaataagtattgatggcgaagtaacgatccgtgacattactcgtttacccggtggaagaatcttcgtcgagggtggaaacagagccttcgaatgtaagatagaagacattgaaataattggtaaaattataagtttaacagtcaagtatgttaaatag

SEQ ID NO: 376894 - DNA, 222 bp, Salmonella enterica
atgagacctaacatttcaatcactcttaccacgcctcatgtgactattgagcgctatagcgagctgacagggctgtccatcgataccatcaatgacatgttggctgacggacgccttatctgtcaccgtttgcgcaaagataaaaaacgcgaaaaagtgatgatcaacatagcagccatgaccgttgatgcgctttcagaatgcaatctaaaccttaattag

SEQ ID NO: 376895 - DNA, 225 bp, Salmonella enterica
atgtatgcagcggaaagtgaagtggtttatcagttttgttacagaggggagagttattcagtacctgaagatgatttgctctgttgttatccgtcgttgtcgggcgatggcagttactttttcacgctaaaggatgggacgtttttacggggagagcaggttaaagagacggtacgaaaaaatgtatctccctttgagcgttaccgtaagaacaaagaacgatag

SEQ ID NO: 376896 - DNA, 807 bp, Salmonella enterica
atgaagaaattaactggcgtaattgcttttgctctgctgcttactgcttgtgacaaaccgaagatcgatgcatcaagcgatcagtcgatgaaagagtccattcaaaaagtaagagagtccttacctgcagataaaaaagctcagtttgatgatgcagttaaagtcgttgcctttagccaaatcaacatgagagagctaatgcaggctggaacgtcttctggggacgtctacgaaacaaaaattaagtcagcgttggaaggtaaaactggtgatgaggttataaattacgcacaaactattcgccttgagcgtgagaagagagagaaagaacaggctctgcaagaaataaaagaactggaagccaaacaaacctctgcaacacaggctgcggaaaaaatgaaagccttcaaggtcgaacgttcccgtttttatttccagaaagaggattacggcaatgatcagccaattctggatattagcgttgaaaacggaacagacaaagcggttgccagagtattcttcaaaggtgttattgccagcccaggaagaagcgtcccttggttctctgacgtcttcaactataaaatttctggaggtctggaaccaggtgagaaagccaactggaaattagcccctaatagatactctgattggggaaaacttaaagttccggctgatgctatatttaccgtcacagtcattggccttgaagacgcagatgggaaatcgatctatggtgacgccgagttttcagaacgcgatgctgacagactgaatcaacttagagataagtacctttctaaataa

SEQ ID NO: 376897 - DNA, 915 bp, Salmonella enterica
atgccataccaattggtagagcttagccccgtagctaacgatcttgaacagttaggaaccaaagagaagttttggttctatttctccgatgacactgtaaatttgcagttgtttaagtactctaggctaggtactggcgagcattggtctgaaaagtgtgctgctgagttatgtcatttgcttaacattccacatgctagctatgatttggcgcgatacaatggtcgattcggtgtggtgactcagaatatcattccatctggtttccggatggtaatgggaaatgaagtgcttcacagttcgacattcgattatcctgggcctttacaagccggggaaaagccggtaagggtcagagaacacactgtcacaagggtattgggttgtttagatagggaatctatcaagcctcctccgagtgtatatgatctaaccgggctaaatgcagcagatgtattttgtggatttttgatgctcgatgcacttgtgagtaatcaagatcgccatcatgaaaattgggcgatcatgcttaacaatgaaactggtgagcagtttttgtgtccaacatacgatcatgccgctagtttaggaagggagatgttagatgatgagcgtaacgaacggcttaatactaaagataaaaatcgacaaatcccatgttttgtaagaaaagctcgctctgagctattcaaagcaaaaactgataaaaagcccttgctgaccgttgaagcatttcaacatgcagttgaagggagagttgccgctcgcgaccattggttaggtaagttgagcgttttaacagaagattccattacagatgtgtttaaccaagtgccttcatcgtgtatatccgacagtgcacgtagatttgcaacgttaatggtaatggaaaatcgcagaaggttactagaatga

SEQ ID NO: 376898 - DNA, 741 bp, Salmonella enterica; identical to SEQ ID NO: 13937

SEQ ID NO: 376899 - DNA, 1065 bp, Salmonella enterica
atggctgatcaaacgaatccgtgggataccgcacaggtggccgatacgacgacgcaaacggctgatgcctggggaacaccggcaggcgtagccacggacggcggcagtaccgactggttgaacagcgcgcccgcgccagcccctgaacacttttctcttctggacccgttccataagacgcttatcccgctggatagctgggtcacagagggaatcgactgggtcgtcacccatttccgtcccctttttcaggggattcgtgtgccggtggattacatccttaacggctttcagcaactgctgctgggaatgcccgcccctgtggcgattattctctttgcgctgattgcctggcaggtttccggtgtgggcatggggatcgcggcgctgatatcgctgatcgccatcggcgcgatcggcgcctggtcgcaggcgatgattaccctggcgctggtgctgaccgccctgttgttctgcgtcgtgatcggattaccgatgggaatctggctggcgcgcagcccgcgcgcggccaaaatagttcgtccgctgctggatgcgatgcagaccacgcccgcgtttgtctatctggtgccgattgtcatgttattcggcatcggtaacgtgccgggcgtggtggtgacgattatttttgctctaccgccgattatacgcctgacgatcctgggcattaaccaggtgcctgccgacttaattgaagcgtcgcgctcgttcggcgccagcccgcgccaaatgttgttcaaagtgcaactaccgctggcgatgcccaccattatggcaggcgttaatcagacgctgatgctggctctctcaatggtcgtcatcgcctcgatgattgcggtcggtgggcttggccagatggtactacgcggcattggtcgtcttgatatggggctggcaaccgtcggcggcgtcggcattgtgattctcgccatcattctggaccgtctgacgcaggccgtcgggcgcgactcgcgtagccgcggtaaccgtcgctggtataccaccggtcctgttgggctaatcacccgccctttcgttaagtaa

SEQ ID NO: 376900 - DNA, 561 bp, Salmonella enterica
atggcaattaaattagaagtgaagaatctgtataaaatatttggagagcatccgcagcgtgccttcaaatatattgaaaagggactatcgaaagagcaaatactggaaaaaacggggctatcgcttggcgttaaagacgccagtctggccattgaagaaggcgagatatttgtcatcatgggattatccggctcgggtaaatccacaatggtacgccttctcaatcgcctgattgaacccacccgcgggcaggtactgattgacggtgttgatattgccaaaatatcagacgctgagcttcgcgaggtgcgcaggaaaaagattgcgatggtcttccagtcatttgcgctcatgccgcatatgaccgtgctggataatacggcattcggtatggaattagcgggcatcgcggcgcaagagcgtcgcgaaaagcgctggacgccttgcgtcaggtggggcttgagaattacgctcacgcctatccggatgaactttccggtgggatgcgtcagcgtgttgggcttgcccgcgcgctggcaatcaaccctgatatcttattaa

SEQ ID NO: 376901 - DNA, 960 bp, Salmonella enterica
atgaaattatctcgtattagcgccatcaactggaacaagatccaggacgacaaagatctggaggtgtggaaccggctgaccagtaacttctggctgccggaaaaagtgccgttatcgaatgatattccggcctggcagacgctgagcgccgccgaacagcagctcaccattcgcgtgtttacgggtcttacgctgctcgacactatccagaacatcgcaggcgcgccgtcgttaatggcagatgccatcacgccgcatgaagaggccgtactgtcgaacatcagctttatggaagcggtacacgcccgctcttacagttctattttctccacgctgtgccagacgaaagaggttgatgccgcctacgcctggagcgaagaaaacccaccgcttcagcgtaaggcgcagattattttagctcattacgtcagcgatgaaccgctaaagaaaaagattgccagcgtctttttagagtcttttctgttctattccggcttctggttgccgatgtatttctccagccgcggtaagctcacgaacactgccgacctgattcgtttaatcattcgcgatgaagcggttcacggttattatattggctataagcatcagatagcgctacaaaaactatcggcaatcgagcgtgaagagttaaagcttttcgcgctggatttattgatggaactgtacgacaacgaaatctgctacacagaagcgttatatgcggaaaccggctgggttaacgacgtcaaagccttcttgtgctacaacgccaataaagccttaatgaacctgggttatgaggcgttatttccgccggagatggcagacgtgaatcccgcaatccttgccgcgctctcgccgaatgccgacgaaaaccatgatttcttttccggctcaggttcatcttatgtgatggggaaaacggtcgaaaccgaagacgaagactggaatttttaa

SEQ ID NO: 376902 - DNA, 801 bp, Salmonella enterica
atgtgggtggaagatcccggctttccgttaattcgcccggtgataacgcaggaggggattacgctggcgccgattccggtcgatgccgatgggctgaatgtcgcagcggggatgcgggattgcccgcagggacgctttgcattggtgacgcccgcccatcaaagtccgttgggggtggcgctgtcgttaactcgccgacggcaacttctggcatgggcggcgaatgtgcaggcctggattattgaagatgactacgacagcgaatttcgttatcacggtaaaccgcttccgccgctcaagagtctggatgccccgcagcgagtgatttacgccggaacgttcagtaagtcgctctttccggcattacgtaccgcctggctggtggtgccgataaagcagattgagcatttccgccagcaggcgtcgctgatgccctgtagcgtaccgttgttatggcagcacacgctggctgattttatccgtgatggccatttctggcggcatctgaaaaagatgcgtcaacattatgctcagcgacggttatggattgaagaggcgctggcagaacagggatttgtcgtgacattacagaaaggcggtattcaattggttattgaggttgaaggtgatgataaagcgctggtagcaaaagcgaatcaggccggactggcggtacaggcgctaagtcgttggcgagtggtttcgtcaggaaaggggggcattttactgtcgtttaccaatattacttccgctggcatggcgaaacaggtagcatgtcagcttcgacaggcgatacagtaa

SEQ ID NO: 376903 - DNA, 1116 bp, Salmonella enterica
atgcgtattctgtttgtcggtccaccactgtatggactgctataccctgtgctgtccctggcgcaagcgtttcgtgttaatggccatgaagtgctgattgcaagcggtggaaaatttgcacagaaagcagcagaagctgggttggtggtatttgacgctgcgcctggtttcgattcggaagcgggttatcgccgtcaggaggcattgcgaaaagaaaataacattggaacaaaaatggggaacttctcatttttcagcgaagagatgaccgacccgctggtcgcgttcgccggacagtggcggccagatctcatcgtctatcctccccttggggtcgttggaccactgattgccgctaagtatgacattccggtagtaatgcaaaccgtcggcttcggtcatacgccctggcacatcaaaggcgtgacgaaatcactttctaacgcctaccgccgccatggggtcagcgcgccaccaagagatctggcgtggatagacgtcacaccgcccagcatgagcatactgcaaaatgacggagagccggttatctccatgcaatacgtcccgtataacggcggcgccgtctgggaagaatggtgggaacgtacacctgatcgcaagcgtcttctggttagcctcggcaccgtcaaaccgatggtggatggcctggatctgatttcctgggtaatggattctgccagcgaagtagatgccgaaatcattctgcatcttccggcaaacgcccgctcggatttacgttctctgccgccgaatgtccgtctggtcgactggcttccgatgggcattttccttaacggcgccgacggttttatccaccatggcggcgcaggcaacactctgacggcgctgcatgccggcattccgcagatagtctttggccagggtgccgacagacctgtcaatgcccgcgccgtggtcgagcgcggatgcggcattattcccggtaagagcggacttacgagcagcatgatcaatacctttctcggtaatcgcgcgcttcgcgagacgtcgcaggaagtcgcggcggaaatggcggcccagccttgcccgaccgaggtggcaaaaaaactgatcgccatgctgcaacacggctaa

SEQ ID NO: 376904 - DNA, 921 bp, Salmonella enterica
atgcgtaatcagcttttcatgacgcgatattactccagcgtagctaaacccgtattaactccgctggcgttggctatcgcactggcgcctgcgcctgggtgggcggaaaactatttcaacccggcatttctgtctgacgacccgtctgcggtggccgacttatcgaccttttcccgtaatgcccaggcggcgggaatgtatcgcgttgacgtttacctgaacaatacgtttctcgcgaccagagacattgccttccaggcggtgaagacgacgggaaaaagcgcgcccaccgatgacagcggattacgcgcctgcctgacgcctgaaatgcttaaaaatatgggggtaaacaccggggcatttccactgttggcgaaggcggcggcgggaagttgtccggatctcgccagtgcgataccggccgcccggacccgctttgattttgcgcagcaacgtctcgacattagcatcccgcaggcggcgatggttgccagcgccagaggctatatcccaccgcaatactgggatgaaggtattaacgcgttgctattgaattacacctttaccggcgcgaatagtcaggatcggagcccaggcggcagtgcggagaacagctattttcttggattgaatagcggccttaatctgggggcctggcggttacgcgactactccacatggaacgcgaatagcggcgatcagaatagcgacagcgactggcagcacatcagtacttatctggaacgtgatgtggtctttttgcagggagaactgacggcaggcgatagttataccccctccgcattattcgatagccttccttttcgcgggctacaactggcgtctgacgacaatatgttgccagacagcatgaagggcttcgcgccgaccattcacggcattgccagaagcaacgtgtaa

SEQ ID NO: 376905 - DNA, 465 bp, Salmonella enterica
atgagaaggttatatctggcgcttattctgctgttcgcgtattccggtcatagttacgcctcctgtaaacgttccggtaatgaaggcgcgatcactatcaccccgccgtcgcagcttgtggtggatagccacgcctataccgcaggcgaagtgttgtggcaatcgggctgggtttccacctccgaagtcacaatggatggctgtagtcgcgattataaggtcggtttttatatgaacccggtagcgcgcagtcaaatacatccgcgacaatcaatgcgaatgacgggaacaacacgccggtatttagcaccgggatttccggcgtgggcattgcgattaaaacccaaacgaatgctggcccttacgataatgtcatgccaatcgataatacgtaccataatggcgatggcaataaaacccaccatgcgatggcccccgcctacaatgttgaactggtcgccttag

SEQ ID NO: 376906 - DNA, 1350 bp, Salmonella enterica
atgttgaaatcccccctgttgtggaaaatgattacgttaggcggcgccatgatcctgctgttaattcccctgatgatggtacggcacaccatcgtggagcgtgctgattatcgaagccatgtagaagccgctattcgtcagagtaccagcggcccgcaaaaggttgtcggcccgctggtggcggttccggtgacagagctctataccgtgctggaagaggagaaagaggttcagtataagcgcagctatctctatttttggctgccggagtcgctattggtcgaaggcaatcaaaacgttgaagcgcgaaaaataggtatttatcaggggcaggtgtggcataccgatatggcgataaaggcagagtttgatgtggcccgtctgcatgagctgaacagaccgaatattacccttggaaagccctttatcgtcgtgggcgtcggcgatgcgcgcggtatcagcgcagtaaaagcgccgcaggtgaatggtgaaatgctcactgtagaaccggggaccggcttaccggaaagtagagagggcattcatatcccgctaccggacagtcagtgggcgacgcgcaacctgacgttggcgatgtcgttaaatttaagcggaaccggcagcttttcactggttcctgtcgggcgtagcagtgaaatgaccctgaccagtaactggccgcacccaaattttgtgggggattttcttcccggtaaacgcgaaatcagcggttcaggatttcaggctcagtggcaaaccagccggtttgccacgaatctcggcgaacagtttgctgatgcgcaaaaggtggattgggacaacttaccggcgtttagcgtcgctgtatcgacgccagccgatcagtatcaactgacggacagagcgacgaaatatgccattttgttgattacgctaacgtttatggctttctttgtcttcgaaaccctgacgggacagcgattacacccgatgcagtatctgctggtagggttatcgctggtgatgttctacctgctgttgctggcactgtcggaacatatcggtttcacgccagcctggatcgccgcaagcctagtgggcgcgttgatgaatagcgtttatttgcaggcggtactgaaaggatggcgcaatagcgtgctgtttacgttagcgttattggcgctggatggcgtgatgtgggggttactgcgttcggaagatagctcgttgcttctgggtaccggcgttctgctactggcgcttggcggcgtgatgttcctgacgcgccatctggactggtattcgctctcttgtcagcaacgtaagtcattaccgccagtaaaagatgacgaattacgtttgtggaaataa

SEQ ID NO: 376907 - DNA, 1425 bp, Salmonella enterica
atgcgcatcggaatgcgtttgctgctgggctactttcttattgtcgccgtcgccgccgtgtttgtgctgtctatctttgttcaggagataaagccgggcgtccgccgcgcgacggaagggacgctgattgacaccgcgacgctgctggcggcgctggcccgcgacgatctcctttccggcaacccgactgacggccagttggcgaaagcattcgcccagctgcaacatcgcccgtttcgcgccaatatcagcgggatcgtcaaagtgcgtaatgaataccatgtctacatgacggatgcgcaggggaaggtgttgtttgattcggaaaacaaagcggtggggcaggattattctcgctggaatgacgtctggcttacgttgcgcggacagtatggcgcccgcagcacggcaaaagattctgccgatcccaatagcaccgtgatgtacgtagccgcgccgataatcagcgatggacggatcatcggcgtcctgactgtcggcaaaccgaatgcggcaatggcgccggtgattaagcgcagcgaacggcgcattctgtgggccagcgccgttttactgggaattgcgctggcgattggcgcggggatggtctggtggattaaccgctccatcgcccggttgacgcgctatgcggattccgtcaccgaaaaccgcccgcttgcgttacctgcattaggcagcagcgagctgcgtaaactggcgcaggcgctggagagtatgcgcattaagctggaaggcaagaatgacattgagcagtacgtgtatgcgttgactcatgagctgaaaagtccgctggcggcgatacgcggcgcggcggagattctgcgtgaaggaccgcccgcggatgtggttacccgctttacagagaatatactggcgcaaaatacgcgaatgcaggcgctggtagaaaccctgctgcgccaggcgcggctggaaaaccgacaggatatccctctcgcgccggttgctgttgatgagctatttacgcagcttagcgaggcgcgcagtattcagttggcggcaaaaaagatcacgcttactctacgtccttcctcgctggttgtcgtcgccgacgcggagcttctggcgcaggcgctgggcaatgtgttggacaatgccatcgactttacgcctgaaaatggcgttatcacattaagcgctcagccgatgggagagaaagcgatcctgcaggtgacggattccggctgtggtattcctgattttgcgctgccgcgcattttcgaccgattctattcgttgccccgtgaaaacgggcgtaaaagcagcgggcttgggctggcgtttgtcagcgaggcggcgcggctcctcaacggtgaggtgacgttgtgcaaccgtcccgaaggcggcgtgctggcctcgttgacacttcaccgtcacttcacataa

SEQ ID NO: 376908 - DNA, 486 bp, Salmonella enterica
atgtcgaactatcgtcgttattacattaacggtggaacctggtttttcacggttaatctgaaaaaccggaaaagtgatttacttgtccgccagattgcggaattacgctctgcgattcgccgagtgaaaaatacgaagccttttcaaattgatgcttttgtcgtgttgcctgagcatctgcattgcatctggacgcttcctgagaacgattgtgacttttcatctcgctggcgggagcttaaaaagttatttaccaaatcgataatgcgccatgacgtgtggcagccacgattctgggagcacacgattcgcgacgaaaaggattttcgccgacatgtcgattacctctacttcaaccccgtgaagcacggttgggtaaggcgggtgcaggattggccgttttcgacctttcatcgtgatgttcgcaatggcgtttacccggttgattgggcgggggaggtgagggatcttgacgctggtgaatag

SEQ ID NO: 376909 - DNA, 1383 bp, Salmonella enterica
atgccgtttacatttcagatcggaaatcatagttgccagatatcagaaagacatttaagagatatcattgatcataaaagagagcatgttttttcaacgtatgagaagttcatagattttttcaggaatatatttaccagtcgaagtttaatctctgattatagagaaatctataatctactgtgccaaaaaaacgagcgtccagatattacgaagcctttctcgctacgaccattttcgaagcgagatgaagactgtacacgatggcgcccccttcttggatatattaaacttattgatgcctccaggcctgaaacaagagataaatacactgtagaggtattagcacatcaagaaaatatgttactactacagatgttttatgatggaatgttagtgaccgagacggagtgctctgagcgttgcgtcgattttttaaaagaaacgatgtttaattataattccggggaaattacgcttgccgctttagataatgatcacctgacgccgagcgaagcaggtagtaatgggatctatgaggcttttgagcatcgtttgatagacttcctgaccacgcccgccacgcccgccacggcgtctggtgatgagagcggcgctattgatcagacagatacatcacaaccagcggcaatagaggcgtttattaactcgccggagtttcagaaaaatattcgcatgcgtgatattgaaaaaaataaaataggtagcggaagttatgggacagtctatcggttacatgatgactttgttgttaagattccaattaatgagcggggaataaaagtggatgttaactctccggagcatcgtaattgtcatcctgatcgtgtcagtaagtatttgaatatggccaatgacgacaagaatttttctcgttcggcctccatgaatattaatggtaaagacgttacagttttagtttcaaaatatattcaaggtcaggagttcgatattgaagatgaagataactatcgaatggcggaggcgcttcttgaatcccggggggtttatatgcatgatatagataacgtaggtaatattctgattaaagagggggtacttttctttgtcgatggcgatcaaatcgtgctgtcacaagaatcccggcaacagcgaagcgtttctcttgcaacaaggcaactggaagagcaaattaaggcccgttacctggtaaaattaaagcagtccgagaccgaaggaaatactgaagatattgaatattataagtcacttattacagaacttgatgagttaatcggagaggaagaacaggcacctgcgccaggaagacgttttaaactagccgcgccggaggaagggactcttgtggctaaggtattaaaggatgaattaaaaaaatag

SEQ ID NO: 376910 - DNA, 213 bp, Salmonella enterica
atgggatatatcgacttaacgcaacatggcttccgttctactttccgtgagtgggctggtgaagcaacggattatcaacgtgaggttattgaacatgcgttggcgcaccagttggcagataaggctgaagcagcgtatcagcgtgggacgttatggcctaaacgagtggcgctgatggatgactggacggggtatagcactgccaacagctaa

SEQ ID NO: 376911 - DNA, 543 bp, Salmonella enterica
atgatttactcaacgaatacaggaaaaagcggagaacaccttcgtctcaccacgctggaaagtgtctggattcagggaaaactgcgtatgtgggggcgctggtcgtatattggtggcggtaagacggggaatatgttcaaccagttgttgacctctaaaaagctgacaaaaacggaaattaacgaggcgctccgcaggatgaaaaaagcaggtctggacaaacctgaacttgaggcttttttgcggggtatgattaacggcaagcaaaagagctggctggcacattgtaccgattcagaggcattaataatcgacagggttattggcgaagtactggcggatcatcccgggctgcttaatgtcctgagtcagcgttatgtgggacgagggatgagtaagagaaggatggccgagttattaaacgaacagtacccagagtggtgttttagcacatgcgaaaagcgaattgctaattggttggctgttgctgagtatgcgctatacattcctatgcgagaatcatttgctcaaaaaatggcttga

SEQ ID NO: 376912 - DNA, 291 bp, Salmonella enterica
atggtgaatttacgtaaagcggcgcggggccagatgtgccaggtcagaatccctggatactgcaatcacaatcctgaaacgtctgtactggcgcattaccgactggcgggaacgtgcggaacggcgataaagccacacgatatgcaggcagcgattgcctgtagctcgtgccacgatttaatcgacgggcgggtaaaaaccagcgattacaccaaagaagaattacgcctgatgcacgcagaaggtgtttttcgcacacaagaaatctggagaaaggaaggttatttatga

SEQ ID NO: 376913 - DNA, 600 bp, Salmonella enterica
atggcgcatatacaactggtcaaacaaacctcttccggattacttctcccggcgacgccggagagttgtgattttctgcatcaaatcaaaataggcgagtggatacacgctgattttaagcgcgttcgtaactacgcattccataagcgttttttcaaacttctgcaactcggattcgattactggactccggtcggtggggcgatcactcctcgcgagcgaaaactggtgtccggtttcgttgattatctgtgcgaatcagtaggccgggaacatacgccagctctgagcgaagccgcagagcaatatctgaatacagttgcgacacgcagaacccgagatacagcattgctaaagtcgtttgaggctttccgcgagtgggtaaccattcaggccggattttacaccgagcatatttatccggacggtagccgcgggcgcagggcgaaatccatcgcgtttgcgaatatggacgaaaccgagtttcagcaggtttataaatctgtactgaatgtgctgtggaactggatcctgttccgtaaattttcctctccggaacaagtcgaaaatgtggccgcgcagctgctggagtttgcgtaa

SEQ ID NO: 376914 - DNA, 288 bp, Salmonella enterica
ttgctgttgattggtatgtcttcacggctagaatcgaggctcttaagtagcgcgcagggagaagagggatggaccccgaaggggaagagctatttatctggaaggattctgaagatgaaaatcgaagaattgcgtgaaatttttagtgaaaatggcctctatgctgtgcgcgttgagaatgggaaagttgtctacacaacgttaatccctgatgatcatgtaattttatctatcgaggcattcattgaataccttgaaaggctcggtttcaaggtggttcgcgaatga

SEQ ID NO: 376915 - DNA, 396 bp, Salmonella enterica
atgaaaaatgaagtcgacaatgttatcaccctggtacagccaaaatcagaggaggaaggactcctcaacgttgtgataaccgacagaaaaagcggcgagcaaaaatgctgtcagcatatccgtacaacaatttcagaagtgaatcgtacgattacctgtaaccgatgcggattggctttagatccgttcgagcttgttctcgaccgtgcgagaaacggtgaaaacatagtgtctgagattaaatcactctatgcaaagcgggatgctcttcgtgaagctgtggcaaaacttgaacgtgaagagaaaaatgccaaagcccggttacgagcagccaggacagcaatactgtatgcggaaaatgaccttaaaaatattgagcaggaggtgaatcgatga

SEQ ID NO: 376916 - DNA, 540 bp, Salmonella enterica
atgaccactattaccaaagagcgactacttacaatcaagcagtggcgcgaaacatacggaccgggtagcaacgttgtactgccagcagaagaagcagaagaactggcacggattgcactggcatcgctggaagcagagccagtggcgtggaaggcaaccttcacgcaaattgacaataaatataatacgttcaccactatgtattctgacaaagcagaagtcgaacgctgggtgcgactgcatgaaataggtgactttcgggcagaaataacaccgctttacgcagcgccgtcagcgccggtaattccggatggttggataagctgtagtgagcggatgcctgaaaggaaccagaacgtgcttatttcggtgaatttcgatagctctctggttgaaccgctaatatgctccgcacgctatacaggaagcacattccggcgcggagatgcaacgattaagccgggtaatggtattgagcaggcaactcactggatgccgctaccggaaccgccgcagggggggggaactgatgaaaaatga

SEQ ID NO: 376917 - DNA, 366 bp, Salmonella enterica
atggcactgacgaaaaaacaacgtgctgaactgcgcatgaagtttggtggtcgctacgcttattgcggctgcgaacttggcgaaaagtggcatgcagaccatgtaaaaccggtcattcgttttgatggaaatatgcttcaccaggaacgtgacgatatatccaacatggttccggcatgccacccatgcaatctgcacaagcattgcagtagcctggaagattatcggcgaattatcagtgatggtcgtcgtgaattccttgcgtccgggaaaggcaaggcgctggttcgtatgggattggttgaaatgaaatctgacccggttgtgttctggtttgaaaaatatcaagaaggggctacggtatga

SEQ ID NO: 376918 - DNA, 219 bp, Salmonella enterica
atgactacattattcagaaaagaatatccgcgaaaaagtagagcgacagaatttttgtttctcattctgtttatcgtgttgatgataccgatatccccgctattactggtctggtttatcgggaaaataattgagcccgttattgaattgtatagcgacgtggtatgggccccgttcaacacactgcataataaaattaatccatataaggaaagctga

SEQ ID NO: 376919 - DNA, 312 bp, Salmonella enterica
atgaatgaaattagagaaataccagtaatacgtgatgaatatggctgctggacgcatcctgagtatgaaaaattctgtgatggtagagaacatatttcaacggaagagtttaacgcatggatggaggaaaataatcttcaatggaccatcagaactatggatgaagatgattttaatctggacgcagatggtcccgatattgcctcctggaaaccggagcgcccggaaggtgaaggctggttcattggttccattcatgacactgaagatggtcctgtttgtgtatggctgagaaataagactgaagcataa

SEQ ID NO: 376920 - DNA, 162 bp, Salmonella enterica
atgagtgaatcaaaatgtcagattaatggcaatcagatagagccgtgcgcggcgttatcaaaatctctcgaatatggaaatccaacgttcaagagtaaagggatatttatcccggagcgtgtgaacataaacactggcgagtcaggcttagatattgcttaa

SEQ ID NO: 376921 - DNA, 207 bp, Salmonella enterica
gtgagcgggattgactaccaagaattggctgctgccaacgctttcctggcggatgtgcgggcaggggcgtttaacgacctttgcgcggcgtttgtcaggcacgcaaaaattgcaggactggacgatggcgatctcgttacggtgaaagaagtgactgatgcgctgctgcactgtgcagaacagcttcgggagggattcaagcaatga

SEQ ID NO: 376922 - DNA, 423 bp, Salmonella enterica
atggcaaaagtatttacaccagaagagcgagaaaaaattaaagggcaggttgttgaacttgtacgtctgagcggtcgcgagacgttacgggctctggaggttaaaaccggtgcatcaaggtattacataagcactctcgccagagaactggtcgccagtggtgatgtttacaattcaggctacggattattcccgtctgagcaggcgcgtaaggactggcaaaacgcccgcaaaaaactatccagggcaaaggtgaaaaaaacggttgtggttgatccggaccttatctggtcattaccagacggagaaatacgccgctacgacaggcgtctgaacataatctgtcgcgagtgcaggaagagcgaagttatgcagcgcgtgctggcgttttatcaggggaattttcaggaggtggcacagtga

SEQ ID NO: 376923 - DNA, 762 bp, Salmonella enterica
atggagactgtttttgacgcactgaaagcaatgggaaaagccacgtcggtagaactggctgcgcgacttgatatcagtcgtgaagaggtactgaacgagctgtgggaactgaaaaaggctggttttgttgataaaagcgcgtacacctggcgtgtggctgataacaacgttcagcaggaacagccagagcaggcagaactgccggaagaaaccaccacggcaacagtcgcgaaaatttcggagtgcgatttaactgcggcgattgaacaacgtgggccacaaacggcggatgagttggctacattgttcggtaccacatcacgcaaagtagcttcaacgctggcaatggctatcagcaaaggacgcctgattcgcgtaaaccagaacggtaaatttcgttactgcataccgggcgataatttaccagcagagccgaaagcagcatcggtagcggaaactgatggtaaggcctttcctcagcccacaggtgttgcgttaccagtacaggaggctgcaacacaggaagatattaaaacagaaacggtggcggacattgtgcagtcgctgccatcgtttactgaaacgcgagcggatgacctggttttaccatcgctgcatatggcaaaccgcgaactgcgtcgggcgaaaaatcatgtccagaagtgggagcgaatctgcgccgcgctgcgggagctgaacaagcaccgggatattgttcgacatattttcgattcctccagtcgtattgtgtcggaaaagtga

SEQ ID NO: 376924 - DNA, 747 bp, Salmonella enterica
atgaaaaatattgcgacaggaggcgttctggagcgtatccgcagactgaccccaccacatgtaaccgccccattcagaacggttgcggagtggcgcgagtggcaacttgctgaaggccagaaacgttgcgaggagatcaaccgcctgaatcgtcagttgcgggtggaaaaaatcctgaatcgctctggcatccagccgttgcaccgcaaatgctcgttttcgaattaccaggtgcagaacgaagcgcagcgatacgcgttgagtcaggcgaaatccatcgctgatgaactgatgaccgggtgtacaaattttgcgttcagcggaaaacctggtaccgggaagaatcacttagcggcagctatcgggaatcgcctgctgaaagacggtcagacagtgattgtggttaccgtggctgatgttatgagcgccctgcacgccagctatgacgacgggcagtcaggcgaaaaatttttgcgggagctgtgcgaagtggatctgctggttcttgatgaaattggcattcagcgcgagacaaaaaacgagcaggtggtgctgcaccagattgttgatcgccggacagcgtcgatgcgcagcgtggggatgctgacaaacctgaactatgaggccatgaaaacattgctcggcgagaggattatggatcgcatgaccatgaacggcgggcgatgggtgaattttaactgggagagctggcgtccgaatgtcgtccagtcaggaattgcgaagtga

SEQ ID NO: 376925 - DNA, 801 bp, Salmonella enterica
atggcttcaaactggataaagctcgaggttattacgccggataagccggaaatattcaggcttgctgagattctgaatattgatccagatgccgcattagggaaggttattcgcttctgggcatgggcggatcaacaaatgatagacggtaatgcagattgtaacgctcgcggcgttacaaaaagtgcaatagatcgcatcacttttatggctggttttgctgatgcgttaattcaggttggatggctggtcgaaaatgacggtgggctttctctacctaactttgaacgtcataacgggaaaagctctaaaaaacgggcggttacaaacgagcgagttacaaaaatacgcgaactgaaacgaaaaggtaacgctggcagcgttacacaaacggatcaaaaagcgttaccagaggaagaggaagaggaagaggaagaggaagatataaatactgatctccccctaaatccccctcgccaaaaacgagcgtctaaaaaattcgagccggaggctatcgagctgcctgactggttgccggaaacactctggcatgagtgggttcagttcaggcaggcattgcgaaaaccgattcgaacggagcagggcgctaacggggcgatacgggaactggaaaaattccgtcagcagggttttacacctgagcaggtgattcgacacagcatcgccaatgaataccagggcttgttcgcaccgaaaggtgttcggcctgagacgttgctccgacaggttaacaccgtctcgttgccggacagtgcgatcccgccaggcttcagggggtaa

SEQ ID NO: 376926 - DNA, 423 bp, Salmonella enterica
atgaaaatcaggcatgagcacattgagtcagtgctgttagccctggccgctgaaaaagggcaggcatgggtagccagtgcaattactgaagaatatctgcgccagggaggcggcgaattgcccctggtaccaggcaaggactggaataatcagcagaacatctatcaccgttggttaaaaggtgaaacgaaagcgcaaagggaaaaaattcagaaactgatccctgcggttctggcaattcttccgcgcgagctgcgtcaccgactctgcatcttcgataccctggaacgccgtgcattactggcggcgcaggaagcgttgagtacggcaattgatgcgcatgatgatgcagtccaggccgtttaccggaaagcacatttcagcggtggtgggtcgcccggcgattctgtcgtagtgcattga

SEQ ID NO: 376927 - DNA, 465 bp, Salmonella enterica
atgagaagaaaacgcgaagaaatcgcatcgccggaagctacgcaacgtctgcgcgcaatctgggatgcaaaaaaaagagagctcaaactgactcaggagcttgctgccgagctaatgggttttgaggcgcaatctgcggttagccattatctcaacggaaaggctccacttaatactgatgcggcattaaaattcgctgtattactaagagttaagcctgaagagttgaggcctgatttagctgatctgatgaattacgtccgttcctcaggaacttatgacgaaagtttcgaaggcgaaggttggcggatggttaacaagcaacaagctgatttactagatctttttgatatccttcccgaatcagaaaaagcaaaactaatcgaaagacttaaaggtcagaatgaactctacaaagaagtatttgaaaatatgctggcagctcaaaaacgcatgaagaaatag

SEQ ID NO: 376928 - DNA, 153 bp, Salmonella enterica
atggatactatcgatcttggcaacaacgaatctctggtatgtggcgtgtttcccaatcaggacggcacattcaccgccatgacgtataccaaaagcaaatcgtttaaaaccgaagctggcgcacgtcgctggcttgccaaaaataccagctaa

SEQ ID NO: 376929 - DNA, 273 bp, Salmonella enterica
atgcaagagataagttttgaagtaacagcaaaagatgtacaggttaagcccgattacaatcaaaaattatgtattgaagtcaatggcgtgaagttatcagacctgattgattcagttgaagataacgacgctattattgaaatggttggagccgaagaaatagcagaatacttttcaacagaggggcgtcttcatgagcttctggaagaatttccatatcaggatatcgctacatttctggaaattaatggttataaaattaccgaggaataa

SEQ ID NO: 376930 - DNA, 237 bp, Salmonella enterica
atgaacactttgttcgctcttgtcatgaccgtttttctgacatcaggcgaaactcaggatgttgttaccggaatttataactccgaatctgaatgcaaggccgcagctattgagcaaaaagtagctggtgaatgtttccctgttgagaaatttatccggcctgtagatgaagaaattcccgcagacctcacaggagaaaatcatgaaaataaaatgtggttaccacctttgcaataa

SEQ ID NO: 376931 - DNA, 165 bp, Salmonella enterica
atgaaaataaaatgtggttaccacctttgcaataaagacgttgaagaaagcaaaaccattaaaagaccacttcatttcatgcgtggagttatcccaacgacggaaatgaaaaaatattgtagtgaaagttgtgccgaaaaagaccagatggcacacgaactttaa

SEQ ID NO: 376932 - DNA, 270 bp, Salmonella enterica
atgattaccagttatgaagccactgttgttactactgatgacatcgttcacgaagtcagcctggaaggaaagcgtattggctacgtgattaaaacagaaaataaagaaacccctttcactgtggttgatatcgacggtccatcaggcaacgttaaaacacttaacgaaggcgtcaaaaaaatgtgcctagtgcatatcggaaagaatctgcccgcagaaaaaaaaagccgaatttctggcaactctgattgcaatgaaatcaaagggtga

SEQ ID NO: 376933 - DNA, 3147 bp, Salmonella enterica
atgagcacaaaaccactcttccttttacggaaagcgaaaaaatcatccggtgaacctgacgtcgtcctgtgggcaagcgacgattttgaatcaacctgtgccactctggactacctgatcgttaagtcaggtaaaaaactgagcaactattttaaagctgttgccacaaattttcctgtcgttaatgaacttccccctgaaggtgagatcgattttacctggtgtgaacgctatcaactcagcaaagactccatgacctgggaactaaaaccgggagcagcgccagacgacgttcaccatcaggaggatgcacaggaaaccgaagaaccgacgggaggccaggaagaaaacgcgcaggcagacgcccacgaggattgccaggattgcgaagtctctgtagccactttgcggttcacacagcgtcttctgcacatttttacgtatgcagccggggatcgaaaatacctgcatcatgccacccgtgaacaacgcaaacacattactgctcttgagatggatcaggaaaacagctatgtccagaatctgctgttggccatacgcagcatggcagaaccgacaactctggataatgccgccctgctccgcctgactgatgcaattaaggcagtgttctctatcacgaaaaaacatcagccctatgaatttaagaatttcatttcagcctggctggataccgaacacattgatcgcggtcttctgacaaaagaatggcgaaaagggaatcgtgtttcacgcatcactcgcacggcttccggtgctaatgctggcggcgggaacctcaccgatcgcggcgaaggtttcgtccacgatctgacgtcactggcgcgcgatgtagccactggcgtactggcccgttcaatggacgtggacatctataaccttcatccggcacacgctaaacgcattgaggaaattatcgctgaaaataaaccgcccttttctgttttccgcgacaaattcatcaccatgcctggcgggctggattattcccgcgccatcgtggttgcgtccgtgaaagaagcaccaatagggatcgaggtcatccccgcacacgtcactgaatatctgaacaaagtactgactgaaaccgatcatgccaaccctgatccggaaatcgtggatattgcctgcggtcgttcctctgccccgatgccgcagcgtgtaacagaagaagaaaaacaggatgatgaagaaaaactgcaaccatcttgcgcaatggcagatgaacaggcaacggctgaaacagtggaaccggatgcaactgaacatcatcaggacacgcagccgctggatgctcagtcacaggtaaattctgttgatgcgaaatatcagaaactgcgggcagaactctatgaagcccggaaaaacattccgcccaaaaatcctgtcgatgcagacaaattactggctgtctctcgcggagaatttgttgaagggattagcgacccgaatgatccgaaatgggttaaggggatccagacccgcgattctgtgtaccagaatcagccagaaacggaacagaacgacccaaatacgcaacaaaacgagccagaaacgaaacagcctgagccagtagtgcaacaacaggaaacggagaaagtttgcaccgcctgcggtaaggctggcggcggcaactgtcctgactgtggcgcggtgatgggcgacgcaacgtatcagaaaacctttaatgaagaaaatcagaatgaatatcaggaaaaaggtctggaggaaatggaaggtgctgaacatccgcacaaggagaacgctggcagcaatccgcattgcgattgcagtgatgaagctggtgaaacgacagcacctgtagtaactgaaatcatgtggccgtcatatttcgagcctggccgctatgaaaacctcccgaacgaggtttatcactccgccaacggaataagcagcacaatgctgaaggatgcccgcatcagcctgatgtattaccacggacggcacattgccggaactattccgggcgaggaaagtgatgcattgctgcgtgggcggattattcacagctatgttctggaaacggataaattcgctgatgagtatgccattccggtaccggttcctgaatatgtggttactacttctaacgaactgatcgccatcattaaaaaacacaatgccagtctgccagcactgatgacaccagagcagatgaaagagtggatcgaaagctacaacagcactcttatacagccactgtcggtaagtgccggggccgaagaaacaggcatcctttacggttcgcttccggaggaattccggcgtattcctgagggggaaaaacacacagcatcagcaatgaaagcctgtattaaagaatacaacgcaagcctccctcctctgctgaaagccagtggaacacgagagcagctcctggagcaaattgaaactgtagatccagaactggcaaaaaaagaacgtgctaaatctttgccttacaacatcagtggcacaaaagagcaattaaccgaaatcgcccggaaaattcgcccggaactggtaacactggaggactggcaaaaacgccagcaagaagaaaacgccgggaaaacgtttatcagtccggatatgtatgaacaggcaaaaaatattcacgcagcactgcaaaacaatactgatgcagcaaggctactcaaccacccggatcgcaaatctgaaatcagctatttcgggtttgatgaagaaaccgggctggaaatcagggtccgtcctgatatcgaaatccggctgccatacgaaagcatttgcgccgacgtgaagtcagtcagcctcggttatgtgcgacaggaacgactgaaagatcgcctgcaccgtgaaattattgaacgtgattatcacctcagcgcagcaatgtattgcgatgtggcaaacctggacaaatttttctggatcttcgtcaacaaagatgctggctatcactgggtggccgtcgtggaagcctcgcaggaactcctggaacttggtcgacaggaatatcgccggacactacgacagataaacgaagctctggagacaaacaactggccagcaccgattaccgaaagttataccgacgaattaaacgactttgatcttcgtcgtcttgaagcactgagcatctga

SEQ ID NO: 376934 - DNA, 1053 bp, Salmonella enterica
atgaacgaattaactcaacaagaaaatattaactctaatgttgcggttttcagccctcagtccctggctgcaattcagacattttcccaggtaatggcttccggcatggctactgtaccggaacacctccggggaaatccatcagactgcatggccatcaccatgcaggcgatgcagtggcaaatgaacccttacgcagtagctcagaaaactttcgttgtgaatggtgtgctcggatatgaagcgcaactggttaatgccgtaatcagtactcgtgggccgctaaccgggcgtattgaatatgactggttcgggccgtgggaaaaaattatcgggaaatttgaaatcaggaagaacgacaaggggaaagaatatcgtgtacctggctggaagctggccgatgaaaacgggatcggagttcgcgtccaggcaacactacgcggagagagcaagccacgcgtactggagttacttctggcgcaggccagaacacgtaactcaacgttatgggccgatgatcctcgccagcagcttgcctatctggcactgaaacgctgggcgcgcctttattgccctgaagtgattcttggagtgtacacccgggacgaactggacgaaccacaggaaaaaatcattaatccggttcaggaacataaaaatacatccgcctgccgtgcggaacgtgaaacaacaattattgagcaggatgccggggaaaactggatcagtgctttccgtgaacgtattgagcaggcacaaagcaccggagaaacaacatcacttcgccaggaagtggaagatcataaaaatacacttggcgctctctacacagaacttaaaggaaaagtggttcagcgtcatcaccgtctcaatgctattgcccgtattgagacgatgataaatgacctgccttcatcaggtgatccagaagcagaacaaaaatttattgctctggaaaatacgctgaatgctgcacgaccacatctgggagaattatatgaggcgtataaaacgacactgacagatatgaaaccagaatatatcggctcctga

SEQ ID NO: 376935 - DNA, 189 bp, Salmonella enterica
atgtataaaattaccgccactattgaaaaggaaggtggcactcctactaactggacaaggtactcaaaaacaaagttaaccaaatcggaatgcgaaaaaatgctctcggggaaaaaagaagcaggcgtttccagagagcagaaagtaaagctgataaattttaattgcgagaaacttctgccctcgtga

SEQ ID NO: 376936 - DNA, 216 bp, Salmonella enterica
atggcacaagtgatttttaatgaagagtggatggttgaatacggtctgatgcttcgtactggtctgggggccagacaaattgaagcataccgtcagaattgctgggtggaaggctttcacttcaaacgagtatctcctttaggtaagccagacagcaagcgagggattatctggtacaactatccgaagataaatcagtttatcaaagactcatga

SEQ ID NO: 376937 - DNA, 240 bp, Salmonella enterica
atgagaattgaacttgttatcagccggacaaaacagcttccggaaggtgccgtgcctgcacttgaaaaagaattaattacccgtctccagaatcagtatgaaaactgcaacttaaccatccgtcgaggcagtcaggatggtctgagtatcgtcggtgctgctgatggcgataaaaaacgtatacagagcattctgcaggaaacgtgggaaagcgctgacgactggttttatgcatattaa

SEQ ID NO: 376938 - DNA, 498 bp, Salmonella enterica
atggcgatagagtatgttgaaggagtcaattatctttccattgaagatatcgtttacatcaacaggtctctgatcgagattcagacgccaaatgaaccgataggcgtactgaatccgaacaacctcagttcttcccagtcccggccaagcaccattcgatattatgagcagacagacgatatgtttcgtctgtctgctgttctaattgaaagcctaatccagaatcatccattcgcaaacgcaaacaaacgcaccgctatgatggcaggttacgtattcctgttgctgaacggatatgagcttacagcacctagtgatgaagttgtaaccatcgcagagggtttggctcgtaaagattacgcagtggatgacctggaaaattggttatgccactggtcacgcgagtatgattccagaacgttatgcgaaactggcggtaatatgattcaggctctcgtggcgacctcacgttacatccgaatcaaatcgaatgaataa

SEQ ID NO: 376939 - DNA, 180 bp, Salmonella enterica
atgggtcacgcattaaaaaaggcagatcgcttgtacattccgcctcgtgacaaatccatggtggcgaaacctcgtgcagcgatcagcaaagcatgttcacatactggtcaagttaaaaacgcctttgagtttgggtttgctcgttacgagaaggcgatggaagaactttcaaaggtctga

SEQ ID NO: 376940 - DNA, 573 bp, Salmonella enterica
atgaccactattaccaaagaatggctacagcaaaccatcgctgaatttgaaaacactcgcgatgatattccgtttggcctgagcgatgacgacgccaaaattcttattgtgctgaagcgtgcgctggcatcgctggaacgagaacaagttcgccatgaacatgctgactggtctgatgccacattcggcgatgttggccccatcggtccactgaagcacctctcaaaagaagcattggaaactgccgcagaacttggcgacctgagcgaatgggctgatatgcaattcctgttatgggatgcacaacgccgcgctggtattactgacgagcagattgccctggcgatggtggaaaagctggcggtgaacaagaagcgcgaatggcctgaaccgaaagacggcgagccacgactgcatatcaaagagcagccagtgccggtagtgccggaagaatgtccggaagaaatacgcgacctgatggcttcacattctgatgcgcttttcaacgacgacgatgcgcaagaaatctggaacgcttgtcgcgctgccatgctcaacggaggtaaatcgtga

SEQ ID NO: 376941 - DNA, 474 bp, Salmonella enterica
atggaatcgcaatctattctggatatgtgctgcggctcgcgcatgttttggtttaataagcgcgatgaacgcgccgtattcgccgatatccgcgccgaggagcatatattgtgcgacggtcgccgcctagtcatcagtcctgacctcattgctgattttcgtgcgctaccgttcgctgatgcgtcgtttccggtcgtggtgtttgatccgcctcacctggaacgtgtcggccaaacggcctggatgggcaaaaagtacgggagactcaacaaaaaaacatggcgttctgacctccgcgccggattcaaagaggcgtttcgggtgctgagggcacacggcgttctcattttcaaatggaacgaaacgcagattccggttagccagattttggcgcttactgacgtgaaaccaattattggccagcgcaccggcaagaacgataaaacccactggattatttttgtgaaggactaa

SEQ ID NO: 376942 - DNA, 201 bp, Salmonella enterica
atgactaattacggcacaacaacattaccaagaaccagcgttgtaccgggaatgctggttaagtaccaggggcgcacataccgcgcatctgcaaacgtaggaaaagggttgtacttgtttacccttttcgaacgcctgcggacaaccaacgacgagatcgaggtttacctcaaccaacacggcaaacctgcaacccattag

SEQ ID NO: 376943 - DNA, 297 bp, Salmonella enterica
atgaacgcatatctcacttacgaccggatcgaggctcaggactggacccggcattaccagcaaatcgccagagaagagaaagagtcagaacttgctgacgatctggagaaaggactgtcgcttcacatgctggagtcgctgtgtatggacgagctaccacgccacggcgccaacaaaaaagcgatcagccgggcatttgatgacgatgtcgaattccaggagcgcgcgtcggagtttgtgcggtacatggccgagacgttttcccggcatcaaattgatattgaatcagaggaataa

SEQ ID NO: 376944 - DNA, 786 bp, Salmonella enterica
atgagcacagcactcgcaacactggcaggaaaactggctgaacgtgtaggaatggattctgtagatccgcaggaactgatcactacattgcgccagacagcgtttaaaggtgatgccagtgatgcgcagtttattgcgttactgatagtcgccaaccagtacggtcttaatccgtggacgaaagaaatttacgcctttcctgataagcagaacgggatcgtccctgtggtgggcgttgatggctggtcccgtatcatcaacgaaaaccagcagtttgacggtatggattttgagcaggataacgaatcatgtacatgcaggatttaccgtaaggaccgtaaccatccgatctgcgttaccgaatggatggatgaatgtcgccgggaaccattcaaaacccgtgatggtcgtgagattactggaccgtggcagtcacatcccaaacggatgttgcgacacaaagcaatgatccagtgcgcccgtcttgccttcggtttcgcaggtatctacgacaaggatgaggccgaacgcattgtcgaaaataccacgtataccacagatcgccagccggaacgcgacatcactccggttagcgatgaaaccatgcgggaaattaatgatctgctgatcaccctgaataaaacatgggatgacgatctgctgccgctctgctcccaaatcttccgtcgcgatattggtgcatcgtcagatcttacgcaaatcgaagcagtgaaagccctcggattcctgaagcagaaagcagcagaacagaaggtggaagcatga

SEQ ID NO: 376945 - DNA, 681 bp, Salmonella enterica
atgacaccagaaattatcctggctcgtacaggtattgacgttagcaacatcgagcaaggtgatgacgcgtggcaccgtctacgcctcggtgtcatcactgcttccgaagttcacaacgtcatttccaggccaaagtcgggcaagaagtggactgatatgaagatgtcctactttctcacccttcttgccgaagtttgcaccggcgtggcaccggaagttaacgccagggcgctggcctgggggaaacagtatgaagatgatgcccgcaccctgtttgagttcaccactgacgtgaaagtcaccgggtcgccgatccttttccgtgacgaggacatgcgtaccgcctgttctcctgacggcctgtgcagtgatggccgcggtcttgagttgaaatgccctttcacctctcgcgactttatgaaattcaggcttggcggcttcgaggctatcaaatccgcctatatggcccaggtgcaattcagcatgtgggtaaccgggatagatgcctggtatttcgcgaattatgacccgcgcatgaagcgagaaggcattcaccacgtggttgttgagcgcgacgacaaatacatgtccctcttcaatgaaatggtaccggaatttatcgaaaagatggacgaagcgctaaaggagattggcttcacgttcggggagcagtggcgatga

SEQ ID NO: 376946 - DNA, 1065 bp, Salmonella enterica
atgagcaaaattggtgactatttctttgaattcccggcatcaagaggcttacagggaaatacggttgtgttgatgatgacagtcccagcgcgcgcgctaactcgcgttctggcatcagataaccacggcaatacgcttgagcgttctcagcgagaactcaatccagcgcgtgcgaagaagttttatgaatacctgcgaacagcttacgagaaaaaagagccgttcatcatcccgccgctggttggaaactgcgactcattcattgagttcgaagagtttggcaatacgaatgtgggtgtcgcgcgattcccaatggatgcggaaattaaactgtttgacggtcagcatcgcgccgcaggcattgcagagttctgccgcacttacggagagcctattcacatcccaatgatgctgacacaccaactgccgctcaaaacgcgccagcagttcttttccgacatcaacaacaacgtatcgaagccatcagcggccatcaatatggcctataacggtagggataaaattgctcaggatatggtttcgtttttgtcatcccatgccatgttctcagaaataacagactttgaacacaacgtggttccggcgaaaagcgatctctggattagcttcaaacccctgagtgatgcaactgcaaaattctctggtaatggggatgagcttgctactagtgacatctatgacatttgggaggcatggctcaagctaacagccatcaagggaattaggcatggttgtacgcctgttgaatataagcgggattacatccagttccacgcggtgatgatcaatgcgtttggctacgcaatgcaggaactactacggcatcgccctgcacacatcattgttcagatgattgaggagttagtaaataattccactatgagtgagctggagaatttcttcctcatttcatcctggtccggtgtctgcgccagcactgaaaaagatagagcgacagttattgccagcgttgcttcacaaaaagctgcttcggtgagactaatccaagctattacgacaaagagctttgaggtcgcagcatga

SEQ ID NO: 376947 - DNA, 243 bp, Salmonella enterica
atgatgaaacttattaacagaagtaagcaatcaccagtcggtcgtcgcgcatgtgatattgcactggctgcgcatcatgagaagttcggcgattacggcagacaaaagcacgttaccaattacaccgttgtagtggatggcgtaaaggttcctgtcgaagtagttaaccgggccaccagctacgtagccaccgcaatgatcggcgtccggaaacttagaaatctgccagcacaggcaaactga

SEQ ID NO: 376948 - DNA, 249 bp, Salmonella enterica
atgagcaacattatccaactgacgccaaacaagtgggttagcgaaaaagttctgattgcggttaccgggcttaagcccggaaccattacccgcgccagaaaagaatcctggatgctgggccgcgagtacctgcacatttcaccagacggaaatccgaagccttcgagcgaatgcatatacaacagagaagccgttgatcagtggatcgaggcgcagaaaaaaaatcaaccaggtgcgaagacaacatga

SEQ ID NO: 376949 - DNA, 477 bp, Salmonella enterica
atgggttattttgttgaaaaaatgcaggaaaatacccctaatattattgtggttgagccgcatcaggccaactgtctttatcaatccgcagttatgaatgatggtcaacctcactgcgtcactggcgatatggcgacgataatggccgggcttgcgtgtggggagccgaatattatcagttggcctattattcgggacaacaccagttgttttatttccgctgatgattgtctggcggctaagggtatgcgcattgctgccgcgccgcgtccaggcactgatacgccttttatttccggcgagtccggagctattggcgtagggttactttatgagttgatgaacaatatgcattatcaggatcttgctaatcgcttacagcttgatgccaatgctcatgttctgcttattagcaccgaaggcgatacgtccccagatatttatgaagatatagtctggaacggacgcagtgcttaa

SEQ ID NO: 376950 - DNA, 462 bp, Salmonella enterica
ttgccgcggctggcggaaggcattcggctgtggcgcgcgaatccgggagccaggctgatttttaccggcggcgtagcaaaaaccaatacggtaagcacggcggaagtcggcgcgcgggtggcgcagtcgctgggcgtaccgcgtagcgatattattacgctggataagccaaaagatacggaagaagaagccgccgccgttaagcaggccatcggcgacgcccctttcctgctggtaacctccgcctcgcatttgccgcgtgcgatgattttctttcagcatgccgggctgaatccgcttcccgcgccggcgaatcagttggcgatcgattcgccgctcaatccctgggagcgggcaattccgtccccggtctggctgatgcacagcgatcgcgctgggtatgaaacattagggcgactttggcaatggctgaaaggcatatcaggcaagccaggggagtaa

SEQ ID NO: 376951 - DNA, 450 bp, Salmonella enterica
atgtggcttcatgccgatcttctttcgcagcttgaaccggcgctaaataacgccttaaaggcgacccatagcgcagtactgtcgcctttcgatcctgtggtatgggatcgtaagcgggcagcgcagctcttcgcattcgactaccggctggaatgttatacgcccgcggcgaagcgccagtacggttattttgtgctgccgctattataccagggccgtttagtcgggcgaatggacgccaaaatgcaccgtaaaacgggggtgcttgaggttatctcgctgtatctggaggacgatattcgccctggcgttagtctgcaaaaaggaatctggcaggccattagcgcgtttgctgcctggcaacgagcatcgcgcgtgacgctgggacaatgtccgccaggcctgtttagcgccatgcgtcatggctgggaaatagaccctgcaccataa

SEQ ID NO: 376952 - DNA, 225 bp, Salmonella enterica
atgccagttacgttaagttttggtaatcgtcataactatgaagttaatacttcacggctaacccgtttgatgagtcctaataaagaagaagcgctatacatgggggtatgggatagatttaaggactgcttcagaacacacaaaaaaaagaggtgctggaggtattatatacactcatccatggatgtgaacgtgaaaatcaagctgaacttaatgttgatataa

SEQ ID NO: 376953 - DNA, 576 bp, Salmonella enterica
atgaaactgaatttaattgccagcgctctggttctgtcttctactatgctggtaggtaatgcaatggcatctgatggcaccgttcacttccttggtgaagtggttgacagcacctgccaggttacgccacaaaccgctgatcaaaacgttaatttaggcaaagttaacaaaacggcatttgctggcgtgggaagtaccgctgcgcctaccgagttccatatcgacctgaccgggtgcccggctacgtatactaaggctgccgttcgttttgatggtaccgaagcttccaacagcgatggcgacctggctatcggcaaccctgctaatggcgatgccccgggtgattacaccggtgacggcgctgccattacagcatctggcgtagcgatccgtatttacaaccgcgcggataactcacaagttaaactgtacaacgattctgcgtatagcacgattgataccacagcgggtacggcttctatggagtttatcgcgcgttatatcgccactgacgcaaccgtcactgcgggtactgctaacgcagattctcagttcactgtcgaataccaaaaataa

SEQ ID NO: 376954 - DNA, 687 bp, Salmonella enterica
atgtttgctcgtggaataaaaatagttattctggcactcctgtgccttaatcttccctctgcttttgcaggtattgtggtcggtggaactcgcgtcatttttcatggcaacgatcctgactctactatttctatttacaataaagaagttgatttgccttatctaatacaagtatgggttgatcctttcagtaaggatgataagagcaaaccaccttttaccgtcattccgcctgtttctcgtcttgagccgagtcaggaaaaagtgctgcgcattattaaaacagcgggtgagttgccaaaggatcgcgaatctgttttttggtttaatgtgaaaaacattccgccatccagtaaaaataaagatagcagtacgcttgagatcgcaattaaaacgcgtatcaagttattctggcgcccggcctctattacgcttatcccggaaaaggcggtagctaaagtcaaatggtatcgacagggaagtaaactggttgtagaaaataatagtcctattcatatgaatatcatggatgtctctgtagacggtaaagatgttccattgaatatgataaagccttttgaaaaattaacgctggatttacctactggtgttacggggcacgctttagcctggcgttttattaatgattacggcgcgattagtagccctgttaagcaagcgctttag

SEQ ID NO: 376955 - DNA, 513 bp, Salmonella enterica
atgattcaccctcgtctttgcctcgtcttgatttcaggtgcttatctgagtatcgctttcccgacaatggctagggaaacgctatttaaccctggtttgctggaaatcgatcaccccgtggacgtggatattcatcagtttaaccgttccaacgcgttgccgccgggcgattataaggtcgatatcgtcattaacgggaaactgtttgaacgacgggatgtgacctttgtgcaggatcaaccggatgccgaactgcatccctgctttgtcgcggttaaggatgtattgtcgtcgtatggtgttaaggtagacgcggtgaaaggcttgcaggatgtcgataatacagcctgcgtgaatcccgttccgttaattgatggcaccacctggttattagatgcgaataagctggcgttaaatatatctgttccacagatctatctgaacacggcggcctatgactatatcagcccgtcacgctgggatgagggcatcaatgcgatgatggtcaattaa

SEQ ID NO: 376956 - DNA, 1920 bp, Salmonella enterica
ttgcgtaactacagtacgctgagcgccaccggcagcgacacggaatatcactccatcagtagctatgtccagcgcgatatcgccgcgctgcgcagccagattatggtcggcgacacctggacggcgagttatgtctttgatagcgcccagatccgcggggtcagactctataccgacgatgacatgctaccgtcgagccagaacgggtttgcgccagtggttcgcggggtggcgaaaagtaacgccaccgtcatcatccggcagaatagatatgtcatttatcagtcagccgtgccgcagggcgctttcgagatcaccgacctgaacaccaccagcggcggcggcgatcttgatgtcaccataaaagaagaagacggcagcgagcagcactttacccagccgtacgcgtcgctggcgatactgaagcgtgaaggccagaccgattttgatattagcgtcggtgaaatgcgcgatgaaagcggatttacccctaacgtcgttcaggcgcaggtgttgcatggcctgccatggggattaacgctctatggcggcacgcaggttgcggaagattatgcttccgccgcgcttggtatgggtaaagatatggggtcgatcggggccgtatcgtttgatgtgacccacgcccgttcacactttgacgatggtgataatgaaagcggccagtcctggcgttttctctactccaaacgttttgatgataccgacaccagtttccgtctggtggggtaccgttattccacggaaggctattacaccctcggcgagtgggcatcgaggcaggacaacagctctgatttctgggagacgggcaaccgccgtagccgcgtggaaggaacctggacgcaatcatttggccccggttttggcaacatttatctgacgttaagccgtcagcaatactggcaaacggatgaagtcgagcgcctggtgcagtttggctatagcaatagctggcggcgaatttcgtggaacgcgtcgtggaactataccgactctgcgaatcgttcttccggcagcaataataaaaacgacaacgatgacagcgatcacgaacagatattcatgctgacggtttccatcccgctttcaggggcgaaggagagcagctacgttaactactcgatgacgcaaaataatcataacgacagcacaatgcaggctggcgttggcggcacgttgctggagggccacaatctttcctataacgtgcaggaatcctggaccagtacgccggaggatacctatggtggtaacgccagcatggggtatgacggtacttatggttcagtaaacggcggttatgcctggagccgtgattcacaaacgctgaactatggcgcccgcggcggcatcctggttcacagcggcggtgtgaccttctcgcaggagttgggggaaaccgtcgcgctggtggaagcgccgggtgctgatggccttaccgtagaaaacacgactggggttgctacagactggcggggctatacggtgaaaacgcagcttaacccgtacgacgaaaaccgcatggcgattgacagcaactattttgccaaagccaatattgagctggataacacggtagtcaatctggtgccaacgcgcggcgccgtggtgaaagcggcgtttgtgacgcatgtcggttatcgcgtgttgtttaatgtgatgcaagtgaatggcaaacctgcgccgtttggcgcgatggcgtcggcggagctggattccggaacggtaaccgggattgtcggcgataacggcgaactctatttatcggggatgccggaaaacggtcatttcactctaagttggggcggtgatgaatcaacaacatgtgccgttaattatacgttaggtcataaaacagagaatgctgaactggtgcagcaagccgtcacttgccaataa

SEQ ID NO: 376957 - DNA, 1068 bp, Salmonella enterica
atgcgcttatggacaataatattattttcatgctttatggttcttatttcgcctgtttgccgggctggcgatggcatttgtcatgcggttaaagggacttatatttataaccttaatctcaatgacgcccggattcccgcagaaaaaaataaagccggaacagaggtcagggatctggagacattaacatcgtcagaatcatataaagttggctgtagctgtttgacccatttttcatcgacgtttcgtgaagtctattataccgctcgttcgccgctgagtattgataccaccagaaatggttacacctactatacgcttaacgataacctaagtattgcaacgtcgattgctgttcttggacgaggctttattgcggttccctttgaggctgaacctaatgtagtaaaagatgggatgaattgttataccgataccgttgagggcaatctcgcaacgttatataccgggtcggaggtcaaggtctctttccttatcaataaaccgtttgtcggtcaggttgccattcctggcacgattgtggctaatttatacggggggcttgatgccagctcctcgactgccagtaccgacaaattggcggaagtcagaattgttggcgatatcgtggcgccgcagagctgtgaaattgattccggccaggtgatagaggtgaatttcggtaagatcccggttgcggatttctcgacaacgcaaggcaccgctgctgcgggtcataaagtgactaaaacggtacaggtgaaatgtaccggaatgttggatgagaatatcgtctattcgacatttaatgctgatcccgttgattccagcgcaaatatgatgaaagttctgggtaatgatgatgtcggaattatgatttatgacaaatgggatcggatggttaaggtgacaggcggaaaaatggatatggatatgggcgtcaataatggcggcgccgagactaactcattgactttttctgccgcgcctgccagcgcgacgggagcgcggcctcaacctggtacatttgaagcttacgccacgatcacgctggaaataacgaactaa

SEQ ID NO: 376958 - DNA, 1140 bp, Salmonella enterica
ttgaaccgctgccattgccgacagttgctttgcgtcgccggtgtgctgtccggcgtggcgcaggcggcgctgcccagccgcagtcaggtggacggctggctacaacaaatgggggatagcgatacttacgatgccgccaaaggcgtcaactggggagtaatgcccgggccattttatacccctgaactggggctgggcatcggcaccgccattgtcggtatgtatcgccccgatcctgccgataaggttagccagatatccacgctgtcgctgagcggctattttagctccacgggcgctttcggcgtaagcctgcaaaattacgcctttttcgcgcaagatcgctggcgtttcttccttactggcgcattgagcgacacgcccacttactattgggggcagggttttgccgccggtgataaagacagccataagcaggcctataccgcgcaggtgctggatctgcaacccatgctgtatcgtcggctggtcaacaatatctatcttggcgttggctggacgctggatgtacagcacgccgcgcaaatcaatgaggacgatccgcccagaattcaacatacagcgcagggcggttcttcactgagtaacggcggtagcgttgagattagttgggacgaccgtgattttatgcctaacccacgcaaaggacagtatgccacccttcgctatacccacttcgcgccagacatcggtagcgatacgcggttcgatgaataccagttgcactacagtcaataccacgccgttgatgataaagacgtgctggcctgggaagctgacggtgcctttacccagggctacgtgccatggaatatgctgccgctgctgggcagtaaccatcgtatgcgcggctattatgaagggcgctatcgcgataaaaacgccgtcagtggccaactggaatatcgccataagttgagctggcggcatggcgttgtcggttgggtgggagcgggcaccatgggatcgtctttgcaccatctggatgacgggcgatggctgccttctgcgggcgtgggctatcgctttgagttcaagccgcgcgtcaacgtgcggctggattacggcgtgggcaaaggcagcagcggtttttattttcaggtaggagaggcattttga

SEQ ID NO: 376959 - DNA, 186 bp, Salmonella enterica
atgaacagatatgaacagaaagagaccgcgcgcaggatgtcacatcacattgttattgttgaggatgaacctgttactcaggccaggttacaggcctattttgagcaggaggggtatcgcgtttcggtgaccgacagcggcgcgggcctgcgcgtgacatcatggagcatgagcacgtttcgctga

SEQ ID NO: 376960 - DNA, 1260 bp, Salmonella enterica
atgttgactgacagcaagatccgcgccgcgaaacccctcgcaaaatcctataaactcactgatgcacaaggtctgtacctgacggtatccaccagtggttcaaagctatggtatttccgctaccgttttgaaggtaaggaaaatcgtctggccttcggcccctatccgcaggttacgctggcggaagcccgcgaaaagcgcgatgcggcgcgtaagctgctggtatccggcgtttgcccttctctgccccgcaaggcggaaaaagccgccgttgacggtacgcgcacctttcagtacatcgccacggcgtggcactccagttgtcttaagctgtggtcagaagaccacgcggacaagatcctgacctgcctgaagcgctacgtcttccccgatattggcgcaatggacattgcagaggttgaaacccgccatctggcgcagcttgttaaatccatcgacgataagggcgtgcatgacgttgccgggcgggtgcgccagcatctgaccaaaatcatgcgtcatgccgtacagcagggaacgattaaatataatccggcttacgatctggatggcgtcgtgacccctgttgtgacccaacatcaccccgccctgcccctgaaacgcctgccggagctgctggacaagattaatggctacaaagggcgggaactgacccgtctggcgctggagttgaatctgcacgttttcctgcgctccagtgagttacgcctcgcccgctgggatgagttcaacctgaaagctcgtatctggacggtgccagcaaagcgggaagcggtgaagaacgtgcgtttctcagagcgtggcgcaaagatgaaggatgagcatctggtgccgctatctgcgcaggctgtcgccctgctggagcagataaaggaaattaccggagagtcggtatttgtttttgcgggtgctcactcaatgaacaagccgatgagtgaaaacaccatcaacaaggcgctgcgcgtgattggttacgacaccaaaaccgaagtctgcggtcacggattcagaacgatggcctgtagcgccctgaacgaatccgcactgtggtctaaggacgccatcgagcgccagatgagccacaaggagcgcaacggcgtgcgggcggcgtatgtgcataaggcggagcatctggaagcgcgtatggagatgatgcagtggtggtcggattatctcgacatgagccgcgaggggtacgtcgcgccgtatatttatgcgcggcggcataaggctgcctga

SEQ ID NO: 376961 - DNA, 1098 bp, Salmonella enterica
atgatgaaagagaaaaaaacactgctcaacaataatgagaatggaactggcttaccatccaagccctcaattatgagtgaaaataaactccagaacacagtgttttccgctattggcagtgcatccccagctcacaagctggtacagggctccagcgctgccgctttcctgaaaaaccatgaatcacttcttgccggtaccgctgtcagcagcgcattcgcaactcagaagccggcacagggctccagcgctgctgctttcctgaaaaaccatgaatcacttcttgccggtaccgctgtcagcagcgcattcgcaactcagaagctggcacagggctccagcgttgccgctttcctgaaaagccatgaatcactttttgccagtaccgctgtcagcagcgcattcgcagctcagaagctggtgcaggactcgggcattaccgctcttttcaaaaagcagggggggatattcaacgaaaattatttcgctacaagcattgctaaacaattagaaaaattagatgcaaccgaaattcaaacattacaggaagcggccattctattttcacgctcacctcaaggtgcagcaattattgcaacaaatatccatgcagtagaagtaaaagagcctgacgcattaacaaaattaaaaaattatatcgaaaaaagccctataacttcaaactttagaaaattaccattattagtacaactcatcatcatttatcttgtaaccaccatgtattcagtcgttgtggataaaaacaaagaattagcaatgaatttaatggaacaagcgcaacaatatgttagtaaatctatatcaccaagaactcattttaaagaattaacaaaacagttaccccgcgaagttgacattagcacattaaaacacataagaataattactggagaaaatgtccgattacggaacacaccatcaatgcaaggcgatgtattggttaagttggaaaaatatactcccgtgatcgttatcgataaaagtgacaggaaatggttatatgtacaactgtcattcggagaacaaaagatctatggttgggtcaatcgttcctatacaaaagcaataaatcattaa

SEQ ID NO: 376962 - DNA, 462 bp, Salmonella enterica
atggctacgaccctcacccagacacacccgctactctccgttcccttcaatgccgccacggatttcaccgtactggcagaacactgcaaacagttcgccgaaatcctgatcgaacacgacgatcccacgctgaaaatggcactttgcggcaggcttaatgcctgtctgcaacttcttcagccctcactgcttgatccgatcccggagcacatgatggacagcctgatcgttgatacgctccccacccgctcaccgcgtttcgatcccgaatgtactgaactttgtaactactgccttgccctgacgcaggtgctgacgggacaggggctattaccggaaaccagaaattaccttggctgcctgctgtacgacctgatccattatttttctgatgaaatcacggccccgcgctggctgcgtaccgctgacggcgtgaagtttattgacgaggtgacagcatga

SEQ ID NO: 376963 - DNA, 1674 bp, Salmonella enterica
atgaattcaatcttctatcttgaacgtcattttacgcacggtgacagaacctacacagagacagagttgctggcggcatcaacgcacgttgttgtgttagcagaacccggcggcgggaaaacggaactgatgaaaagcctcgctcggaaactgaacactactgtcttaaatgccagcgtatttgcttacgcaggagcagataaagaaaatagcgcactggtaattgatgccgttgatgaagtcgccagaattgatcaatcaggtattcataaactccttgctctcgccagaacatcaaagccgactcgcgtaatcatgtcaagtagatcaagcgaatggggacaggcttgtaccagcatttttgaaaaatttcttggtttctccccgatggttgtgaggctgaaagaattcgatcaagacgagcaacacgctatctttaagcaccatgcgccagaagaagacttctttgcattccagaccgaagtaacacggtttagtttagacatgttgttaccaaaccctcagtttctgaaaatgttcaccgatgcctatttagaaagtggcaggcgatttgctgacaaacgttcaatctttgctttagcagtcgaacgactggctaaggaagtcaatccagatatcccgaaagcccctgtatctctttcagttgcacagaagatttcattttctgccgaggtttatgccaaacttctgttgtcgggcgcagagggagtcagcaccatcgacgtgacggcaaaccggatgtatcccatgctgccagcgttgtttagcagcagtgcggcctgttacgacatattgtcaactcagcttttcaagcccggcgataaggaagaccagcaccgcccggtccacaagattgtcgctgaatactgcgcagcggattatctcattaaacgaatagccgatcctgtggatgtcctcactttaccaaagtgcttgcctgttattgcaccgaacggtattgccagagatgagttgagaggtctgctcggatggatggcagcattaggcaacaggtcggtacagggatccattattgagcttgacgcctatgcggtactcgcaaacggcgatccatcgcagcttgaacgctcatcaaaacgacagcttctctatcaactcaaagagattgaagccgcagatccttactttcgtcggagtgatttctggcgccggttcaacgcggctggttttttcacgcaagacgttgttgaggaaataaagcctcttttaacgatgggcaatgatggtcatttacgtgatttaattttagaacttctggcagactctccagtaaacagtcagttggtgcctgaattgagccagcttacgttaaatcccaatgagtctgaacatattcgaaccctagcaagcagatgcttactcaatatcaaagaatacgattgcattggcgctttagctgttttgatttttgaggccagtaatatttcactcaatattgcagccaacgtcatcgaagtcacagggcccgaaaaattcgaccaccgatatctctctggattcttccgcgtctgtgcgaatctctatcccggtcacgaagaacaattcgaaagagtggtcggcctcgttattttattaaaaagctcatttcctgtttttcactgcatactctcgaacttcttctggacgaattaa

SEQ ID NO: 376964 - DNA, 2286 bp, Salmonella enterica
atggtcgatcgctattttgaactggctcaagcaccatttgatcctgtgaggatctggcaatggataggtaatctcaattttcatcaccaatgtcaggccgatcaaagcaaatcggtacaagtgcttcgggaaaatgacacacttcgtcaggggatcattgcctatgtatttgggcctttaacggatcgtaatgaaatattcaacacaagagtagaaaagttcgacgggcatctgcactcacattcaggccttcatttatggaggaatgactataaatttatcctcaatctggcttttgaagcagataacgttgacctgtgggcgagtttccttgtcaaccaccaacgttacagaaacaaggaagagcaaggccctgatgatttgcgggcacaaatgcgtcggcatgccctctccaagcccgcatttatgcgtgaatgggcccgatacaacaatgcaatgaaattatccgggcagaaaagccaactccggagattcagacatagccgaaaaatgaaacgccgtgacagaaagcaacgagagatccacgccagaaacataaaatttgttaatgagaacagagatattgtagagcgaggtcgtcactggcggtgcctgctgcgttttgcagaacttgtgctcatgcatccggaaagaattgaattagaatttggtgacgagaaactggttcggacagcgttgcgaaattgtctggattttattactcccgaggttcccactctacccgaactagcagcactgcaatgcgaatctaaatacaggcattctgagacggttttatatgccgcctgtctggagattctacgtgcagaaggcaatcttgaatgcgtcaatatcgagttgcttacagccttaagaacgaacattcacaggggataccactcagtttcgaaagaagaacgtgatgcgctacagactgaaatcgaccgcctcatttttccttatagtgaaagtgctgaaaaatatctccgacagtacgttgaaccccaactcactcagccatgccctcaccctgaaatcggggtattaagtagacaagaggtctttcgtcattcacgcgctaaactttccattgaatggcttcgtcgttttcccgatgtatcccttaattcagtcgatacactttttgaaattgccgctcaatacggcgatcgtgagaatttaaaagagattattgcagagcgttgctcagagatgatgtcaggctggcccaatccgaaagaaaatgaggatattgaacgcaaacgaatattctggctggtacgtgaattctactttatggagaacattgcggatacttattgggcatggttaaaatctgataaaaataatttactgcatttttatgaacgttctggacgtatgaatcgaagcgagcaccgtgcctggccggaactcgcctcaattaaagttgaagccattttagacgctttcattgaacactggccgcgagttgatctacctgatagctggggtagtgatagccctaaagaagagaaagcctaccgctttttgactgatttgatttggtcaataaactcggacacttccgatgatgcaataccagtgctggaccgtcttcttaacgatccacgtttcaccaatctacataaagagttgcaaagcatatacgctgatcagatcagaaaaaaagcactcagagattttgaaccaccgacgccagatgagatagttcaacgccttgattgtgattcagtcgttaccgttgaaggcctgcgtcagttagttcttcaggagcttcatgattttcagaaagcgattgatggcggggaatttaactcggctgatcgcttctatgagaaaaatgaacgcctcgatgaggtaaagtccacagagattattgcggagcgcctgagtttaagacttcagcctcagggtatcgctataactccagagcatcagttgaaagggcaaaacaggagtgatttcacagcatctaaattgattggaggaagaagacggctgctggttacggaagtcaaaggccagtggcacagagagttatattctgctgcttcagcccaactctatgaccgttattccattcaccctgatgccgaacagcaaggtatctttcttgtcatatggtttggagaaagcgaaaccgttgctggccgcaaaacccacggaattaaaaccgctcaggagctaaaaattagtattgaagcagtactaccggctgatctccgtgatttaattgatgttttcgttttagatgtttcacggaacggtggccaccaacgttag

SEQ ID NO: 376965 - DNA, 453 bp, Salmonella enterica
atggaacaatgtaaaaatgacgctatattagaacatatcaagaattatagtaaacatattgatgaatttagatctcaggcaaactcacaagggatttggttatttatttcaactcttggatgttggagcgtaaatataccactaattcaagttatcgcggcaatcttgttattctgcatatttatatttaattccaaacaggacatgacagaaaaaagagcgtttcataaaatagaagaagacatagcaaaggatattgatagtaacttaataggagactccaggaaagccaggctatatgatctgggattagttgaaaaatatagaaaagcaattaagccagttttaaaaacctcaccaatatttattgtgtgttatattttctattctattagtttcttggtctttttttctaatctttttccccggatgaagttaatttttaacttttga

SEQ ID NO: 376966 - DNA, 489 bp, Salmonella enterica
atgatctccgcccctgaaccgcttcatgccgggcatattcttacccccttctgctgcggtgtggattcaatggataactggctaaaacagcgggcgatgaaaaatcaggtaactggcgcatcccgtacctttgtgtgttgcggcagcgattctgacgtactggcgtattattcgctggcgtccagcgcggtaacgacaaacaccgcccccggtcgctttcgtcgcaatatgcccgatccgatcccggttgtggtgctgggccgtctggcggtggatcggtcgctacatgggcagggcgtaggtcgggcgctggtgagggatgccgggctgcgggtgattcaggtggcggaaactatcggtattcgcgggatgctggtccatgccctgtcggatgaagcgcgggagttttacctgcgggtggggtttgagccgtcgccgatggatccgatgatgttgatggtgacgttgggggatttggttcatgcctga

SEQ ID NO: 376967 - DNA, 294 bp, Salmonella enterica
atgccagtcgcaaacagtatggcgatgaaacgcgaaaccctgaacctgcgcatcaagcccgccgagcgcgatcttatcgatcgggctgcaaaagccagagggaaaaactgcacagactttgtgctagaagctgcccgcgccgccgccgaggaagcgctgatcgagcaacgcatcattatggccgatccagaggcttatcaggcatttctgatccgtctggatcaggctcctgcgccaaacgatgcgttgcgtaaaaccatgcagactcctgcaccgtgggagcaggaaaaatga

SEQ ID NO: 376968 - DNA, 1014 bp, Salmonella enterica
atggaaacaaatattacctggcaacaattgatagatgaatatttcttcgcaaaacctctgcgctcagcatctgaatggagttacaccaaagtcttcaaatcatttgtacattatatggggccgttaagctgccctaatgatgtgacatatcacaaagtgcttgcctggcgccgttttcttttaaaagagaaaaagctgtccggacgtacctggaataacaaggtggcgcatatgcgggccatctttaactacggaatacagcgagggttactgcactatgacgaaaatccgtttaacaattcggtagttaaaccggacaagaagagaaagaaaacgctcactcaggcacagattgagtatgcctatcagatcatggagcagtatgaaaatcaggagaatacagggctgggactgaaatattcccgctgcgccttatttcctgcatggttctggctcactgtcctggatacgctctattacacagggatacgtcagaaccagttattacatattcggctgaatgatgttgatttgagagaagggcagattcggctgattacggaggggtgtaaaaatcacaaagaacactatgtgccggtgatcagttttctgcgtccacggctgacctgtttaatggagaaagcgcagagcgaaggattgaaaggtaatgaccgcctgttcaatattgcactttttaccggcaaagatcccgccattggcgatgacatggattctcctcaggtaagagcattcttccgtcgtctgtccaaggagtgtcagtttgcgatcagtcctcatcgtttcagacacacgctggccacggagatgatgaaaatgccggaacagaatctgcatatggcgcaaagtgtgctgggtcattcaaacatgaaatccacgctggagtatgtggagaatgatattgcagtgatggggagggctctggaagcgcagtttatgcagattaaggcagcacatgcccgaagcatttacagtgggttgacaaagaatagataa

SEQ ID NO: 376969 - DNA, 1590 bp, Salmonella enterica
atgttccggaaagttaagtcatggatggagaagaaaaacttcagacagatagaagaaaataaatcgggaaatgcgaagaagagacttattccctgtacggatggatattttaaccctgcggccatttcagatttgttacagcatgaacgacggcagcaatggttaaggattttgtgggagaacagcgcgctacctaaagagcgttttgaacgttattttttactccctttacacggcgttgtgggtttatgtcagagactcccggcttcggctcagggaaaatttgcctatacagacggcatggtggattacgtcatacagacgacggtctttgccgtacgtttatcaaaaggatatatgctgccccgaggtgcatctgcagaggaacaatccgcgcagtcagtcagctggagtgctgtcgtttattacgctgcattattccactcgttggggcgcttatggaatattgaaggcgagctccgtagtggtgctgtatggcgcccgggattaagtgttccggaagaaccttatcgttttcgttttaaagcagaacccgatatagcaggtgctcaggtttatggtgaattgatcgctctcagatttttgccagaaccggttcttcagtggctgggtaaaaaccctgatattctgagaacattgctggctttcataagcggacgttacagtgatgcaatggatattacggatatcgttaatgaggccattgtgcatgccggagggatacctcttggttttcccattgcacaggaagagcagacttctgaattagcagagatactaaaccctgccgcgacagtagctcccgtgttgaggaaaggttcttctacaactcctcctgatgtccctgtcatggttgatggagggcaggagactactgtccttttatcttcccttgattctgatgctaagcctgaacgtggggaagggcagcctactgctgaaacagatccagatgttcttcaggtcatgtcgattctgggagggctgacgaacactgacacacagtcgcctgaaaaggaaggcgtgaacacagagaccgatatggtggcaggagaatcgtttccggaagtcgcggttgcacttgagacttcagcagcagaagaggttatcaatgacaccgttaccactgaatgcactggatcatcctcgggtggcatatcatcgctttcctcaacggagctgggagatttgttctggtcctggctaagggatgggcttcgtgagggggatataccagtaaatactgctgatgcctgtgttcatctgacttgtggcttcgtatttatcagcgtcccgggtgttttttttctgtttttgaaatcacattcgcgttcctgttcttctggtctgaaagaaagcgggaggaaggagcaggtgcaggcggcatttgagaagatgcgaaagcatcgggtcagtgattcccggcgattctggcagtgctgtctttatgaagagccagggggcagggggagatacaaaaagttaacagggtatctgataaaaatgtcagagatttatgctaatggtaactttcccgacgacagtttatttctaaaggtcatcaattga

SEQ ID NO: 376970 - DNA, 1512 bp, Salmonella enterica
atgccccacactgatactcctgaacaggctgctgtcatcgcatggaagggcgaacgtctggttgtctgtgcttttgccgggagtggcaaaaccaccacacttcgtcgttatgctgaggaaaatccaacggaacgaatgctctatattgcttataaccgtgccattcgggatgaggcggagcagaaattccccttcaacgttacctgcaaaacatcgcatcaactggcctggccgacggtcgggaaacattacagtcatcgtctgattaattcactacgactgacctatgtcgcccgggcgctaaactcccgcaactggttgctggccagactgacgcttgatgttctgaatcgctttatatgcagcgcggccaccgatattacgcctgaacacatgcctgatcctgacgactgtaaggggctacaaccaggtcaaatcctgttttcagcaaagaaaatctgggcaatgatgtcggcccgtcagggggattttccggtcacccatgatacttatctaaagctttaccagttgagcaaaccgaatctttcttcccgctataccacgttattgtttgatgaagctcaggatgccaatcctgtcatcagcgccattgtgctcaaccagacctgccgggtagttctggttggagatactcatcagcaaatctaccgctttcgtggggcggataatgccatgcaggctccgcaactggagaactcagaccgtctttggctaacccacagctttcgcttcggtccggaggtagccggggtggccaacaggctgctggccctgaagggcgaaacgcatcagataactggaaaggggggcgcaggccgtgttctgctcacaatgccgcggaattttggccatcatgctgttcttcaccgatctgtctgtggtgtcatccggacggcactgcactggtcgctggctggcaggaaagtattctgggttggtggtatggaaagctacagaattgaggatttactggatctgtactggttctcaattgatatgtcggagcgtatgcgacacgacaggctgacccgtgaataccgggactatgatgaatatctgcagatagccgaagataccggtgatgtggagatgaagcaggggatatttattcttgaacagttttttccgttaccggacagactgaatacgttacgtgagcaacgcgtcatcagtgaatctgaagctgatgtgacggtatgtacagcacacaggagtaaggggctcgaatgggacagggtgaagttacatgatgactttctcgatattctggatcctgacatgccggaaagtcagcggcaggatgaaattaacctcatgtatgtggcagccacccgggcgcgtaaagtgcttataaccgatccgatattgcacgagcttctgatccagccccgggctgaagatatagccggaacttctgcggataaatcgggtgagtcagaagtgagtacagaaaacgataaaaaagggactgaatatgttccggaaagttaa

SEQ ID NO: 376971 - DNA, 189 bp, Salmonella enterica
atgaccggaaaaccgtcagaacgtcatactggttttataatttccggtgaaatgatggtgcgtgactgcttcggaaatgaataccttattcatgccggcgaagcatttgaggtttctgagaatcatgatgcctgggtagtgggtgatactccgtgtgttgcgctggatttcacgcatttcctccgctga

SEQ ID NO: 376972 - DNA, 540 bp, Salmonella enterica
atgaggtttcatcatttctggcctccgaatgatatctatttcggggttggagctgctggcattattgaagaagtgtcactgataacaaatgacagaaattatttgtttgtgaacctaaatcgctacagcctgttaaatgccctgaattttttcacgcgaatgagtgatattaataaaataatcgttatcatttcaagttcgcgactaatgccccttgcacgtttttggttgacagagtgcaaaaatgttattgctgttttcgatgcggcaacatcagtccaggatattatcagaaatgtcagtcaacaccaaagtggtgaaaagatcttgacggagcagagagattatcgtttcagaattaaccgtaaggatatagtaaagatgaaatatttcctttcggaaagtggtatggaagagcttcaggatagatttatgaactcatcatcgactatgtatcgctggagaaaagaattggcagtaaaatttggagtacgtgagccgcgctatctgttattgccggattcagttactttactgtaa

SEQ ID NO: 376973 - DNA, 1278 bp, Salmonella enterica
gtgttcggtatagacgaggtaaaaatcgcgattattgggctgggatatgttgggcttcctctggcagttgaatttggcaaatctcgtcaggttgttggcttcgacgttaataaaaagcgtattcttgaattaaagaatggggtggatgtcaatctggaaaccactgaagaagaattacgtgaggctcgttatctgaaatttacttccgagattgagaagatcaaagaatgtaatttttacatcatcaccgtcccgacgccgataaatacctacaagcaaccagacctcaccccactaatcaaggcgagtgaaaccgttggtacagtgctgaatcggggagatattgtggtatatgaatctacggtatatccgggatgtaccgaagaagaatgcgtgccgatccttgctcgtatgtccggaatgactttcaaccaggatttctatgtcggttatagcccggaaaggatcaatcccggtgataaaaagcaccgtttaaccaacatcaagaaaatcacctccggttcaaccgcacagatcgccgaacttatcgatgaagtatatcagcagatcatcagcgcaggtacatataaagcagagagcatcaaagttgctgaggcagcgaaggtgattgaaaatacgcaacgcgatctgaatattgccttggtcaatgagctggcgattatttttaatcgtttaaatatcgatactgaagccgtgctacgtgccgctggcagcaaatggaatttcctgccattccgtccgggactggtcggtggtcactgtattggcgtagatccctattatctgacacataaatctcagggcattggctattatccagaaatcatacttgcaggacgccgcctgaacgacaacatgggcaactatgtctccgagcagttgatcaaagcaatgatcaaaaaaggaattaacgttgagggttccagcgtgctgattctcggctttacctttaaagaaaactgtccggacatcagaaatacacgcattattgatgtggtaaaggaactcggtaaatatagttgtaaagtggatatttttgatccatgggtggatgccgaagaggtaagacgagagtatggcattatcccggtatcggaagtcaaatcaagccactacgatgcgatcattgttgcagtaggacatcagcaatttaaacagatgggaagtgaggatattcgcggcttcggaaaagataaacatgtactttatgatttgaagtatgttcttccggctgagcagtcagatgtgagattgtaa

SEQ ID NO: 376974 - DNA, 1047 bp, Salmonella enterica
atgacggcttacgaagaactacggaccaaactggttctggcaccaaagcgctggctgatcactggcgtagcaggctttattggctccggcttattagaagaattactctttctcaaccagactgtcattggactggataacttttccaccggttatcagcataatctagacgacgttcgcacgtccgtcagtgaggagcaatggtcgcgatttatttttattcagggtgacatcaggaaatttactgactgtcagaaagcgtgtaagaacgttgactatgttctccaccaagccgcgctaggaagcgtgccacgttccctaaaggatcccatcgcgactaatagcgccaatattgatggttttttaaatatgttgacggcggcgagagatgctcatgtctctagtttcacctacgccgcaagcagtagcacctatggagaccatcccgatttacctaaaattgaggaacggatcggtcgaccactcagcccgtatgcggtaacaaaatacgtcaatgaattgtacgctgatgtgtttgcacgtagctatgaatttaacgctattggcctacgctactttaatgtctttggtcgccgccaaaatcctaacggagcgtactcggcagttattcctcgctggatactatcgcttcttaaagatgaaccaatttatatcaatggcgatggctcaacaagcagggatttttgctatatagagaatgtgattcaggccaatctattatcagcaacaactaatgatttagcctctaaaaataaggtctataatgtggcagttggagatagaacttcgttaaatgagctttattatctaattcgcgatgggcttaatttatggcggaacgaacaaagtagagctgaaccaatttataaagattttcgtgacggtgacgttaagcatagccaggcagatattaccaaaataaaaacatttctttcatatgagcctgaatttgatatcaaagaaggacttaagcagactctaaaatggtatatcgataaacattctactttgtattcctcggtataa

SEQ ID NO: 376975 - DNA, 2487 bp, Salmonella enterica
atgaaatcgtcagggatgtttacgcttacagccattggcagttgccgtattgtgagtccggtaaaacgagctcagccttattttaattttcaggcaaactttaagagaatatatggttttacgcatacgagcagcgaggcattacagcagattcggtttattttgggcttgatagacattcctgaaaaggtccgaccatttatttttagacctaatgtaaactattcaaacaccgacgtacatagtcgttctgatttctatatcattgagatttcaagtcagaagaagattatggcctatgggttctgcttacaaataaattatttaactcgtcatttctatgaattttttagccaaacagagcgggcgtgcatgtactggtcgttggccacgcaaggaaatcgacacaaactgctggcctatctcaaagacgatccctgttttgccggaatgtcggaagacgatcgtgccttattaagcaatatcaatgtcgagcagatggatgagcatgctatcgaacaggatatgatggaaatcgttcagcttcttggtcgcgatcgcgttatgtttatgacacatgttgatgccgtgactcgtgctggaaccgtcattctatcccgtagtcggttgattaaaaatgtcgacaccatcgccgccaggatggatattccctgcgttaacccgacaaatttgatggaaaagtgggggcagaaacgagccctggaaaaaaatggcgacgatcttactcattataccgatatgtttggtgacgcgatcgttgcggctatttttaagggagtgatcaataatactaatcatcatcttgatgaggggcgacaagagaaacaggaccaaatacgtgagattaccttatcgatcactaagcagcttgcagatggcgacattattgctgcatcacaacaactttttgccgcattaagaaatcagcagcaagatcccgttctaatccaacttcggtccgtaatcttcagccatttaggttattatgaacaggcttatcaggatattagtgatgttgagaaaattatcggtacgactgacagtacattacgttgtcggctgaggtctctacatggattagcgcgttggcgggaagccttatcgacggcagagatgatgctttccaatgaaattgaagatgaagaagtccttaccgttgccgccggctcagccgatgctttacagctgtttgataagtcatatcattattggaaacgtgtactattattgaatcctgaaactcaaagcggatgggttaatttcctgagcagcacgcaatatttcaatgatggcaacgcattctctgaagctttccatgccggcattcaatcgcagcgcctaaatgatacgtttatggaaacggcgttatctttggcaatcaaattcagtgatgaattgattttcatgcatgcgctcgagcagctactccgccatgagtcagaatttgcgctgacggtattgtcgacgattcatgataccggtctcgttatccgcacagctttctgcatcaagaatatgagctatcatcaagcgcttcgcacctcgtataaagataaaatccacgacgtttttgaggcatggaacaataccgcgctgtcgctacattcggttgatgattttgtctcactgagtacttcgctagcctatagctactctgcatttatggtttatccccattcacgtatttctcgctttaataatgaagttaaaatggcatggcgcgataaattaagagaaatgtatgagcgtgaggattatgaaaatatcctggcaggggcgaaaatagtgtggccacttctgaagtttgatcccgttggcaccgtatattgtgcaagaacgctggtgaatcttggtgcctggaaagacgcgtgcacgttggcccacatgaccttgattcgtaactcgaacattaccagcctgcagtcgattatgttacgcagcatacgtcatattaacaacattccgttcctcattgatttgattgctaacgtcatgagcattactctatcattccagaatgcctcaatgaacaagttgtttgagaaagagtgtcgcaatgttgcaaccagagcccttaaatatgtacgccagaagaaaactgaagggcgtctggatgaagcattgtctgtattgattagcctgaaacgaattgagcctgatgtttctcgtctgatgcgtgaatataagcaaattatcagattatttaatgagtcacggaaggatggcggtagcactatcacgtcttatgaacatctagactatgcgaaaaaattactcgtttttgatagcgaaaatgcctatgccttgaaatatgccgcattaaatgcaatgcatttacgcgactacacgcaggctttgcagtattggcagcgactggagaaagtgaatggaccaacggagccggtgacaaggcagatctcgacctgcataaccgcattacaaaaaaatacatcagggaagtcgtaa

SEQ ID NO: 376976 - DNA, 1737 bp, Salmonella enterica
atgattacgcaggaagaaaagttagctgcactaggaaaaacgtgtttaacattaaaacaagagaagaagcttgcgcaagctgttgcgttaattgacagtgaattaccgactgaggctttaacttcattagcgatgctaaaaaaagcagagtttcttcatgatgtcaatgaaacggagcgtgcatacgcgctctacgaaacgctgattgcacaaaacaatgatgaagcacgttatgagtatgcacgtcgtttatataatacggggctagccaaagatgctcagctaattcttaaaaaggttagcaatggtgtgcagaaaaaatataacaattatttaggcaaaataaataagatctgtgatttgcttgaacgccttgaagggaaagcgatccctgtggggaccaacacctgtattattgcaatgaagcatgccatcttgttctatagaaatcgtcaacccaggcagcttcccgtcgggtctttcggtcgtcttgcgctctgtactggctcgctaggtagcggtggtgcagagcgtcagatttccaggctggctatcgaaatcgccagaaaatatcggcaaaaggggaaaattggcggcctgaaagtagaagaaccggtagaactaattattcgctccctgacaccggaactcaggcaagactttttcctgaaagaagtgctggaagaacaggtcgaggttcttgaaatcgcgaagattaccggaaacttgtttgacgatgcgacaatagaatctccagagttgcgcttattgctatcgcatctaccgccggtgtgtaaatacggcatcaagcatctggtcccccatttatgcgagcgcaagctggattatctctccgtttggcaggatagcgcttgtctgatgattgcgcttgcagcattgattgctggcgtgcccagaattcaactgggattacgtgggttaccgccggtggttagaaagcgtctgttcaagccggaatatgagcctctctaccaggcgctggcggtcgtgcctggcgttgattttatgagtaacaaccattgtgtgactcgccattatgccgactggctgaagttggaggcgaagcacttccaggttgtatataacggcgtcttaccgccatctactgaaccctcttctgaggtgccacataaaatctggcagcagtttacgcaaaaaacccaggatgcggacacgactattggtggcgttttccgctttgtaggcgataagaacccttttgcatggattgattttgcagcacgctatttacaacaccaccccgccacgcgctttgtgctggtaggcgatggtgatttacgcgctgaagcgcagaaacgcgccgaacagttagggattctggagagaatactattcgttggcgcctcgcgtgacgtagggtattggctgcaaaaaatgaatgtattcattttgttttcgcgttatgaagggctacctaatgtgcttattgaagcacaaatggtcggggtgccggtgatttcaacccctgcaggtggatcggcagaatgctttattgagggtgtttcgggtttcattcttgatgatgcacagacggtcaatcttgaccaggcttgccgctatgcagaaaagttggtcaatttatggcgcagcagaaccggtatttgccaacagacgcagtcatttttacaagaacgcttcaccgtggaacatatggtgggaacgtttgtaaaaaccattgcctctcagcctcgttaa

SEQ ID NO: 376977 - DNA, 1068 bp, Salmonella enterica
atgaaaaaaatcatcatattactaacgacatttttcctgctttcgggatgcactattcccagggcggtatttaaatccagccttattaatcaggacgatcctcgttataatctggtcgaagtcacgccgacattaaaactaagcgctcccgatactgtgccgaaaactattgtcgatccggtttttgccgcaaataactggcactggacatctttggctaaaggcgatgtgctgcatatcactattttatcctcgggcggggctggatatttatccaataacgcgagcggcgaccgtgcggattttgaaaatattcttgtgactgacagtaataccgttcaggtgccttatgccgggacaatcccggtttctggattggatgtgacgcaactggctgatgagatcaaaaagcgactttcgcgcgttgtcctgaatcctcaggtgattgtgacacttaccgcccgcaccggagccatggtgacggtcgagggcagcgggaaaacgggtcgataccctctcgaacagagtatgaatcgtctgagtcatcttttggcaacggcagtggcagtagaaaataccagcacagatatgatggaagttcacgtgacgcgccagcagcattatttcactgcgcgactgtcagatatttatcagtatcccggattggatattgccttacagccggatgaccgtatcactctgcgtcaagtgaccgagtatgttaatgtgctcggcgcagcaggtgttcaggggaaacatgctctggttcagcgtcattccagcgtcgtggatgctttggcgctcgcgaaaggattaaatgacaatcttgccgatccgcaagcgatttttctgtacaagcataacgaagcggaacaggcgaaacagcagatgcgtaagctgaatatctatcatgtcgatatgagccaacctaactcggtgtttttagcgcaggccatacgagtggacaacggcgatgttatctatatctcgaacgcctctttgactgatttcgctaaggtgaaagccgcattcgatagctttttgacccgcggcactaattctttctaa

SEQ ID NO: 376978 - DNA, 795 bp, Salmonella enterica
atgaatattttgaaaaataattcttattattttatgaaactcattaccgtctgtgagttaattattttattgatgtcacgcgatatcaaaacacgctataacggtaatttactaaactatatgatggtgctggccgtaccactggtatggatatccattaccgttatttcttttcaatatttaaatcgctcggtgccaatatccactgacgatatcagttttgttattgcagggatattaccgtatctgttatttcgttataccattaccgcaaccatgcgaacccattcattctctacatcgttagcggttgtctcgcaggttaagaaaagacatgtgattttttctcttgccgcaatcgaatttgttaatgcagttatcatttatattattatttcattaattaactttcttatattctcccgttgggaggcccaaaaaccgttcctgatttttgaagggatggttatcgcatggcttctggggttatcgtttggttacttttgtgacgcactgtctgaacggtttccgctggtctacaaagctgttcctgtgatgctaagaccgatgtttttgatttcggctgtcttttatacggcgaatgaattgccttattcattattaagcatattcagctggaaccctctactacatgctaatgagatagtcagagaaggtatgtttgaggggtatcactccttgtaccttgaacctttttaccctctggcattttccgcaacgttattcctcgcgggcctcatttttcacctgatttgtgacactgaaaatcactga

SEQ ID NO: 376979 - DNA, 696 bp, Salmonella enterica
gtgttcggtttattaggttgtacacgctattttgagtctgataagggcccgcgggtggtccttgataaaacagattttgtcatgggctaccatgagcatatcggtattctggcggctcctggttcaggcaaaacgacgctaaccaggttgctgtgtggcctggatgctcctgatgagggggattttattgggctacggggtgatgcgctcccactgggggcaaactcttttattctgccagggttaaccggtgaggagaatgcgcgaatgatggcaagtctatatggcctggatggcgatgagttttcacatttctgttatcaattgacccagcttgaacagtgctataccgacagggtgagtgaatattctgtcacgatgaaaacgcatctggcatttgccattaatttactgcttccctgccgcctttatattgctgatggcaagctgtacaccggggataatgccacacagttgcgtatgcaggcggcgctagcttgtcagctgcaacagaaagggttgattgtgctaacgcacaaccctcggcttattaaagaacactgtcatgcgtttggcgtactgctgcatggaaaaattacaatgtgtgaagatttagcgcaggcaactgcgctttttgaacaatatcagtcaaatcaggcgacgattcaaactgaagattattcctttgatatataa

SEQ ID NO: 376980 - DNA, 1305 bp, Salmonella enterica
gtggaaaattcagaacgtattaaaaaatggaaagaagaaagagcgaaggtagcacaagaaagccgagcctcgcggctacaacaaaaagaggatgaacgcgcccttcgccagacggaaaaatcggccgatgcaaaaagtcatcataacccagacgccgggtggtctgcgacggatgctgattctgtccgtagagcgtcattagttattaaagagcgacgtgttcagcaagccaagcaatcgctacgtcggctctttctttatattgctttgccgctgctggttattatgcttatgtcgtggattttaacatcgcatttttatagtgcggatgccacctttattgtgcaaactgatgccagccaggataatttttctggaacatctttctttggtgcaggcaataagatgtcggagggctttcaggttcgcgagtttatactttcgaaagaaatgatggatcggatggaaaaagagctcggttttttatcttatttcgcgcaagacgatatcgcattattttcccgcttccacgcgccgctgggtattaatgatgatccttatcgttactatttatcaaaagtctcggttgctgtcgatattcaacagggcatgctgcgtttaaacgtgaaggcacggagtgcgaaacaggctgagttttttgcccagcgcattctgtcttttgctgaacagcacgttaataccgtttcagcgcggatgcagaaggaacggattttgtggctggaaaatgatgttaaatcggcccaagagaatctgggggcagctcgacttgaattgctaaaaatacagcatatacaaaaagatattgacccgaaggaaaccataaccgctatttatcaattaattgctggctttgaaacgcagttggcggaggcgaaagcggaatacgcgcaattaatggtgaatggtttggatcagaacccccttattcctcgcctgtcggccaaaatcaaggtactggaaaagcagatcggcgaacaacgtaaccgcttgtcaaataagttagggtcgcaaggctcttcagaaagcctgtccttatttgaagatcttcgcctgcagagcgagatcgccaaagcacgctgggaatctgccttacagaccttacagcaagggaagcttcaagctctacgtgagagacagtatttgctgatcatttctcaaccgatggctgagtctgacaccactcgctatgccgatggaacaaagtggttactgttcttcgtgttgctgggcatcacgtacctagtgacttctctcctgataaccatcaggcggatgcgtgaataa

SEQ ID NO: 376981 - DNA, 1971 bp, Salmonella enterica
atgagcttgcactctacatttaaaaaaatatcgccaaccaccctactcaaacaagaggattgggaggggctatgcctctatttcagtcagcatcccgaaaaagtgcgagatagtgctggaaatgagcaaaacattattctcttcgctatcgcgtgtttgcgtaaagatgaaacagatgtcgggctgactttgttgtctgaccgtgtgctgacggcaaagaatggccgtgatttattacgacgctgggttatttcgccactggcatcatctcaaccggacgctgtactacaggtagttaataaactgctggcggtgaatgtgtgccagccggaggatgtcctgctggtcgcgagcgtgctgcttaagagtaaacaatatgcgactgttgctgacttagccgagcaggcatggctcgctttttcgggaaatagccaaatttttgccctccatttgcgcacactggtactgatggataaagagttacaggcaatctcgttggccagaacacaggcgcaggaagttcccccacggggagatatgattgcgacctgcctcagtttcttaaataaaagccgcctaccagaagatcatgacctggcccgcgcattgctccctttcttcgcgttagaaaggcaggagtcggcggggctggcggttgatacgctgtgcgctgtcggtaaatatcaggaagccattcagacaggggaatccgcattagcccgtgggttggatggtgcagcactgcgtcgtagcctggggcttgcttactatcaatccggtcgcagtcgggaagcgaagcttcaggccgctgagcattggcgtcatgccctgcaatttaactctgataatgtacgtatcgtgaccctgtatgccgatgccttaatcagaacgggtcagaatgagaaagccattccgttactgcagcagtcgctcgcgactcatcctgatcttccttatgtcagagcaatgtatgcccgagcactgcgccaggttgggcaatacactgctgccagcgatgagtttgtacaactggcaagggaaaaaggggtgacgagtaaatggaaccgttatgccgcggcggcattgttacaggcggggaaaacaagcgaagcggaaagcgtctttgagcactatattcaggccagagcaagtcatctgcctcaatcattcgaagaggggctgctggcgcttgatgggcaaatatctgccgttaatctaccgcctgagcgccttgactgggcatgggaagttgccggcagacagtccggtatcgagcgcgacgaatgggaacgccgggcgaagtggggctatcttgctgataattttctcctcgactggcttgaatgtcggggagagcaggctgatgaacctatgtaccgattggccgacatatcgcatgtcgaacagtttttccaacggctacaactcgatcagagaggctgcattattgtatcggctcatctgggcgcaatgtatgccgggccgatgatcctgtccttactggagatgaacagcaaatgggtggcttccactcctggcgtgctcaaagggggctacggcgagcgattgatttcggttagcgataaaagcgaagcggacgtggtcagggcctgtatgcagaccttacatagtggacagtcgcttgtggtggcaatagacggcgcgctgaatttgagtgcgccgactatcgactttttcggtcagcaaatcacctactccacattttgctctcgtcttgcctggaaaatgcatttgcctaccgttttcagtgttccgatatggaaaaacaggcatatccattttgtgcttgagaggatggtcgatccgctgaaatttgaaagccagctttcatttaccgaacgttggaaggagaattatctgcagtgtgttacccggatcctgcaaagcgatccggaaaatctgcgtctttccggtgggatttggcgaaacattatacgtagggatagttaa

SEQ ID NO: 376982 - DNA, 747 bp, Salmonella enterica
atggatattccacgtatttttactatcagcgaaagcgaacaccgcattcataacccgttcacgccggaaaaatacgccacgctgggccgcgtgttgcgcatgaaaccaggcatgagcgttctcgatttgggcagcggctcgggtgagatgctttgcacctgggcacgcgattacggtattaccggtacaggcatcgatatgagcccactttttactgcgcaggccaagttacgagcagaagagctcggtgtcagtgaacgcgttcattttgtgcataatgacgcggcgggttacgtcgcggatgaacaatgtgatatcgcggcctgcgttggcgcaacttggattgcaggcggcgtcgcagggacgatgaaccttctggccatgagtctgaagccaggaggaattatgcttatcggtgaaccatactggcgtcaggtacctccgacggaagagattgctcaggcttgtggcgtctcatccgtggcagacttcctcaccctgcagggccttgtagcctcttttgacgagcggggctatgatctggtggaaatggttctggcagaccaggaaggctgggacagatacgaggcggcgaaatggctaaccatgcgtcgctggctggaggataaccctgatgatgattttgtacaggaagtccgaaaggagctgactgttgcgcccaaacgccatgtcaattacacacgtgaatacttaggctggggtgtctttgcgttaatggcacgctag

SEQ ID NO: 376983 - DNA, 891 bp, Salmonella enterica
atggatatcagtactctcatttcttcctccggtcggctgcagctgtctgcagctgaaagtaaaataccctgggaagagctggcgtttagccagcgcatgctggaaaaccatctgtcgcaggatcatgactgggccagccgcagacagatcgtaattgaacagcaggttgggtggattgcccgtcagctactggttggtgcacgcattctggatatcggctgcggcccgggtttatacacccacttgctggcggagcgtggatattgctgtacgggcgttgatttttcaccggcatccatcgagtgggctcgtcagcaggcgcaaaccgccggtctgagcattgactacatccggcaggatattcgcacctactggccggagacacagttcgagttcatcatgatgacgtttggagagctaaatgttttcagtgccactgacgctcagacccttatcagccgctgtgcccggtggctggtaccaggcggcaggctgtttgttgaagttcatacttttgatgaagttaaacgtcagggtatggcgccggcgagctggcagcgttgtccgcacggactgttccttgcggcatctcatctgctgctgacggaaaacgcctgggatgaagaaacgcagaccagctcaacgcagttctgggcgatagatgaaaacggtcgcattagccgttttggcagtcagatgacggcctggcgcgatgacgaatatgccagtttgctcggtaacgcgggcttcaaaatactatcacacccggacagtagcgagtggccggtcagcgagacttttgagggcaagctctttgctctgctggcagaaaaatcaaaatccccggaagggcgttccctgaatacacagctaaaaaaaggagtaaattaa

SEQ ID NO: 376984 - DNA, 258 bp, Salmonella enterica
atgaatttatcccgtcaggaacagcgtaccttacatgtgctcgcaaaaggtggacgtattgtgcacgttcgcgatgcttctggtcgcgttacctctgttgaatgctacagccgcgaagggctgttgctcgccgactgtactctcgccgttttcaaaaagctcaaaaccaaaaaactgatcaagtccgtcaacggtcagccttaccgcatcaacaccaccgggctgaacaacgttcgctcacagcccgataaccgttaa

SEQ ID NO: 376985 - DNA, 354 bp, Salmonella enterica
atgctgcactttattcccatagcatccattcctgaagcactgacaatccctttgtttacagagagatgtgctgccggttttccttctccagcaactgactatacagaagaagagctggatctgaatgcgtattgtatacgtcgccccagttcaactttctttgttcgggccattggtgattcgatgcgggatatggggctgcattccggtgatctaatggtggtcgataaagccgaaaagccgctacagggtgacatcgtcattgcagaaacagaaggtgagtttacagtcaaacgtctgcaacttaagccccgcatcgccctgcttcccatgaatcctgcataccatttttag

SEQ ID NO: 376986 - DNA, 201 bp, Salmonella enterica
atgctgactaaagaaccatcttttgcatcacttctcgttaagcaaagtcctgcaatgcactgcggtcatggctggattatggggaaggatggcaagcgctggcatccgtgccgctctcaggatgcgttgctggctgagctgtccgctaaaaagcaggggaaaccatggctattgaaggtgatgctgcgactgttccgctaa

SEQ ID NO: 376987 - DNA, 342 bp, Salmonella enterica
atggctattgaaggtgatgctgcgactgttccgctaagcgctggcctccgtcttaatgggttaaaccacatcgcggaattaagggcgaaagtgtttggcttaaatattgattcagaactggatcgctttattagcgatatgcgggaccaacgggatattaaccatgagcagaataaacgcgcactagccgcaatattctttatggcaaagattccggcggaacgtcatagcgtcaatgttagtgaactgacgactgacgaaaagcgggagctgattaaagcaatgaaccatttccgtacagtggtgagtttatttccaaatcggctagccatgccgaattaa

SEQ ID NO: 376988 - DNA, 585 bp, Salmonella enterica
atgaataccgataagatgacaattagccaacgtgcaaatcaatggcttgataatgactacttatttattgataccgaaacgaccgggttgggtgatgatgcggaaatagttgaaatatgcattattgatagtcatgggtttattatgcttaatacgcttattaagcccactaagcctatccctgatgaagcaatagcaattcatggaattactaatgaaatggttgcttttgcccctgcctggactgatatatgcggggcagtggaggaactatttcggcgctttgggtttgttatctataacgccgattttgatctccggttaattcgtcagacctacgcattgaatgaaagaccttctgaaggtgcgccatggatgcttgctgctcattctgtttgcgcgatgaagctttatgcagagtatcgaggcgagccgggacgatttaatggctataaatggcataagctggttgatgctgctgcgcatgaaggtgttgtagttgaaggtaaggcgcaccgtgctttagctgattgcaaaatgacgttagggcttgtccgtgctctggctaaaggtggtgctaaatga

SEQ ID NO: 376989 - DNA, 861 bp, Salmonella enterica
atgagcaccatcctgaaatgggcgggaaataaaaccgccatcatgccggaactgattaagcatctgcctgcaggtcagcgactggtggagccgttcgccggttcctgtgctgtgatgatggcaacagactatcctcattatcttgtcgcggatattaatccagatcttatcaatctctataaaaaaattgcccttgattgtgaagctttcatatcacgcgcaaagaatatttttgcgattgcgaatagagaagttgcttattacaacattaggcatgaatttaatcattcctctgaaattactgatttcatgaaagcagtatatttcctttatctcaatcgtcatggttatcgtggactgtgccgctataacctgagcggtcattttaatgtcccttacggtaattataaaaatccgtacttccctgaaaacgaaatacgtgcttttgcaaaaaaggcacaacgcgcaacgtttatctgcgccagctatgatgagacgctggcaatgctgcgggcgggggatgtggtttattgtgatccgccatatgacggcacatttagcggttatcacactgccagttttaccggggacgatcagtaccatctggcgtctattcttgaacgccggtcatcagaaggtcatccgattattgtgtccaacagcgacacctctctgacacgttccttatatcgtaatttcacccgccaccgcatcatcgcaaagcgcagcatgggtgtggctgcaggtgatggtaaatctgcaacagaaatcatcgctacgaagttagtgcgctggttcggtgttgatttggcgtctggtcctgatgtctcggtggaaactgaggtgcgggcgtggcagtga

SEQ ID NO: 376990 - DNA, 234 bp, Salmonella enterica
atgcgcattgaaataatgatcgataaagagcagaagattagccaggctacactggacgcccttgaatccgagctttaccgtaatttgcgccctctgtatcccaaaacagcaattcgtatccgcaagggcagcgccaatggtgttgaactgagcgggttaaaactggatgaagacaaaaagcgagtgatggaaataatgcagcaggtctgggaggacgacagctggttacattag

SEQ ID NO: 376991 - DNA, 1065 bp, Salmonella enterica
atggcagagaacggccctattgaagatttggcgaaacgcatatcggaggatctactgagtcgatttaagtggcagcagcatggcccctgcgaccgagatttcctttgtgatgatgaggctaaacataagcctgaaggtaagaagcagaagcacacgcatcctgtagatgttgtatttagttataaagacccatatttaaacaaagttatttatttaaatactgatttaaaaagttataaagcaggttcaataaatgcgtcaaaaatagaatctgcattggcgtcattagcaaaaactattgaatgtgctcgctatagtcctgagtggtcagaaaaatataatttttctcaaattgactgtgaagttcgcggtttactgtttgtttttaatcatgataatcagttgcagcatgatttttatgagttttttaatcctcccaaacccgctaaaggaagaagagataaggctgtcaacttagaaaagattcctttatccgcaggtcagcaaattcatataatcgatccgtttctgattaattatatgttggcaataacgaatgatatgaatgatttgattgccaagaaagagtttcctgatgaagaatatggattctattaccctcaattgacttttcataaggttgctgtgactgaaaaatatcttccagctactatagaagtcttgtcatcacctttcatggttatcaaacatggtgctgtttataaatttaacagagctaaaggtattgaggaggaagtttatccagaagggtttgttgtgtattacaacaaaaaaggtaacagcgacaatgaattcttttatttgttagatattttgtcaaattatcaaattcttgatggtataaataaaattaggataaggctggcatatcgagaaaaagatgagaggattctctcccattttcaacggggagttgaaaaatatgcgcatgagtatgggttagatgaagaagctaaaaagaggcttgaagatttagacgttaaagttgtgtctacagtaaaagaattcttctctgcagaagttatttcttgggagccgaaatga

SEQ ID NO: 376992 - DNA, 1065 bp, Salmonella enterica
atgaaaaatattcacagcgtaactgataaagctttgtatgatgctttaaaccaaaagcaaattaccctaaatgaaattcaagaccttttcttagagagaggaacgattatatgtaaaaaaactcctcgaaaggaattggcaagaaactattctcgaatgactcatgattattacgagcatcaaaaaattgcaaccctgctaggtggccagacaaggaccgaaaaaattacatgtgtaagaattgagactggtatagataagaaaggtattatagacgcggcagaaaaacttaagaaagaaattaccgggcaggatgattattgtaaaataatcgtggatgggccgcgagttctgattaatattagatatctttcaactaattatggaaaaagtgatttcaaacaggctattaataaagaggcgttaattgaaattgagcctcttgatgatggttacagtatccgtcgtccagataatgaaaaccttgacgattacgaggggcttttactggggcacatcagcgctattcagaacgagcaagcggatgatagtaaccttgatttaaaattaaacgaaatttcactctctcacaatacatctgctgatgttagaactttattcttcgataaattaatccgtacacttgatggctatgagttactggatgttactgatgcttatgtatatcaccctaagcctgaaactatagaggctgaagatggaaacaccgaaactggagtgcatgtgtctagggcatcacttaggggtgagggggtacttaaatctgatgaattaagtgatctttatgatagaggattctatatctggaaaataaaatggaaggtcaaggagaacttggcagatccagatatatttgagcttgaggcccaatttggtgatcctctcaattgtactaatttctcatatttagttaagggagtcagaaaatataaggcaaacggacaatatttcagtaagccgcaaaaactctctggtagagaaactgagcgattcaataaattaattgaaaatagagcttattctattataatggaaatcagctaa

SEQ ID NO: 376993 - DNA, 696 bp, Salmonella enterica
atgtcacaattaagattgaagtggatgagattgaaaatcaggaccagccctgaagctgtctttgattttatcaaaaacacgccttattctgatgctattggtgctggttttactaagtatgaaaccattcataatggtatgactgcaactttcaataaaaaatctgttgttttagagccgattgccgatccatttggtgaggtgctggaattcgaaagggttgtatttgatcagattagtttttctatccaaaccctcagcaataagatatgtttgttaactttttacaatcctccaaaaacagttaaaccttttatcgattttttgtctcaggccgaagggttaaatgttgcttatgggaatttaaccgtagatcttaaagctttcatgagggtcattcgagaaaatttcggcgtaaaggtgtttggcatttccaaagtgaaggtgtcaaatcttcctgttactgaaaaaacaagagcatgtttggaattgaattctagcggcgatgctttgcatgatttgaagatttttgttggggatagtgaattcaagctcgataaaataaaagcaggagggttttaccttgattcaaagattagttttgaattaaccagtggggcttctgcagtggttcctgatgagcatttttcgattttcaatgatgctatttcatgtatggaaattgataaattttag

SEQ ID NO: 376994 - DNA, 1044 bp, Salmonella enterica
atgagtgaacacgacgccctgaccagcaccgcgccagtgcaggaggccgaacagcagaagaatacaactcacgccgaagcgttcagctttggcgatccgatcccggtactggaccgccgcgaactgctggactatgtggaatgcgtacagatggacagatggtatgagccgccagtaagctttgacgggctggcgcgaacctaccgcgccgctgtgcatcacagctcaccgatagcggttaagcgtgacattctcagcagtacgtacatcccgcaccgcctgctcagccagcaggcttttgcccgtttcgtccaagattatctggtgttcggtaacgcctatctggaaaagcgcaccaaccggctcggcggcgttctctcactggagccagcactggcgaagtacacacgccgtggcttggacctcgacacctactggtttgtgcagtacgacctgaccacgcagccctatgaatttacacagggcaacatctttcaccttatggagccggatattaaccaagagatttacgggctgcccggctatctctccgccattccgtcaaccctgctcaacgagtccgcaacgctgttccgccggaagtattacatcaacggcagccatgcggggttcatcatgtatatgaccgatgcagcacagaatcaggaggacgtgaacaatatccgccaggcaatgaaaagcgccaaagggccgggcaacttccgcaacctgtttatgtactcgcccaatggtaaaaaggacggcatccagatcatcccgttgtcggaagttgcggcaaaggatgagtttcttaacatcaagaacgttagccgcgatgacatgatggcagcgcaccgcgtgccaccgcagatgatgggcatcatccccaacaataccggcggctttggtgatgtggaaaaggccagccgcgtgtttgtacgaaatgaattaataccccttcaagaaaggattaaagaactcaatgaatggttaggggatgaagtcattagatttgcgaaatatacactcgacgacataagctaa

SEQ ID NO: 376995 - DNA, 1596 bp, Salmonella enterica
atgcagctcaccaccgccgcacgttactgccagctcatcatgaaggagcagaaagaagggaaagacttcaaggaaattgacctgctggcgcgccagtcagagcgtcacgcccggatcggaaaatttaacgacggcgggaacgaagcagatttaaacccgaaagtagccaaccgtaacaaaggtccgcgcaggcagccggaaaagaacgttttctccgacgaacagatcgaaaagctggaagaagtcttccacgcctcaatgttcgactatcagcgtcactggtttgaagcaggaaaaataaaccgcatccgtaatctgctcaagtcgcgccagattggcgccacgttttattttgcccgtgaagcattgattgacgccctgctgaccggacgcaaccagattttcctttctgccagtaaggcacaggcgcacgtctttaagcagtacatcatcgactttgcaaaagaagttgaggtggagctgaaaggcgatcctatggtgctacccaatggcgcagcattgtactttctcggcaccaacgcccgtacggcgcagagctaccacggcaacctgtaccttgatgaatatttctggataccgaaattccaggagctgcgcaaggttgcctccggtatggccattcacaagaaatggcgacaaacctacttttccacgccgtccagcctgacccacagtgcctatccgttctggtccggcgcgctgtttaaccggggccgagccaaagcggacaaggtagatattgacctgacccacagcaaccttgcacgcggcctgctctgccctgacggacagtaccgccagatcgtcaccgtggaggatgcggtgcgcggcggctgtaacctgttcgacctcgaccagctgcgcatggagtacagcccggacgaataccagaacctgctgatgtgcgaatttattgacgatctggcgtcagtattcccgctcagcgaactgcaggcgtgcatggtggacagctgggaagtctggaccgattttcaggcgctggcgctgcgcccgtttggctggcgcgaagtctggatcggttatgacccggcgaaaggtacgcagaacggtgacagcgcaggttgtgtggttattgctccgcccactgtaccgggcggaaagttccgcattctggagcgtcatcagtggcgtgggatggacttccgcgcccaggctgacgccattaaaaagctgacacagcagtacaacgtgacctatatcggcatcgactcgaccggcgtcggtcacggtgtttacctgaacgtaaaagacttttttccagcagtacgagagtttgtctacaaccccaacgtcaaaaacgccctggtgctcaaggcgtacgacattatcagccaccgccgtctggagtttgacgccgggcataccgacattgcgcagtcctttatggctatccgccgggccaccaccgccagcggcaaccgcccaacctatgaagccagccgcagcgaagaagccagccacgcagatttggcctgggcaacgatgcacgcactgtttaacgaaccgctgcagggcgaagccgccaataccagcaatattgtggagattttttga

SEQ ID NO: 376996 - DNA, 1035 bp, Salmonella enterica
ttgaacgcttccggttcgatggtgactgaccagaacccaaacagtccgtttttccaggaagccaataaaaagctgaagattggcggaaaagactggcatccgtcacgcacactgaaaatcttcaacggcacaccgatttatctggagtttcagagttcatcgttcggattcaccgggcgaagcgtgtttcagcgcgttctttattccctgaaatcctatatcaatacgatggaggcgaatgatctcgtcagccagaaggcaggcgtactggtggctaaaattgtgcagaacggttcgaaaattgacgggatcatggctgctgccacggggcgtaaaagggaaaacgtgaaagccgccaaaaataaaggcgtgttgagtattggaaaagacgaagatgtaagttcactgaacctgcaaaacatcgacggggcgctgaatacatcccgcgacaacatcattgctgatattgccgccgggagtgacgttccggccattattatcaaggaagaagcattcagtaacggattcggtgaaggtaaggaggactcgaaagccatcagccagtatatcgatggtgtacgccagcagattgaacctgtgatggattatttcgaacgcctggtgcagtacatcgcctggaacgaggaattttatcagtcgctgaaaaatgattacccggacatcataaccgatgactataaaaccacgttttaccagtggcgacgtgaatttaccgcgacgtggcaggagctggtggaggagtcgccggacaaacgccgggaaagcgacagtaaagtgattcaacaggcgatagcacttttctctgccgtgtcgccacaggttgatcctgaaaaccgtgccgccgtcactgaatggctggcaagccttgttaatgccacgcaaacctatggcgaagctccactcatcattgatgtggacgcgctggcgaattatgaaccaccgaagcaggagacgcctgatggcaatttccagccgggcggtgaggaagaagaaacggatcaggacgctgtatga

SEQ ID NO: 376997 - DNA, 834 bp, Salmonella enterica
atggcaatttccagccgggcggtgaggaagaagaaacggatcaggacgctgtatgaggttctgacggatgccgttaactactacgtaaatcacgggtgggatagcgaaaaatcattgctcgaatggtgccggaaactccgtgtagccgctcagcgagaaacccctgatgataccgtagccagaaaacatctcaccgctatctacagccgtcttgtcatcgacggcggggcattacgggatcagcctcctgatggccctaaaaaaatcactgttgaaaaactgaaacctgagtttcgtaaggaactcgacaggcgaattttcgccagtgccaacctgataaaactcaaccgcgaacaggctatcgagaaaaccatacagcgttttcagggatgggttacgtccattccgcctgacggggtgaacgaaattgatcgccgggaagtgaagtccggttttcagaagtccgtgaaggatatggattttatcagtcgccgggtggcaattgaccagggacataagctggcgagcaacgttaagtatctgctggctgttcagagtggtgcgattgctctgcgctggcattctaactggcggcgtccgggctacaaataccgacaggaccacaaagagcgcgacgagaaaatttatctcctccgcaattcgtgggcgctggagcaggggctgattaagcccgtatatggtttttatgacgaaatcactgctgccggggaggaggtttattgcagttgcgatgcactgccgatctacgcccctcagaaactacccgacgaatttttaacggagaagggcaaacgtgagtttaaccgagcttga

SEQ ID NO: 376998 - DNA, 1323 bp, Salmonella enterica
gtgagtttaaccgagcttgaagtggcagaacgcatcagggacggaaccgtaccgtccccggtgaaattctccaacatgtggctggtgaatttgcgaataaccggaaccgggctcgcctatcgcgccgggctgaaagagcacgtatggcgtgatccaaagctctatctgagtgaggagtttttaaggcgatgcaatggccttccggttatcgcaaaccatcctgacgacgcagttctgacggaggaggattttaaatcgcggatcgtcggcagtgtcatgctgccgtatatccggggtgacgaggtatgggcggtgtgccgcgtttacctccagagcattgttgaagaaatcactgagggggatgtttcgacaagtccgtcggtagtgttcaacagcacatcaggaaatgtggaagtacaggaaggtgacaccaattttttaatcgagggcgttcctttccttgttgatcacatcgctctggtgacgaaagcccacggctcgctgggcgtgtgggataaagaccggatccccgcaggggttgaagtgacaaatacaggtgaaattgagatggaaaaagaagaactccaggccctgttacagggggttgtgagcgatgccctgaaaggcattaatcagaaaatcgatggtgtcgttacgcgcatggactcactggaacagcgggacaaagcgcgggcggatgccgaagaacaggcgaaaaaagaggccgaagaaaaggccaaagccgatgaagccgcagaggaacagcgtaaagctgatgaagctgcggcaaaggaggcagaagaaaaagccaaagctgacgaggcagcagccaaagacgctgaggagaaagcaaaggctgattccgaagcagaagaacagcgtaaggccgacgaggaggcagaaaaagaacgcaatgattctgccctggcagaagcgcaggcaaaagccgactccgcattcagcgcctgcggtaaaaacgcgccagcaccgttttctggtgaaaatgcgctggactaccgcaagcgtgcgctaatcgctatgcagaaacactctccggcacataaggacgtcaatattcgcgcgattgcggattctgcaacgctggctgtgcttgaggacgcaattttcagtgccgcccgtcagtccatcgaaaaagaaatgatgagtacgcaggggcaactgcataaacgtatccgcaacgatgaagccggacgtcgcattactgaatatcagggcgatccgaacgtctggctgagtgctttcaaaattccggggcgtcgtctggcaaaaattaacactcaagggagcctgaacaatggctga

SEQ ID NO: 376999 - DNA, 618 bp, Salmonella enterica
atggctgatattaactttcatccgtttaaaaaccgtggggcatttggtggcctttttaacgtcgaatcccgtgggctgatgcagggggatgcgcaggatgatccgacaattcgtctgcaactttgctccggtagactggacagcaaaatcactgaaccggtatggggtggcgttggagttatggagtgcattgctcccgcgaaagacagcgttaacggcgcggtaattaaacaagccacgaaggacgcctgtaacgcctttactgtctttaatcaggcatttcatggcattaccacgccggataatccggtgccgttatatctcgcgggtggctttgttcactattaccgcgttggctcaggtgcccgcattcctctccctgtcagtgcagaagttgttgcgctggctgatggaaataacaccgttgctgccagtggttttgtgtgggatctgacgaaaaacatggttgatgtttattcaggatcacccggcgctaatccgaaagtggatattaagctgctgatggtttcagttgacggaaacctgacggtgaaaaaagaggatggcggtaacgttgtctgggaaatcggcaaaccgtgcggcctgtttttaatttaa

SEQ ID NO: 377000 - DNA, 1029 bp, Salmonella enterica
atgagcgcatttactcctgcgactactattgtgtcgccgtcaatggtgctgccggaaatgatcgtgcaacagagcatggcttccggggcgtttgaagtcctggctggtggtgctccagcggtaaaaatcagttccagtgatttgatggtctatcagaaatatctgcgcatgacctcgcaggcgcaggtcagccagtctctgccgggtcagttaccgtcttccagtatctctggcggctatgacggaatgatgacttaccgaatttcttcccgctctcaatacagctatctcgatactgatgcagcagatcgctggggctattctctgattgaaggcctgcgcctggctaaccgtcagggacacgctcaaatgttgcgtaatatgctgctgtatggcgtgaatgcagctaataacgaggggatcaccaactccccgaatgcagtgacgctgaatctgggcaacgacagcaaagggaatgattcatataccacctgggattccggtgagatggctaaatttatgcttggcctgattgctgaccagaaaacccgcatgttgctgctggggcagccattaacgactgttattctgagcccacagcgattcatgaaggcgctggagtggacaggaattgttgagctgaccagttaccagcgtcctggtggtggtaccggaacggtgggaacggtggttaaagacgtcgccgataaggcaacaggcgatgacatcattttctgccaggacgacacgctgatcggtaagggcgctggtggtaatgacctgatcatcgttacgaacccgacgattgaggtgccggaagcgcgtcacgccattaacaccaatattttctccacgctggtaccgaaccaacaggccgtcaacgtgatgttctgcgacatggcagcgccgacggaaatcccgtcccctatgccggatggcggcctgaccacgttgtataccatgcgcgcgacgccgggctggaacttccgccctgaggggatcaccctgttgtctgccaaatacgcataa

SEQ ID NO: 377001 - DNA, 471 bp, Salmonella enterica
atgaagctctacatcgctaactgctcacgtcagccgcacacgttcaactacaaactccccgaaaaaacgcagtcgttcggtgtgacaattccgtccggacgtcagcatatgatcgaaaatcagtccgatattatcgatcacatcatccggcagcatgaaccttacgggttccagcgttgtgacaaagtggacaagaatttttccggtatctgctattccattgataaacctgtgagcgttggccgcattgaagattgcgcggagcagaaaacggaaaatctggaatccatgtcagaggaaattctcgcggccagcgccgtatcgctgaataacgcagtggatcaggcggtgattcagagtggtgaaaaacctcaaccgggcggtattgagatggaaatcactggagaagcgatcaacaccgaacaggaaaatccgcccagcacaaagcgaaatattaaggttaaaaaataa

SEQ ID NO: 377002 - DNA, 441 bp, Salmonella enterica
atgaccctgcgtccgtcactggagggatttattcgctttgttcgtgacgatatgaaagtaccggttcatgctattgctgacgatgatccgacgctggaatgttgctttcagtctgcgatggagctaatccctcacgatcaggggctggagcgtttacccatcatctatgtgcgaacggtttataacgctgccgcctcattcctcctgaatttcgccccaggatcgtggtttgccgacctgagaaaaaaactcaaccttgggaagctggctaccgggcttgtcagcgcggcagcagaccagggaacatcgggctcaatcactatcagcgacgcgctgagcaatctgtctttgctggatttgcagatgttgcaggatccgtatggacgacaggttgttgcggtgctgatgcagatgggcacggtatgggggtacacgccatga

SEQ ID NO: 377003 - DNA, 441 bp, Salmonella enterica
atgaaactttgttttggtgttgttgaccagccgtatgactacggcgacgaaccgggaaaaaccacgtttgacgtggcctgtgacctcgaggagcgatacgaaatttttacgcatttctgggaaatgcataaggacgagattatccaggaggcaggggagatggttgcgttccagctcattcgccatctcaaaaataaagtgccattgccacctgtgcaggttatgggcgatacccgcgggatttttcaccgttttctggaagccgaggaaatgtccgggatgacgattaacggaaaccctgtgccaactcaggccgcgctactgggcgttaactccaggcttaaggacaaatataccggagagcggcgtccgtcattcatagacggcggcctgtttaagggcagctttatagcgtggatagataataatgccgagtcttga

SEQ ID NO: 377004 - DNA, 945 bp, Salmonella enterica
atgccgagtcttgaggaattagccgaacagcacagttcgcagctctcgtccgttcttaaatccgcagttgaaaccatctcgtcagaccaggaaatcacgttcaggctctatgtccggcaggttctgccgctggatggctttgtctattgggttaatgcggaaatcatcagttgcgatgaactgtgtcgcctgaatattgagtcaccaactcgtctgaaaatcaaaggcagcctgcatcgtcaggttattgcgattcaggacgagtctgtctcgaaggatgtgaacaacattattttcacgcctgttcagcaggttgatgattttaatgtggaaaatcccgatgcgatctatctcggtgagtacggcggcgtccagttcgctttttctcgaatggagagccgctatcagcagtcgggtatttttcattatcgcggcatggcgattttgccaaccatgcgttcccagattattgactgcgaggaggatatcagcgacgagcagatcatctccaacagcatcccgatctggctgcaaatgaaagatgccgcgaccgtgtatccgtcttacctagtaccccagaaccttcgtcctccgtatatcgcggtggatgttcgcaacagtattccgttgcaggtggctcccgttgttttcggtggtgagcgattccagctcgtccaggattcggttcgcctgacgctttacggattcagcaacaaaatggcgctggatcttgtcgactcggtggtgaacagggcgctggaggaggaaaagtttggtgtaaccaatattccggtggttcaggacgcaaagtcgggacaggttgaaatcaacgctctggcgaagaaaaagattgtcgattttgacgtgaattactaccagagcaccgcccggaaaatatcccggcagttgattgaaaaagtcatttgtaaatatgaggttaaataa

SEQ ID NO: 377005 - DNA, 1338 bp, Salmonella enterica
atggggtttaatatcgtcacggtgaatgtgtcccagaccatcggggccattccctcgaatttgcagcagatgtctgcggttctctcgtttggctccacgactcatgagccggggaaacctgtattactcaccagcaatcaggatattaacgatctggtaagaaatccgattgctgcgttgtcggcggctgccgcaggaaaatctgcggcaaacgtcaccgttacgatgacgtttccggaggggcgtaatatccggcgcgaaaacagttctgaggtaaaaattgtcgtttccggttgctctcccgacgcgtggaacggcgaatatactgctaccgtcgcggatgaaaaaacactgacctggacaatagctgattctcagctttccggttcgccagtgacactgggccagttttccattgctggcagtgaaaatctggtgacggcggtgaacacattttttgccaagggaaattcagttgggatttacctgctggagctgggagtacagaaaggtggagtcagtaaggaaatcgctgcactgaaagcttatatggaagatccgctcctgcgtttttatgcgtatctggtgccgcagccgtgggatggtgacgcagagtttatcagtctggcaaaactccacaccgccaacgaagcgatgcagtatttcttcgtgctgacgaaaacgccggacgatacgaattacgtttcgccttatgccggtattaagtcggttattgcaacggcggatgatacgtacccggcgacaaatgcggctgcagccgtaatgtggaactatgtttccgcatcaccttcagaaatcaacaaggtgccgccgatggcatttcgctatctacaggcggtcaacgcccacaagggcaaaaattccattctggccacgatgacgaagcagaatattaactatgtcgacacgggggctgagggtggaatttccaacacgattctggtgaaaggcgttaccagtgacggtaacgatatgacgtactggtattccgtggactgggtgcagattaacgtcgatatgcagctcgccaacacggtgatcaacggcagcaataacccaattaacccgctttactacaaccaggacgggatcgaccgtctacagcaggtcgcacaggcggtgttcaatacgggcgtatcttacggcctggtcaacggccagcctgtcgtcgatgcagtgcctttccgccagtatatcaacactaatccgaatgattacggtatcgggcgttatgccggcctttcggcctcctatacgccgatgcgcggatttgtcgaaatcatttttaacatcaatgtgacaatgcagctttcgtga

SEQ ID NO: 377006 - DNA, 444 bp, Salmonella enterica
gtgcctaatccaatgatccccgttggcacccttaaccgggttcgcgccagcgttaaattcacctctcattccgaactgaatgtgtccgcctcatttctggcaaaagaaggcgtcgaattgtcctttcagggcaatatcacggagtttttacccgctatgacgggagccgtgcagtcgccgcagccatacatgattttacaggcgcgtgttcatctgctgcgtagccaggcgctgggaaaacaattcaaggcgcaatgggaaaagaacgccacgatcggcgacgcaaaagtgtatagcgacagcacggtgttcggtgacttcgatatctataacacggcgatcaccaacgtgcaggatatgaccttcgccgggggcgagccgggagtggccatcaccattaccggtacgtattacatcaactctgaaatgtgggatctggtatga

SEQ ID NO: 377007 - DNA, 618 bp, Salmonella enterica
atgaaaatatcccgaaatctgaatctgattattcctgtccggacagaaaagggtaacggctgggtccatgccacgccgatcagcaaagaggtgtttaaagagcatttcttcattctgagtaaaacattttctgccattttctccgaaggtcttggcgtcgttgcgggtccgcgtatcgcctgccttatgctggaacggatctcctcagatatgaatatctgggatggcgaaaagggcgttcgcaatacgctcgtgaaagaaatcattcgccttgcgaatctggtttacccagccgaagggaaaggctacgacacgatcccacttgatatggcgctggagcgcggcatcgttgaatttgatgatgtggcaggtgaactcgttttttttacatgcgtctcgttgataaacacaccggagcagacggagcagatgatgctggcagtcagtggaatgtggaacagtcgcacttcatccttgagtcttacggaatggattgcttcattgccgacattgaagcctgtcgccagttctggcgcgacggcgagcacgttatcagcgacatcctcgactactcagccggagacggattcagcgacatctgggcaaattccggtctga

SEQ ID NO: 377008 - DNA, 1989 bp, Salmonella enterica
atgtcaggtaatcagatgccggttctgacactggacgttaatgaagaacatcttaagcgacttgaggcgatatttgaaaagtatcgcaacgggctgatgattggccctgccggtacgccgcttaaaataccttcaaatacaggtccgggaggtggcgcccggcagacaaccacaggcggagaagccaatcaggctcccaggaaaccatcttcacccgcgccagtttcggctgcttccactgatggacgtttaagggatgaaaaagggcgctttgttggaagcgggaaaacacctgattcgctggtgagcaactataaaggtcgcggcgaaacgatgtttgataagtacctcagcgggctgggtaaaaacgctcaggggacgctgaaaacttacaagcagatcaattcaacgcttaaaacgactaattcccggttaaaaagcctgtttaaaaccacggtttcgtggggggcgaaaatagctgcaataggggtagcggggccgtttggctacggctatatggcaagcaaagtcgcggcgcagtatagcgttgctcaggggttagggatggaaaccgcccaaatgcaggctgcacgtgccacctattcgccatatttttctggcacagaagaactggttcagcatctggcgaacgcacagaaaaacccgaacgatccaaactatgctggcttggttagtcttggaattgatccgcgagatggtgctgcaaagaatctgcccaaacttatgagcgcgcttgcatctctcgttaagcaatataaaggttcaggacttactcaggggattctcaacggacaagggcttggatttgttgatgtcgcgacaactaaccaggtggaagcgaatctggacaagatcccccaactgaatgagaaatttgcagcaaatgccaggttactcggcgcttacctcacgccagctatgcagtcaggttatcaggacacggtgagtaacctgatggtaaatggaaacagaatatcaaattcctggtatgcagctctcgccagatataacccactaatcagaggtgcatctgatgggctgacatccaatattgaaggttttctgaatggtggaaattttaaaaaaattctcactgaggctggcgaagggttggagaaacttggcaagtggctgaatagtgaacaatttaaaaatgatcttgacgatttttctctggcggtgagccggattgcaaaagcaatatggtcagctatcaaatggatcggtggggaagataaatatctccccggaaccggagttggtgctgaacaggcagatccagttcttgcggcatttgggaataaatatctcggtggtgcgttgccgggagcaaacccgatgacaaatcagtatacgggggagttttataaacaggatgatgtatataaaaattaccgtatgcctaatgatttaaagagaaatattcagaactttgtagagcaagccaataatacttatcgacttcctaaaaatatgatgtcagctatcgcggaagttgaatcttcgtggaatcctctggcaagaggaactccagatgaaaaaggtagattcgctaaggggttgtggcaattctgggatagcaccgcaaaacagtatggtctggtgggtgatgatgtttatgacccaaataaatccactcttgcggctggccgctttttaaatgatctgaaccggcgttataaaggcgatgtggcaaaaatgcttacggcatataacggaggtcgtattgatagagatggaaatctaagtttgagaatggagactgtaaaatatttaattaaattattgcctcagatacagggagctttggatcaacaccctggtattatgaatcagctaagaaatgccagagataaccttcagggtgctggcaaaaatgtccgcgcaataattgagcttcaggtgcgacaatcgccgggttccgacatactggcacaactcgccggaacgcaacaaataccggggtaa

SEQ ID NO: 377009 - DNA, 669 bp, Salmonella enterica
atgtcacttaattactttggacaagctttcaaactggcgtttgaagtttcgcccattcttttagttgatggcatagcgtcgaaaattcccggcggggtgatgccgattgctgttctgaccgaaggactaagtatcgcgaacggtctgctgcatggagagattcatacacgctcgatggcggcattcacgccaatggccgggacaacgctggtccagcaggatatttgcaacctgaatttctataaccaggtaacggcagcgaatgcgaccgtcaggaagcctaaccgggtagtcatgcagatgatccgtccggcatcaacggaggacggtggctacaccacgaaggggatgacgtttacggcgctgaaaatggcgcttgatatgcataaccagtatggcggttgttataccgttatgactccctcgtttatctacacgcgctgtctgatgcggtcgtttatcgatacatctggtttctctgagcagaacaagcaagtgcagcacacctggcagattgagtttgagcaaccattgtcgtctgtcgaacaaacagtaaagacgctggcgagtgttctggataaatttgataaagggatgccgtcagacgggccgctatcgtggtcaggcattaagaaccaggtcgtgcaggagtttggtattggcttatga

SEQ ID NO: 377010 - DNA, 267 bp, Salmonella enterica
atgacaacgttaattccttttaaacctgacgggcgaggcccgtttcagttcacggccagaattggagaatatgaaacattcgcccgcgttccgtttaatctgtatgcaaatcgttactacctggaactgaaagacagttctggcgacgtgattgtgtacatgccgttgatcgcgtcacctgacagttacgacatcaatctggcgctgccttgctcaccggggaaacttgtttttcgcgaaagtacgaatcagtttgaggtttcgtaa

SEQ ID NO: 377011 - DNA, 1008 bp, Salmonella enterica
atgcgttattaccgactggaaattattaatcctaaaacaggcaagccgccagtggatagcaatggaaaatccattggaccttttgataccagtgaaacaccaggatgtgggttgcatgttgaatttgactttgaagtaaccggcctggatgtagtctgttcgggcacgatgctgacgatctatggattaccaattgatatgctgaagcaaagcgtaagcttgcaggggtgtctggtccgtatgaaagcaggctttgttcaggggttaccactggcaaataaggatcaacaaggggaggtaatctatggtgaaatttatctggcctatgccaactggatcggcacgaaccagactttaaacctggtaataaatccaggcatacgcaaaaccgatgacggtaaacctttttcaattgaggggctgggggaagcaggcgaaagggtgggcgatgttttagtccgcgctttgcaaaaagcatatcccaataaattgattgattgcacagtcagcgacaaccttgttttgccagagccgtggacaggcaaatatacggagattggttctctggctatggtcgtaaaaaacgcctctattgcgatgatgcgtaatgaaaggtatagcggaatcgccatcagcattctttccgacagaatacgaatctacgataacacatcggcaaagtggggtgagccaaaaacaattcatgcccatgagctggtcgggcagccgacatggatagcgccgtttaccgtcagcttcaaatgccctatgaggggcgatatcagatgtggtgatgtggttaaactcccggaggggctatattctggcgcagcgtcgattgtgatggctaatacaacggcacccagcgttatcgcaaaaaattcgaccacgttcaccgggaaatttcttgtgaaatcggtcagacacattggttcgtatctgacagccgatggcgatgcctgggtgacggtattcgaggcatatgttgagaactgggcgagggtgtaa

SEQ ID NO: 377012 - DNA, 714 bp, Salmonella enterica
atgtcaaacgctcaaaaaataccgtttctccgaacgctgtcagagatgatgaccagttctggtaaccagcaagccgagcttaaaggccgcgaattgccctgccatgttgtcgatatctgcgggcaaatagtgacagttcagtttgatatgctgccggaggggatcaacttcccgcagataacaatccctgtcgccacattcccgtatatccgttacccgatacagccgggcgatcgaggagtaacaattgccgctgatgtatcactgcgcggtgtgtccggattgggaaccggtatggcaacgctttcttactcgatgtcgctcactcccctgtttttcgtgccactggcaaacaaggagtggtccgacgaagatccgcaaaaaatcgttttgtacggtccggatggcgcgatcctcaaaacagaggacggcagtagctcggtaatggtggctctggaagaaatcaggcaaaagtcgaaagctgtttacctcgaggccgaagatattttcctgaacgggaaaattcacctcaacggaccgatcgtccaggacaaagcccagatgaaggatacaaccgcttcgctgattggtcctcttaatgtcgagatggatgcagttatcaacggcgtgagcgtcagcggccacagccacgatgtgactggtgttcaaagcggcagcagcacgattacgacgaagaaaccaaatcctggttaa

SEQ ID NO: 377013 - DNA, 348 bp, Salmonella enterica
atgagaacatggggccgcgtcaccgacgcgaacggcaacaaaaaatgggttgcagtagaatctgacgccaacggtgatttctcctatggctggctgacgacgctcattcagacgttaaagctgggattgggggagtcgccgttttacgcgaattacggtattcctgcacagcagtgcatcgtgcagcagatttacccagactactatgtgaacatggttcagcaacagtttgctgggtattttgcatcactggcaatttcaaaggtagatggagcagataaccccacctataacatcgatgttgtgttttttaatgggaccagttaccggacgcaggtgccggtatga

SEQ ID NO: 377014 - DNA, 1161 bp, Salmonella enterica
atggaaaattttgcaaataagttaaaaatacacacagagcatgttgcaaaaatgggggtgttttgtacaactgaagaaacgacaaaacaagcactcattatgccattactagatattcttggttttactccgtatgatccaagaaaagtcaaagctgagtatagtgctgacttccccggggttaaggctaatgaacgggttgattacgctttattttgtcatgatgttcctgtgatgttcattgaggcgaaatcgttttcagaacaaattgataatcactgcccacagctatcaagatattttaattcaacaccggaagttactatatcagccattacaaatggtgttgaatggcgtttttttacggatttgaaacaaaaaaacataatggattcaacgccgtttttaaaaataagaatggattctctaactcactccgatattacacaattatttcgttttcgttatgataaattcaaaccagaggctttacggacactggctgaagaaagtgtttatttgaattcatttactaaaacaatcagttctagtcttcgtgaagttgatctggagtttgttcgatatgttgctagtcgttcaaatattgagagacaacttaatcagagatttcttgagttcgtgactccattagttaaacaggccgttgagcgcgctgttagcgcaatggtggtttccgggctatctacacaaccggtagagcaaactaaagaaaatgatgcaacggatacacaagttaataacgccattgttgatgaagaaaaccccaacataataaccacagccaaagaattggagctatttgaaagggtaaaacaaatcatacaaacagaagataatatagaatataaagatactgagtcatattttggtgtactattgaatggtaaaactaatagatggctgttaagattttatgataaaaaatcttcatttataactttacctatttcgcttagtgaagttcagttgaatgaaataagacgagctcgacttgatacggatggtaaaaggatacatataactaatccggaagatatacttcgcatatctggtttgattctggattcatacgagtatgttaaaaatgatgataatttccgccgagggtccagagcgagcagtttagaagaggttgaataa

SEQ ID NO: 377015 - DNA, 1227 bp, Salmonella enterica
atgtcagaaataccaattactatgaccagtgcgggggcgcagcctacgccacccaatgatttgcttgcaaatcttatcatcagagttgctgaaaaagtacctggatatacagccaaccttccggcggggcttattactgaccttgccagcacggcagtcggggcgctggcattaatagaccaggcgcgggtggaccttattaactccgtaagcccatacggcgcaaatattccgttactgatgcaactcggaaacatttatggagcacagaagggattaagtacaaatacggcggtatacgtggtgtttgaggcgttgccggggtttggtatccctaaaggatttgttgtcggtgacggcaactaccagtatgcagtttcccgcgatacggtggtgccggaaagcgggcagactgagccagtctactgtgtggccacaacgtcaggctcatgggctgtaccggaaggaaccgtaacgcaggtcattacatcggtacccaaagatcagcctgtaaaatgcacgaaccttaccgcagggatgccaggtcaggaggcgcaaacgtgggcatcttaccgcgccgaagtcatggagtccggcatgtttggtgtgcagggaacaccggattgctttaaagcgatgctcaaatcagtaagcggtgtgcgagaaaacctgatttctttccggcagtcgtcgctggggaaatgggttgcggttgttggtggcggtgatccgtatgatgtggcttatgctatttacaaatctgtaccggatatttcgaaactgaccaacgatgttagcaatccatctggtgcggcagtggaaaaacgcacggtttcaataaccgtttcgccagatgtttatcaggtgccgttcgttatcccgtcatcacaaaacgtcatggtgctaatcacctggaacactgtatctgatgattatgttgatccggcgggtattgctatggctgtgcagcaaaacgttgctgattacatcaattctattgaagtcggacacccgataaatctgctgcgaatccaggatatttttaccagctccgtaaaattgctggttgatgcgacgttgatctcaacaatcagtgtgagcattggtattaacggtcatattgttcttccggcaaaagacacaagcctagtttatggcgatacctattcctatttttcgacggtggcatcacaggttcaggtcaataagtatgcaatatctgactga

SEQ ID NO: 377016 - DNA, 627 bp, Salmonella enterica
atgcaatatctgactgagaaaatacttcctgcttatccgtttgtgcagtacagagatgatccgaatgttgttgcgttctttgatgcatacaatgaaattgctcaggaatacctcgattcactcaacaatctggcattgccatgctggacatcggaatcaataaccgggcagttgctggactggatagcacttggtatttacggtgttgaaagacctttactacaggtttcagaggaggctattgcgcgcggtgcatacgataccattgaatacaatacgatcccgtacgcagcaatgcggaattacgttccggggcaggcatcgtatgtccctgatgattatttcaaacgaatattaacgtggaatttttataaggctgacggttcgcatttctgcattgactggttaaagcgccgtgtggcgcggttcattcatgggaaaaacggaatagacccgccgttgcagcatacttttgatgtgagcgtgactgtatcggacagtgttttttctattcagataccagaatatggtgatggtataggctattttctgaaagatgccattgaccagaagtatgtaaaactcccttttatttattcctatgcaacaacggtgattcaaaaatga

SEQ ID NO: 377017 - DNA, 1554 bp, Salmonella enterica
atgattcttggattcggcaataacgttgtttcagcactggctggtgatatcaccacgattcagactgatattccggtaatgcccggtacaggggctaaatttgcaaaattgctttctgctgattttgaaaataaatcaaacgggcaacgcgtctatgcaaaaattacgcttaccgataataaagagtctgcatttgagatttgtcacctggtatcggtaagcggtgatgtgttgagagtcattcgtgggcaggaaggaacaaccgagaaaggttggtcccttaatgacgttgtggctaactttgccacgcgtggatcggaaaactatttcgtacagatagcgcagcttcagagcggtcattatattgcgggtgttgctggtggcactgcaaacgcgctgacgctggaacttcccgcgacgttttttgttaatggaggttcggactggacgctacgaaccccgattatcgttttccccgttcagaacaataccaacgccgcaacgcttcaattgacactgggcggaaaggttcttggtacgtttccactttataaggggaacaagtccgagctggtggcgaatgatatcattaagggtattcctttgatttgccttcttgatagcgagaaaagctatttcagcgtgataaaccctggcaatatctattcagattttgatctgcgatatgtaaaaaaatctggtgatttgatgaccggggggctgaaaatccgtggagttaatgcgctgaggattttcaacgaagcctttggtctgatttttcgtcgttcggaagagtgcctgcaccttattcctaccagtgaaggtcagggcgagaatggtgatattggtccacttcgcccgttcactattaatctgcggacgggtgaaatatccatgtcgcataaagtgtctgttggcggtggttcgcaggtcaatggtgcactgggtatcggcgttcagaacgcgctgggcggaaactcaattgctttcggggataacgatacaggtataaaacaaaacggtgacggtattctggatgtttatgcgaatggtcagcatgtatttcgttttcaggatggtgttgccatggcgttaaaaaatattcaggccgggaatgccagaatattcacattatccagttccaacagctccacgaaaaatgcagggtttaatttatggggtaattcatcccgacctgtagttgcagagcttgatgatgattccggctggcatttttacagccagagaaataccgatggcagtatcacattcgctgtaaacggacagatgctcccatcaaactatggaaatttcgatgcccgttatcagcagcgaaatggcggcgtgcaggatgtgcgttatggttccgaaatgttttataacccgggaggtaaccaggtgtcctggacatttcgctcaccttcaggccacggattatccggtattaatgtgcaggaaaccagaagcaattcggcagataacatcggcggcgtatattaccgacctcttcagaaactgattaatggcacctggtataacgtggcgagtgtttaa

SEQ ID NO: 377018 - DNA, 546 bp, Salmonella enterica
atgttgcatttaaaaaatattactgcgggtaatccgaaaaccgcagaacaataccagatgacaaaaaaatatgatgttacctggcttttttcggaagacgacaaaaactggtatgaagaactgaagaatttcgccagcgacacaataaaaatagcttacaccggagatggtcgcgtggtatgggtcggtaaggatgtgacaggcattgaaccccgcaacaccagtgttattgaggttccggacattaccgctaaccgtcgtatcaccgcgccgggctactggttttaccgcgacgatgaatttgtcttcgactacaaacttaaagcagaagatgagcgcgatgctcttctggctcaggtcagcatcataaccagcgaatgggaaaaagacctgctgctgggattaatcagtgacgaagacagggagaagctgaaagcgtaccgcatttacgcgaaatcgctgcaggcgatggatttcagcaccatcgctgataaaagctcatataacgccattgaatggcccgtctctccggaagcctcttcctga

SEQ ID NO: 377019 - DNA, 444 bp, Salmonella enterica
atgtctgtagtgatatcaggtgcgctgattgatggcgcaggcatccccatgtccggatgccacataattctgaaatcccgggtaaacacgtcagaagtggtgatgcgcacagttgctgatgtggtgacaggaaactgtggcgagtactgttttaaggcgcagaccggaaaatactgcgtatatctgaaacaggactggcgcgacgagtactgtgttggcgacattgccgtatacgacgattcaaagcccggcacgctgaacgactttctgactgcccttgatgaaggcgacctcaaacccgacgtggtgaaacgcttcgaagaaatgttggcgcaggcgcaggtcgatcgcaacgccgagatttatcgtcgtcagcgtgagatgaaagaggagctgagtagtctggaggatttgaagtcggttagggatttcgtaccagaataa

SEQ ID NO: 377020 - DNA, 540 bp, Salmonella enterica
atgaatctgttatctgctcttctgaaaagatactggttgcagctggcgtttattttgctgatggctggtgcgtttatcgccggtaatgtctggagtgacaggggctggcaaaaaaaatgggcagatcgcgacagcgctgaatcctctcaggaagtcaacgcccagaccgccgcccgtattattgaacagggccgcattattgcccgtgatgaggctgtgaaagatgcacaagcgcaagccgctaaatctgctgccactgctgctggcctgtctgccactgttagccagctgcgtaccgaagcaaaaaaacttgccacccgcctggacgccgcaaagcacaccgcaaatcttgccgctgccgtcagaagcaaaacagccggagccgacgccacagtgctcgccgacatgttcggaagccttgcagaagaagctcaatattatgctgagcgatctgacgaaagctaccgcgcaggaatgacgtgtgagcgcatttacaactcggtgagagagtcaaccaacaatcccatagctccgcactag

SEQ ID NO: 377021 - DNA, 378 bp, Salmonella enterica
atgtttacagttaaaaccatcatcaacggtgttacgcatatttgtgagcagccatccatctcgatagccagggccggttctgaaacgttcgcagatactttaaaacttactcataactcagcctgcccggacttcgcatactggctcccggctatctatgaagatccagaaatgaccaaagcgctgcaggaggaagaactggttattagtgaccgtactgatgtgctggatactgatgctattgccatcattattgaggaatatccgagtgaaaatttccccggcgcgggtgatggctgccgttaccagttcatctatcctggcgaccaggtttacgtgatgaactctcacggctcgaccatcgaaacagtgaagtag

SEQ ID NO: 377022 - DNA, 228 bp, Salmonella enterica
atgaatcaggctattgagcaaattattcacagctctttgaataaaaacgagccaggcgctggcgttggttcttcagttacagctaatgatatcattgaaggggtaagactctactaccaagcagcgagtggggcggagaaactgtctattgtcgaaaggctaaacaaactaaaagtagagcctggtgtcccgatcccatctaatatcgaacagctattaagtaattga

SEQ ID NO: 377023 - DNA, 732 bp, Salmonella enterica
atgagtttagcgcagcctaaatccggagagcttttagagatccttggtccctcactcactcagggagaaaacctactcagtgagtttgaaattcatgccgtcattcgtgacgccaggaatgttcctgaatattatcaagggctttctatcgagggattagctaagcttgttttaggcgaagttgaagagggatgtgccctttgtgaaaagtcattggcgatagccccggacgattctgtttcgttttgtaactatacgattgcgttgagaaacaaggggtatcacgttaagcaatacgagattattaagagagcgatcaactcgcgtaatcctcgaattctttctgaagtggctataaatgctgcgtattgggtggatttagatttgctgaaaaaggtaatgcctatgcttaatgcgatggaagttgctaaggcagacgatttgctcaagtgtaatgagtcgcttgattatcttatcgatcatgagaatcattctcatgaccttaaggcgatcggccaattgatgatgactattgctgaaaagtatcgtttacgtctggctggtgcgcatgctttttatgtcatgaatgagctgaacacatttttcgtagaaattaaaactgacgacccagcacttttgtcaaaagtgaataacgaccttgccaatgaactcatcgctgctggtttggaaaattcagagtgtgttggttgtttccaggcaggagacttctaa

SEQ ID NO: 377024 - DNA, 429 bp, Salmonella enterica
atgcctgttatgcataattgttttctcgaattagccagagaatcattgcagcacaatggtgagcaatggacacgtaatgctatcagcaggtcatactacggcatgtatcattcagccctcagaatcactaacaatctgacgcctacccatgatactgatggtgagagattacctggcggttctcacatgcgactctatacagctttttgtaacggtgaggctgctaaagttaacggcgtagatgttgataaagtccgtaaaattggcattaagttaaagatgttacatgctcagcgcgtaaatgctgattacagacttgaacgcaaaattaatcgaattacggcaattagtgccttacaagatgctgaagagatagatgctctagtggaccgaatgatgaataaccccgacgactcgttaacagcataa

SEQ ID NO: 377025 - DNA, 1512 bp, Salmonella enterica
atggctaaaaatgattttaaaccgtttgcgacgggtaagggtgctaatgttacatcacagcctgactgggaagcgctgccggcgctcctgtctggttttactgcgggcaaggcatcaagtgcacaggtaaataaagcgctgcgtcaggcgagcttcatcgctgcagcactggcacagtacacagccagtaagagcggaaaggatgtactcgatgatggtgacctgagcggctttatcgccaaaatgtccgctgcgttcggtaaggattttcagactcttgatgccacgctgacggcgctcgctggtctggctactggtgcagataaacttccgtatttcacggggaatgatacagccggacagacagatcttacttctgttgggcgcgacatcatcggaaaagccagtattgcggatattctcacatacctcggtttaggcgaaacgataaatctggcaaaaaatgccgtcccggcgacacggcgggttaacagtaaaccactgaccggtgatatcactttgtgggcgtcagatgtgggggccatttccgccgatgctgttggagaaattaccgataacggcacaatggcatcagctaatgcacccggatggtggaaggtggcggtgtcgaattctgatacggtcgttgattttcccacctatccgggtggcagcaagttgtacagctatggatatctgtttgttgagaaaatcggagacgtctggtttcagcattattatgcccatattggcgcgaacgcaaagcgccaggactggggaactgtaccgaataccagtcgcccgtgggttattgactacaacaccgcaaataaaccgtcagccagtgatgtgggtgcattgccgattaccggagggcgtcttaacggtccgctaagcattggtactgataatgcgctgggcggcaattcgatcgttcttggtgataatgacactggttttaaacagaacggcgatgggatactggatacgtttgcgaatagccagcacaccgttcgtgtcgctcccggtgaaatgcaggttctgggagccattcgcgcaggcgatgccaaacgaatgaccatgactagctcaaataactccgtgctgaatgctcaatttcatttgtggggtgacggaaatcgaccaacggttattgagctggatgacgaccagggatggcatttatacagccagcgtaataccgatggcagtattcagtttgttgttaatggacaagttattccggataattacggtaatttcgacgcccgttatttaacatcaggaaacgtatatacaaaaggcgaatcagataatcgttatgtccaaaatatccagcgcggtgctcctgtatggcctggcaaagtagatgaatatggaccagcagaagcgcctgctggttgctttttaacacaggccagacatgacccaacaacagcatacggtgtgacatttgcgtatagaccgctacaaatgtgggtgggtaatggctggcgtacaattaatggataa

SEQ ID NO: 377026 - DNA, 702 bp, Salmonella enterica
atgttcttaacatttcctaatgtagcaataactcgagataacaggatagacaaattatctgaaaatgatttagaactcattcgtgatacggctatacaaaatggcggaagaaagatacaggtacaattacgtgatttattatatgaagtaagtaatcgtgctgttgaaggtgataataatacattcaaagttagtttttctactacagaccgagccatgtttagggaacgtcatattgaatggcagggaaacgctataaggttagaacgacaattaaatactggactgaatgtgtcgcgtggaaattttttaaatatgtcgaccacatcattttccaataacagtcaggagttagcagcccacagttcaccaggagcacctgctatttttgatacatctaataaacaacaattagtggataagattgatttatgcagtttctcaccaaatgttgatgaactttcatgtacggaagacaacttaacatgcccggtaatgttagttgttcctgaaaaaggcgtttttgtaaaaactgggccagagtcaaacatatgccaattatttgatgaaacagcacttatccaacttattattgacggtgccacacatcctgttagtagggctccattatcactagatatgataataaataaaaatgaatgttattttgacactaccaaaggtaattttataatcccataa

SEQ ID NO: 377027 - DNA, 438 bp, Salmonella enterica
atgaaaacagtcttctctttgaccgcagccgcaatgatggcattgagtggcggcgtatctgccgcgtcggcgtttagcctcagtagcgcggatattccggcagattttcgtttaacgcaacagcacgtctttaaaggatttggttgtagcggagaaaatatttcgccgcagctgagctggcgcaatccgcctgccggaaccaaaagctacgctattaccgtcttcgatcctgatgctcccaccggaagcggctggtggcactggacgatggtgaatattcctgcgcagattcacgacctgccgacgggggctgataaaaaacgttacccgctggagtggtgcagggacggaatgatttcggttatgctggctttggcggcgcctgtccgccgccgggcgatgagcctcatcgctatcagtttactgtgtgggcgctga

SEQ ID NO: 377028 - DNA, 552 bp, Salmonella enterica
atgactgcagcactcatgcgtaagcatattgcaaatcaatcatgtgattataattacagagtgacaggtgcagccccgctccccggtgaagtctctgtatcagccaataacaggccaacggtttctgaaggtagaacaccaccagtatcaccctccctctcacttcaggctacgtcttccccgtcatcacctgccgactgggctaagaaacttacggatgcagttttacggcagaaagccggagaaactcttacgcccgcagatcgcgatttttcaaacgcagatttccgtaatattacattcagcaaaatattgcccctcagcttcatggagcgagacggcgatattattaagaggttcaacttttcaaattcaaaatttacttattctgatatatctcatttacattttgacgaatgccgattcacttatttgacactgagtgatgtagtctgcagtaatacaaaatttagtaattcagacatgaatgaagtgttttacagtattcaattactacacaacaacagccctcttttattgatacaacattaa

SEQ ID NO: 377029 - DNA, 954 bp, Salmonella enterica
atgctgttgaaacgccgtttgtttattgccgcttctttattcgcgatgcacctttctcctgcgcttgcggccgatgccgtaagttttgctccccaaccgccagccattgatgcaggcgcctgggtgttgatggattacactacgggacaggttcttaccgccggtaatgaacaccagcaacgtaatcccgccagccttaccaagctaatgacgggctacgtcgtcgatcgcgccatcgatagtcatcgtatcagccctgacgatatcgtcaccgttgggcgcgacgcctgggcgaaggataatccggtgtttgtcggctcctcgttgatgtttttaaaagaaggggatcgcgtgtcggtacgcgatttaagccgtggcttaattgtggattccggtaacgatgcctgtgtggcgctggcggattatatcgcgggcgggcagccgcagtttgtggcgatgatgaacagctatgtgaaaaaactcaatttgcaggatacccattttgaaaccgtccacggtctggatgcgccgggacaacatagctccgcgtatgatctggccgtactctcccgggcgattattcacggcgaacctgaattttatcacatgtacagcgagaaaagcctgacctggaacggcatcacacagcagaaccgcaacggcttgttatgggataagaccatgcatatcgatgggcttaaaaccggacacacatcgggggcgggatttaatcttatcgcatcggcggtggacgggcagcgtcgacttatcgccgtcgtgatgggagcgaaaagttcgaaaggacgcgaggaacaggcgcgaaaactgttgcagtggggccagcaaaactttgcgacggtgcagattttgcacagcggcaaaaaagtgggcagcgagcggatctggtacggagacaaagaaaagattgcgctgggtacggaacaggatttctga

SEQ ID NO: 377030 - DNA, 660 bp, Salmonella enterica
atgatcattcgcaagcttcgccagcgtgacggtatcgacatcgatacgccattacaggctttgcaaaagcttgcagcacagggatatcaggacgtggcgattcagtcgttgcacattattaacggcgacgaatatgaaaaaattgtccgtgaagtacaaatcttgcgtccgttatttactcgcctgacgctgggcgtgccgctgctgagcagccataacgattatgtgcagctaatgcaggcgttgcgacaacagatgccatcgctcagacaaacggagaaagtcgtttttatgggccacggcgccagccatcatgcattcgcagcttatgcctgcctcgatcatatgatgaccgcgcagcgcttcccggcgcgcgtcggcgctgtagaaagctacccggaggtcgacatcctgatcgacagcctgcgtgacgaaggcgtcaccggcatacatttgatgccattaatgctggtggcgggcgatcacgccataaatgatatggcttcagacgacggcgactcatggaaaatgcgctttaacgcggcgggcattccggcgacgccgtggctgagcgggctgggagaaaacccggctatccgggcgatgtttgtcgcgcatttgcaccaggcgctgaacatggcggtagaggaggcggcatga

SEQ ID NO: 377031 - DNA, 279 bp, Salmonella enterica
atgaaacttgaacagcagcttagacagttgtctttcagtggactggctgcagcgctattgctgatggttgtcccgcaacaggcgtttgcgatgcatatcatggagggctttttaccgccagtgtgggcgctggcctggtggttactgtttttaccctgcttgtggtatgggctggtacgcttacggcgtattgtgcaggaggataatcatcagaaggtactgctggcgctgtgcggcgcgtttatttttgtcctgtcccgctcaaaattccgtcggtaa

SEQ ID NO: 377032 - DNA, 282 bp, Salmonella enterica
atgaaaaaaacgttgatgttgttagcgatggtggtggcgctggtgattctgccgttttttattaaccatggcggtgaatatggcggttcagacggcgaagcggaaagccagattcaggctcttgcgccgcagtataaaccttggtttcagccgttatatgaacccgccagcggtgaaattgaaagcctgctgtttacccttcagggctctcttggcgcggcggtgattttttatatcctggggtattgcaaaggtaaacaacgccgtgatgaccgggcttga

SEQ ID NO: 377033 - DNA, 258 bp, Salmonella enterica
atgatgggtataatgagtaaattatgtggcaaacaattttggttagcgttttgtgaagctaaagacgtcactcgcgccattaaaaatggcggtgaggattttaataagaaatgcccgccagcgctgatttctcatttcattaccggattgtcatgggaacatgagcggggtcattatttaccggtatgtgctattgctggccattatttccgttacgttggcaacgttctgtaccctgtcatcagtattcatgggtga

SEQ ID NO: 377034 - DNA, 888 bp, Salmonella enterica
atgccggggtcaacacgtaaactaccagtctggttgcccattttggttttgctcattgccatgtcctctattcagagtggcgcttcactggcaaaatcgttatttcctcttgttggcgcgccgggtgtaacggcgcttcgtctggcgttgggaacgcttatccttatcgcctttttcaaaccctggcgtttgcgttttgccaaagagcagcggctgcctttactgttttatggtctgtcgctgggcgggatgaactatctattctatctgtcgattcagacggtgccgttgggtattgcggtcgcgctggaatttaccggccctctggcggtcgcgctgttttcatcccggcgtccggtagattttatttgggtcgtactggctgtgcttggactctggttcctgctgccattaggacaagatatgtctcacgtcgatcttaccggggccgcgttagcgctcggcgctggcgcctgttgggctgtctatattcttaccggccagcgagcaggcgcggaacatggtccggccacggtggcggtaggctcgctgattaccgccatcattttcgtgccgattggcgcagttcaggctggcgatgcgctatggcactggtcgattcttcccttagggttagcggtcgctgtgctttctacggcgctgccttattcactggaaatgattgcgctgacgcgcctgccaactcgcaccttcggtacgctgatgagcatggaacccgtgctggccgccatttccgggatgatttttctgggcgaaacgcttacgggcatacaaatcctggccctgtgcgccatcattgccgcctcaatgggttctaccctaacgattcgccgcgaaccgcaaattaaacaagttgacgtaaaatag

SEQ ID NO: 377035 - DNA, 867 bp, Salmonella enterica
atgggacaagagagtgatattcagtcagtgctcttcgacgacaaccatcgggcgttacagaccgatatcgtcgccgtccagtcacaggttgtgtacggcagcgtaggcaacagtatcgctgttccggccattaaagcgcagggattacgcgtgacggcggtcccgacggtgttgttcagcaatacgccgcactataaaacgttttatggcggcattattcccgccgagtggtttgcaggctaccttacggcgttgaatgagcgcgatgcgctacgtgaattaaaagcgattaccaccggttacatgggcagcgcagaccaaattgtcttgctttcgaagtggctaatggcgatccgggcttcgcatccggaggtgtgtattcttgttgatcccgtcattggcgataccgacagtggaatgtatgtgcaggcggaaattccgcaggcttatcgcacacatttgttgccgcaggcgcaggggctaacgccgaacgtatttgagctggagatgctgagtggtaaaccgtgtcgcacgctggaagaggcggtggcggcggcgcaatcgctgctttccgatacgctgaaatgggtggttatcaccagcgcgccgggcgaatctctggagaccataacggttgccgtcgttaccgcgcaggtcgtggaggtctttgcccatccgcgggtggcgacggagttaaaagggacgggagatctcttctgcgccgagctggtcagcggtattgtgcagggaaaaaaactgacgaccgcggcaaaagatgcggcgcagcgcgtgctggaggtgatgacctggacacagcagtgtggctgtgatgagttaattctgccgccggcaggggaggcgcgatga

SEQ ID NO: 377036 - DNA, 264 bp, Salmonella enterica
atgataaagcggaaatggaatcttttgcttctgcttgggttttctttcgcatcggtatgccaggcaggtgatgatattgacgcgttatatagccgtattgcgcagaaagatgttcaggcgctaaatgagctaaaagcgttagccaaagataataatgctcaagcgctggcggagttggggtttatttatgagtacggcgttgccgtgccgaaagatacgatacaggctatcaagtattatgagcaggcttgtcatgttgaataa

SEQ ID NO: 377037 - DNA, 495 bp, Salmonella enterica
gtggatgagccttataaagccaggccggcctcgttgaaatggtttcgcgccgccgcggaaaaaggcgtcgttgaggcccaatctctcttggggggtatttattcggggggagagggcgatgagtgggggattaagccagacattcaggaagcgcaaaaatggtatgggcaggcgtctgagcagggggacagcgatgcacagattgcgttaggtaaaatctattattctggtgcaacagggcgcactgattacgctaaagcgctggcattatttacgcaggttgaaaatgatggtactaattcgcgctcaacgatgccgttgagttggatgtattataacggtttaggtactgcacctgattgtgataaagcctggtcgtattacaagaaagcatctcgatatgtaggtaagaaagttgaggaaaaaatatttttaagtaagtgcgcagcggatattcagagtcgaaaaaaaacgcggatgctttacccaaagtaa

SEQ ID NO: 377038 - DNA, 1008 bp, Salmonella enterica
atgtctttcattcaataccgccgggacaaacaccttccgtccaccgccgcaccgtcgctgttagctatgggtatggcgatggcatttatgcctgccgccttcgcggctgaggataccgttattgtcgaaggcgcgacgaccgctgacgccataaaccgtgaagaacaggattacagcgtgaaaacgaccgcagcgggcaccaaaatgccgatgactcagcgcgatatcccgcagtcggtcagtattgtcagccaacagcgtatggaagaccagcagttgcaaaccctgggcgaggtgatgaccaatacgctggggatcagcggaagccaggctgactccgatcgcatcagctattactcgcgcgggtttgaaattgacaactatatggttgacggtattccaacgtattttgagtcccgctggaatctgggcgatgcgctaacggataccgcgctgtatgagcgcgtggaggtggttcgcggcgcgaatgggctgatgaccggaaccggcaatccttctgcctcaattaatatgatccgtaaacacgccaccagtcgggagttcaaaggtaacgtctccacagaatacggtagctggaataagcagcgttacgtcatggatctgcaaagtccgctcaccgcagacggtaatgtccgtgggcgcatcgtggcgggttatcagaataatgattcctggctggaccgctataacagtgagaaagcgttcttttccggaattatcgatgccgatctgggtgcaactaccaacctttcagccggttatgaatatcaaaaaattgatgtcaacagcccgacctggggcggtctgccgcgctggaataccgatggcagcaaaaatagctatgaccgcgcgcgtagtaccgccccggactgggcttataacaataaagagataaataaattcttcgtcacgcttaagcagcgttttgccgaaagctggcaggcgaccctgaatgcgacccatactgagggtcaaattcgacagtaa

SEQ ID NO: 377039 - DNA, 1290 bp, Salmonella enterica
atgaagggtactgttttcgccgttgcgttaaaccatcgcagccagcttgatgcctggcaagaggctttctctcagcctccccataatgcgccgcctaaaaccgcagtgtggttcatcaagccgcgtaatacggtgattcgtcacggcgaacccattccttatccgcagggagaaaaggtactgagcggcgcgacagtggcgctcattgtggggaaaaccgccagccggatacgccctgaagcggcggcggactatatcgccgggtatgcgctggctaacgaggtcagcctgccggaagagagcttttatcgcccggcgattaaagcgaaatgtcgcgatggcttttgcccgctgggtgaaatggcgccgctgagtgatgtggataatctcaccattatcactgaaatcaacggacgagaagcggaccactggaatactgccgatttacagcgtagcgccgcacaactgcttagcgcgttaagtgagttcgctacacttaaccctggcgatgcgatcttacttggtacgccgcagaatcgcgttgcgctgcgtcccggcgatcgggtgcgtattctggcgaaaggtttacccgcgctggaaaatccggttgtcgcagaagatgaattcgcccgccaccagacgtttacgtggccgctgtcagcgacgggaacgttatttgcgctggggttgaactacgccgatcacgccagcgagctggcatttacgccgccgaaagagccgctggtatttatcaaagcgccaaacacctttaccgaacatcaccaaacgtcggtgcgcccgaacaacgtcgaatatatgcactacgaagccgagctggtcgtggtgattggcaaaacggcgcgtaaggtgagcgaagccgaagccatggagtatgtggccggttacaccgtctgtaacgactacgcgatccgcgactatctggaaaactactaccgtccgaatctgcgggtaaaaagccgcgacggcctgacgccgataggcccgtggattgtggataaagaggcggtttctgatccgcacaacctgacgttacgcacctttgtcaacggtgagctgcggcaggaagggacgaccgccgatctgatcttcagcatcccgttcctgatttcttatctgagcgaatttatgacgttgcaaccgggcgacatgattgccaccggtacgccgaaagggctgtccgatgtggtgccgggggatgaagttgtcgttgaagtagaaggcgtgggtcgcctggttaaccgaatcgtcagtgaggagagcgcaaaatga

SEQ ID NO: 377040 - DNA, 300 bp, Salmonella enterica
atgaagaaaataaatcattggattaacggcaaaaacgttgcaggtaacgactacttccagaccactaacccggcgaccggtgatgtgctggcggaagtagcctccggcggtgaagcagaagtgaaccaggctgtcgcggcggcaaaagaggcgttcccgaaatgggccaacctgccgatgaaagagcgcgcgcgcctgatgcgccgccttggcgacctgattgaccagcatgtgccggaaatcgcggcgatggaaaccgccgacaccggcctgcctattcaccagactaaaacgtgctga

SEQ ID NO: 377041 - DNA, 150 bp, Salmonella enterica
atgattaataaaatttttgccctcccggttatcgaacagcttacccctgtcctttcccgtcgtcagcttgatgacctggatctgatcgtcgttgaccatccgcaggttaaagcctcttttgcattacagggcgcgcaccttctctcctag

SEQ ID NO: 377042 - DNA, 207 bp, Salmonella enterica
atgaaacgatttaaagaaatagcagcaattttgctttttgcattgctggccgtggggttcacgtcgtcggctatggcatcgtcgggcagtggtggtggcccgtgggattttgatatctattttcctggtcactactttttttgcaaactacaaccccctgattctctgcaattaccgccacctcctggtgagtattgctggcattaa

SEQ ID NO: 377043 - DNA, 1185 bp, Salmonella enterica
atgacgacagccctttcaccacgcggcaaacagggcgctttactgattgccggtattttgatgatagccactacgctacgcgtaacatttaccggcgctgcgccgttgctggagacaatccgtacggattacggtctttccaccgcccagacgggcctgctaacaaccttgccgcttctggcgtttgcactgatttcgccgctggcggccggtattgcccgccggtttgggatggaacgcagtctgtttgccgcaatgctgctgatttgcgcgggtattgctctccgctccctgccctccgctgcattgttgtttgccggaactgccattattgggtgcgggatagcgctgggtaatgtgctgctaccaggattgattaagcgcgatttttcacaacatgtcgccaggctgacgggcgcgtactcattgacgatgggcgccgccgccgcgttggggtctgcgctggtggttccgctggcgttgcacggttttggctggcgcagcgcgctgttaatgctgatgctgtttccgctgttggcgtttcttatctggttgccgcagtggcgcactacccgctcagctaacctgagtagctcccgggcattacatgaacgcggtatctggcgttcgcctttagcctggcaagttactctgtttcttgggcttaactcactgatttattatgtgattatcggctggttaccaacaatactcatcagccacggttacagcgaagcacaggcaggatcgctacatggcctgctgcaactggcgaccgcggcgcctgggttagctattccgcttattttgcatcgctttaacgttcaacgctggattgccgcgctggtctcactattgtgcgcactgggcgcggcggggctttggtttgtgctgggccaggcgatcatctggacgctactgttcggcttcggttcaggcgcgacgatgatcctcggcctgacgtttatcggcctgcgcgccagttcggcgcatcaggcggcggcgctttccggcatggcgcagtcggtcgggtatttactggcggcatgtgggccgcccgtcatgggaaaacttcatgatgccagcggtagctggtatctgccgctatcgggcgtaacggttctggctatcatcatggcgattttcggcctctacgccggacgcgatcgagagatagcgtcataa

SEQ ID NO: 377044 - DNA, 174 bp, Salmonella enterica; identical to SEQ ID NO: 21092

SEQ ID NO: 377045 - DNA, 774 bp, Salmonella enterica; identical to SEQ ID NO: 21093

SEQ ID NO: 377046 - DNA, 2766 bp, Salmonella enterica
atggcaaacttttttattagacgtcctattttcgcctgggttctggccattatcctgatgatggctggcgcactggcaataatgcaacttcccgttgcgcagtatccaaccattgcgccgccagcggtttctatttctgcaacctatcctggcgcggatgcgcagacggtacaggatacggttactcaggttatcgaacaaaatatgaacggtatcgataacctgatgtatatgtcctctaccagcgactctgctggtagcgtgaccatcactctgaccttccagtccggaaccgatccggatatcgcgcaggttcaggtgcaaaataaattgcagctcgccacgcctttactgccgcaagaagtccagcagcaggggattagcgttgaaaaatccagcagcagctttttgatggtcgccgggttcgtctcggataatccgaacactacccaggacgacatctctgactatgtcgcctctaacattaaggattctatcagccgtctgaacggcgtgggcgacgttcagctatttggcgcacagtacgccatgcgtatctggctggatgcgaatctgctaaataaataccagctcacgccagttgacgtcatcaaccagttaaaagtacagaacgaccagattgcggcaggccaactgggcggtacgccagcattaccgggccagcagcttaacgcctcaatcatcgcccaaacgcgtctgaaagatccggaagagttcggcaaagttacgttgcgcgtcaataccgacggctctgtcgtccatctcaaagatgtcgcgcgtattgagcttggcggtgaaaactataacgttgtagcgcgcattaacggtaaaccggcctccggtctcggtattaaactggcgaccggcgctaacgcgctggataccgcaaccgcaatcaaagcgaaactggcggaactgcagcctttcttccctcagggaatgaaggtggtttatccttatgacactacgcccttcgtaaaaatatctatccacgaagtggtaaaaacgctatttgaagcgattattctggtgttcctggtaatgtatctgttcttacagaatatccgggcaaccctgattcctaccatcgctgttcctgtcgtgttgctaggcacttttgcggtactcgccgcctttggctattccatcaataccctgacgatgttcggcatggtactggcgatagggctgctggttgacggtgcgatagtggtcgtagaaaacgttgaacgtgtaatgatggaggataacctttctcccagagaggcgacggaaaaatccatgtcgcagatccagggagcgctggtcggtatcgcgatggtactgtctgcggtatttatcccgatggccttttttggcggctcgaccggggcaatttatcgccagttctctattactattgtttcagcaatggcgctatccgttctggttgcgttgattctgacgccagcgctatgcgctacgctgcttaaacccgtatctgctgaacatcacgagaaaaaaagcggcttctttggctggttcaataccaggtttgaccacagcgttaaccactatactaacagcgtaagcggtatcgtgcgtaatacgggtcgctatctcattatctatctacttattgtagtcggaatggcggttctgtttttacgcctcccgacctccttcctgccggaagaagatcagggggtattcctgactatgattcagctcccctctggcgctacgcaagaacgtacgcagaaagtgctggatcaagtcactcattactacctgaataatgaaaaagcgaacgtcgaaagcgtgtttaccgtaaacggctttagctttagcggtcagggacaaaactcagggatggcatttgtcagccttaaaccctgggaagagcgtaacggtgaagaaaatagcgtcgaagccgttatcgccagagcgacacgcgcctttagccagattcgcgacgggttggtgttccccttcaacatgccggcaattgtcgagttaggtaccgcgacaggtttcgacttcgaactgattgatcagggaggactcggtcatgatgcgttaacaaaagcgcgtaatcaactcctgggtatggtcgcgaagcatcctgatctattagtgcgcgtacgcccgaacgggctggaagacacgccacagttcaagctggatgtcgatcaagaaaaagcacaggcgctcggcgtttcgctgtctgatatcaacgaaaccatctccgcggcgttgggcggctattacgttaacgactttatcgatcgcggacgagtgaaaaaagtatacgttcaggctgacgctcagttccgtatgctgccggaagatatcaacaatctttatgtacgcagcgccaatggcgagatggtgcccttctctacctttagctcagcacggtggatttatggttcgccacgcctggaacgctataacgggatgccgtcaatggaactgctcggtgaagcagcgcccggacgaagtaccggtgaagccatgtcgttaatggaaaacctggcttcacagctgccaaacggtattggctatgactggacaggtatgtcgtatcaggaacggttgtcaggtaaccaggcgccggcgctgtacgcaatctcactcattgtcgttttcctctgccttgccgctctgtatgaaagctggtcaattccgttctcggtaatgctggtcgtaccgctccggcgtggttggcgctctgcttgcagcgtcattgcgcggcctgaataa

SEQ ID NO: 377047 - DNA, 579 bp, Salmonella enterica
atggctgaggtgctacaactcccgccaccgcttgagggtgatatcagtctcagaacgctgggaagactggccggacggctggataacatcgacctgagcgtactgatggtcggtctcgtcgatattgtcgacagttccgcgctgccatggcttggcgagcagttctcgctgttcggcgatggctgggaactggcggaatcggacgatgtacgccgcatgcttatcaaatccgctatcgagctacaccgctataaaggaacaccgtggtcaatccgggaaattatccgccgttttggcttcggcgaagtggatctgattgaaggtacggggcagattggctatgacggcagacacacgtacaacgggcttttcgtccatggtgatgcacaagcctgggcagtctatcgcgtcatccttcaacaacccatcactaacgatcaggcggcgctgttacgtcagacgcttgctgcctttgctccggctcgctgtcatctggcaagtctggaatatcagtctgtcgccattcgatacaacagtactacccgttatgacggtagttacaaccacgggagcagttaa

SEQ ID NO: 377048 - DNA, 1104 bp, Salmonella enterica
atggcgctgacagaacccgattttattgaacgcgatgccgataaaatcacggcagaaatgattgcgaagtatgaagcggataccggaaaaacgctgtacccggcacaggctgaacgtctgctgattgacctgtgggcctatcgcgaaatgctggtcagggtggcagtacaggaggcggcgaagcagaatctggtcgctttttcccgtgagccgatgattgattacctcggtgaactggtcgacgtataccgccttgctgcgcagcctgccaccaccacacttcagttctctgtggatgaggcactggccattgatgtgctgatcccggcaggcacccgcgtcagcgcttccgacagtattatttttgccaccgatacagatgtggtgctgaaggccggattgctgctggtcaatgtcacggccacctgtaccgagccgggtaccgctggcaacggctggcaaccggcgcaggtcagtcagttactcgatgagattgataacattgacctgctggtgaccaatctgacggccagctctggcggttcagagcaggaagacgatgaccggctccgggagcgtatcaggctggccccggagtcattcaccaatgccggaagccgtggtgcataccgttttcatgctatgggggcgcatcccggcattgtcgacgttgctgttctttctcccgctcccggcactgtcgagctgtatccgctgctcagcactggtctgccggacagcagtatcctcactctggtagagagtttctgttctgacgaaaaagtcagaccactcactgataccgtgcgggctaaaacacctgttcaggtggattacaccattgaagccaggattacgatctatcgtgatcaggatgcaaggttggtaaaggacaacgctaacagcgccatacagaactgggtggcatcccgtaccgccacgctggggcgcgatattgttcccagccagattatcagcgtgttgtccgtttccggggtgtaccaggtcgaactggtgacaccggcactgagggtggtggcagaaaacgaatgggcaaactgtacagcgatcactcttaacatgaccggggtgtccgatggctga

SEQ ID NO: 377049 - DNA, 267 bp, Salmonella enterica
atgttcgccgtcgacggcgggtttaaccgacataagctggcagcggggttcccagcgcctgatggcatcgacggattcgcgaaccacatgcggaatggcccggccgacaggccagtcgatataaaggtgcagattgctgccgaactccgggcgatgcgggtcgctgccgcggggagtccgcaggatgatctggatggactgccggatatcatccagcccccggacgatttcgccgggagcctgcagagctggttgccagaatactga

SEQ ID NO: 377050 - DNA, 528 bp, Salmonella enterica
atgactggtgtcacccgtcagatcggtacggtcagtgccgttgatgccgacagggttcaggcccgcgttcgtctgcctgaatgcgataatctgcgcacaaactggcttaacgtgctacagcgcaatacccaggataacaaggattactggctccctgacgtgggggagcaggttgaggtgctgctcgatgccaacggcgaggatggtgttattctgggcgcggtgtactcagacgtcgataaaccgccgttcagtgataaaaacgtccggggtacgaaatacgctgatggcgcggagttcagttataaccgcgcgacccatacgctgacggtcagaggaggtattgagcgtatcgtggtggaggttgccgctgatatctctctcaaagggaaaaacctcgacctcacgggagttaccacgatcaacggccccgcgacactcaatggtgatctggaaatcaacggaagcgcccatgcaacgggtaacatatttgctgatggtcagaactctaatcaccattcccattga

SEQ ID NO: 377051 - DNA, 1155 bp, Salmonella enterica
atggctgagataaacagtactgcgcaagccacatcagcgttaaccagcgtcagcgatgtgctgacgccggtattcactctgtggtatctgcagaaaaacatcacctctgatatcgcgccttatgtcacccgtgtggtctggagcgataacatcaaaaatgagtccgataccattgaggtggagctggatgacaccgatggtcgctggctggataagtggtatccgggcaagggtgacacgctgacgctgaaaatgggttatcagggcgagaaactgctgtcctgcggtacattctcaatagacgagatcgaagtgagttcgcccgcgtccgttgtcgctatccgtggggtggccacctcggttaacagtgctctgcggactaaatccagccgtggttttgagaacaccacgctggcagctgttgcggggcggattgccagaaagcaccgactgaaactggtgggcagcattgagtccatcaaaatcgaccgggtgacccagtatgctgaaaccgacgtgggttttctgcgccggctggccagcgagtatggttatgcagtgaaagtggtcagtgaccagttgattttttctcatctggccacactgcgcagtcaggagccggtcaggcagttaaaaccgcagggtgtggcccgcttttccctgcgtgacaccatcaaccgggtctataaatctgcaaaggtaaaacaccagaaaagcagcagtaaaaaactgatcgtctacgaagctgatggtggtacccgtgaaagcgacaaaaagctcaaaggcggtaaggttaccagcgctgactcacttaaagttaacagccgcgtcagcgacccggacagcgcccggattaaagcggattcagcactggccagacataacgaataccagcagaacggctccctgacgctgacgggaacgcctcaactgacagcaggcaacaaaattgaactggtgggctttggacagttatccggtccatggctgataatcactgcccgccatgcgtttgagcgtaacagcggctacaccacagagctggaagtggcacgggggccagtcacaagagggaaaaaacaaaaaactcagaaactcacggtttatcacccggatggcagtacatcgacggtgattaaggagaagaaaaaatga

SEQ ID NO: 377052 - DNA, 213 bp, Salmonella enterica
atgtttcttgaacatattacccgtgacggagagcgctgggattcgctggcatggcagtactacggtgacccgctgggctatccccggattattgcagccaatccgcacgtggccattacgccggtgctgccctccgggttgttgttactgatcccggttattgaggctgaagatgcccgtacagaagaggatattgccccatggctgagataa

SEQ ID NO: 377053 - DNA, 885 bp, Salmonella enterica
atgtttgccgtactgggtgatattgagtttgaactgattacctactgggacggcttcgaggccacgttcggcgtcgattatgcggagcatgcccgcatcgagggtaaacccggcctgcagtttgtcggcgacaggctggacgaaatccagataagcctggtcttccatcagcattattgtgtgcccgacgtggagctggcgagagtgcgaacagccatgaaggcccatcaggcactggcgctggtcttcggcaacggtgactatcgcggctggttcgtgattaccgatgtgaccgcaaccagcgagcagacagacagcaccggtaacgtgctggctgtcagtgccaccgtgtctctccgggaatacaccggtgacccgaaaaatcctctgcaaccgccggcaatacgcaggcaggttcccggtgccggagctgtatcgggtgctgttccatcgccttccggggtggcgcagttcgtccgtaacggcgtcaactatgcgaaacaggcgcagtctgtactccagaccactatcagtgccgttcgggtggcgcagaaaatgaagggtaaccccgttgtcgcgctgacccgtgtgccgggactgatgagcggactgggtaatatatccggagctctggggaaaagtgttccggcgtttaatgcactctctgaatccatgcccgatgccatcagtctggccagaacagccagtgaggcagccacgtatgtacagcaggcgcagtcggcgctgagtggtgtggacaaaagaaatattgcaggtgctctggataccgtttccgggcagcttaacgccgccggcacagcattcaaccgcatgtctccgggattaagtgcaatggccgccagaatactgacgaggagtgtgtga

SEQ ID NO: 377054 - DNA, 2466 bp, Salmonella enterica
gtggccagtgaattttcagtcggcgtcattattggcggcattgtcgggagcagcttccgctcagccgtcagtggcacccgacgcgcccttgattcccttggtgatacctcccgccgtctgcaggaacgccagaatgccttaacccgggcaacagaacgttatggtcaactgggttcttcccggatgcagcatctcaacagcgagttgctgcgggtaagccgcaccatggagcaaattgaacgtcagcagcgccgtctgtcagcagtatcagccaccggtgatgcgttgaaggctaaccgcctggcgctctatggtcagggtgcagaaacctatgctattggcagaacgctgggcgcaccggtcatggcctcggttaaacaatatgcctcgtttgaatcacagttgcgggatatcagtgtcacaggagacctggatgcaaaacaggaacgtgcaattggccaggctatcagacaagcctcgctgaaggttaaccaactgcaggagtctctgttagggggagtcggacaattagttgctgatggtatggcccccgaacgggcagcaacgtttgcagagatgcttggaaagaccgctacagcaaccaaagccgatatgaccgaccttgccaaaatgacttatgccttcagcgatgcactcagaatcactgatgcgaaagaacttgaacaggcgtttggtattgcggcaacaggagccaaacttgggtcatttgagctgaaggatatggcaaaagcattacccggtatggctaaagccttcgctgctcgtggtatttatggaaaagatgcgattacccagattgttgccagtctggaggtcggtaaaggtagtggctctgcagaggaagcggtcaccaatatgtccaactggctggcagcaatgggccgcggagataccatccagaaatatgctaaagccggggtggattaccaggggtcaatgcagaattacgtcgctcagggtttttcgcagtacgaagcttcactgatgattgccaaccgttttatcgacagtaaaggcaaagcgttcttgcagcaatggaaagctgcaggagcaagaggcgatcaggaaggtcagcagaaactcatggagtcatttggtctggctgaggtctttaccgatattcagactgtcaaccatttactgtcaatgcgacagggctgggataaatacctttccagtaagcaggaaatgaatgctccggctgcaatttctaccctggataaggatgctgcaaagcagaatgatacgcttgaaggtcgctggcgcagaatgcagatcggctttaatgattctgctatcagcatcgggcaatccttgcgtccggctttgctccagttgggtgaaacatttattcctttaatggacagtgttggcaaatggatagcggcaaatccgcagctcgtcagcagcaccataaaggttgtgggcgcattactcgctttcaggatggccactatcggtctcaagcttgggctgaatctccttctttccccctttgtaagcgtctggaaaaatgctgttttacttcgggccaactggcttcgtctgacgctcgcactgggggaaggcggtaaactccgctggctggtgacaggctttggtgctgtcgccagaggagccagaacactgggtggtgtgctctcaggggggctggttcgcggaattatgagcgccgggcgtgccgttctctggattggccgggcgctgctgatgaatcccatcggtctcgttatcaccgccgtcgcggcagcagcttaccttatctaccgcaactggggcgcagtcagtagctggtttaaacagcgctgggctgacattcaggaagcctttaacggcggcatcgtgggaattggtaaactgctggttaactggtctccggctggtctgctttataaagcctttgcggctgcgctgaaatatctcggcgttgatctgccggcgaaattcaccgacttcggtggtcatcttattgacgggttgataaatggcatcagaaacaaatgggcgtcactcaaaaccagcgtaaccggaatgggtgacagcatcagtgactggttcagcgaaaagctgggcatccattcaccgagtcgcgtgtttatgggctttggtgacaatatcgcgcagggtgccgccattggcctgcaacggaccactccgcttgctgcactggccgggcagcgcctggccgctgaaatgacaccggatgttccccgtatcccgtcgccggaaatcatggctgccggatattcaggccgtggcgcaactgcaactggcggtggagcgtctggcggtatcaaggtcagctttaatcctcagtttttcctcaatggtaaggaaaccgcagcgcctgccgggctgactggtgccctgaatatgagcctgcatgagctggaaaaaatgctggagcgtctgctggctcagaaacaacgtaaggagtacagctga

SEQ ID NO: 377055 - DNA, 138 bp, Salmonella enterica
atgcaggcgcagggcctgctggcgagatggttcaggtttcaaccgggggagattgatgccctcgatactgacgatctggagatgtggctggagcaggctgaagagcaaatcaaaagcgagttcggcgacaatcagtaa

SEQ ID NO: 377056 - DNA, 336 bp, Salmonella enterica
atgtcacagacccagtccgatacttttacgctgtcttatcctttcaccactgctgcaggtaccagaattgaacagattgaactgaaacgcctgacagtaaaagacctgaagcaggtgcgcaaaatcaacaaagacccggcagactgggacgaaccactgattgcccgtagcaccggtatcctcccggaagacctcgataacatggatcttgccgactatatggagctgcagaaacgatttcagaaaatcactgggctgggcaagagcgacaaaaacactgatgcaggcgcagggcctgctggcgagatggttcaggtttcaaccgggggagattga

SEQ ID NO: 377057 - DNA, 282 bp, Salmonella enterica
gtgagtgttgaactgactgacaaaggagggcgatgtgcgtcactgggcatgtcaaatggtacgtggtttaccctccttgatattccgggggtggagaccctctttaatacccgtaaaaccaatgacccgattgactgcacacgttcaaaggcccgcaaactggccgatttgattgaagcatggaagccgcccgaccagtggttctccggcaccggcaaatctgagggaaaggcgcttctcatcgctttcctgcgtaactgcaagggttttcgcacttgctga

SEQ ID NO: 377058 - DNA, 522 bp, Salmonella enterica
atgtcaaagattgagataaaccgaatcacgaatgccaacatctatctggatggtactaacctgctgggacgggctgaggaagttaaactccccgatgtctccatgattatgcaggagcacaaggcactggggatggtgggtaaggtggaactcccggctggttttgacaaactggaaggcgaaatcaaatggaacagcttttaccgcgatgcgatgttgtctgccgcgaacccgtacaagtcgctggcgctgcagtgtcgctccagcgtccagcgctacagctcgcaggggctgatcgacgaaatcccgctggtcaccttcctgacaattatgttcaagaagaacccgctggggacgttcaaacagcacgagaacgccgagttctccagtagcttcacctgcacgtatatcagacaggtactggatggtgaagagttgctgcaactggactatctggccaacatcttccgcgtcggtggcgttgatcaactgactgactatcgaatcaatatcgggggctga

SEQ ID NO: 377059 - DNA, 1428 bp, Salmonella enterica
atggcagctaactatctgcatggcgtcgaaaccattgaggtggaaaacggagcccgcccggttaaaacggtgaaatctgccgttattggcctgattggtaccgccccgatgggggatgtcaatacgctggtacagtgcctgtctgagaaagacgctgcggcatttggcagccagttcaccggctttaccattccgcaggcgctggatgcgatttatgaccatggtgcaggcaccgttctggtcattaacgtactcgatccgtctgtgcataaaatcgctgtggtcagtgagaatgtgtcgttcgacaaggcgacaggcagagcccggctggctaatccggtggtcgcgcagctggtactgaaaccggacagcaacggtcagccttatgttgaaggtcaggactactcgcttgatgcacagaccggggtgattactaacctgggtaaaagcattgctgcagatgcaacggtgaaggccagctataactatgctgatccgaccaaagtcaccccggctgatatcatcggtaccgttaacgctgcaggcaaccgtaccggcatgaagctgcttaacgacagttttaacctgtttggctacttcgccaaaatcctgattgctccggtattctgcacccagaacagcgtctcggttgagcttatcgccatggctgagaaactgggagcagtaacctatattgatgcgccggttggtaccacttttgcgcaggctctggcgggacgtggcccggaaggcaccattaactttaataccagctctgaccgtgtccgcctgtgctacccgcatgtgaaggtatatgacccggtgacgaacacggagcgtctggagccactgagccagcgtgcggcgggcctgcgtgccaaagtcgacctggacaaagggtactggtggtcatcctccaatcaggaaattctggggatcaccggcgtggagcgccagctgtcggcaatgattgacgatccgcagagcgaggtgaacctgcttaacgaacaggggatcaccacggtattcagcagttacggcagcggccttcatctgtggggtaaccggacggcagcatggccaacggtcacccatatgcgtaactttgagaacgttcgccgcaccggtgatgtgatcaacgagtccattcgttacttcagccagcagtacatcgacatgccgattactcaggcgctgattgatgcactgacggagtcggtcaacgcctacggtcgcaaaatgactggtgatggtgcggtactgggcttccgttgctggtttgatccggcccgcaatccggagacggagctggccgccgggcacctgttgctgagctacaaatatacgccaccaccgccgctggagcgactgacgtttgagactgaaatcacctcggaatacctgttaaccctgaaagggggcaactga

SEQ ID NO: 377060 - DNA, 252 bp, Salmonella enterica
atgaaagaataccgctattccggcccggccagcggcgtcacgctgtcggacggaaccgaaatcctgctctggccggggaagacggtttccctgccggaggagcatgactacgtgaaggtactggtggcgctgaagcatctgacgccggtaccagaagatactaaacccgccgtcacaccggctgtgcagtcaccaaagcgcagaagcagcagtgacagcgaagtgaaaacggaggactcccatggcagctaa

SEQ ID NO: 377061 - DNA, 465 bp, Salmonella enterica
atgaacgttctgcccgtccttgatgcggtactggcccggttacgcgagaagctgccgcaactgcaggtggagtacttcccggagaaaccggctgaatatcgcctgaaccatccggttggcgcgttgctgctgagctatgccggttcgcgctttgacaggccggatgataccggtgcggtgatccagtctcagactatccagctctgcgtcacggtggtcttccgccagctcaacggtaaaaaaggggcgattaatgtcctggatgctgtccgccgcattctcggcggccacaccccgcccggctgccgccgccgtatctggctgacccgcgaggtgtttatcggtgaagtcagggggctgtggcaatacgccctcgacttcgcgactgaaagcgtctttatcgaagacagcgatttaccgtccggcccgctgttaaccgaagtgaactatgaggaaagcgagtga

SEQ ID NO: 377062 - DNA, 447 bp, Salmonella enterica
atgtactgcaccctggaggatttgcttgcgcaggtgccggaacgaacgctgatcgagctcaccagtgaagagatggacttcgactcgcctgcaacagtgaatacccgtgtggtggacagctgtatccgctatgccgacgagctgattgatgcccatctgcgcggacgctatatcctgccactggcagagataccgactgttctgcgggacattgccatcacgctggtccgttaccggctctacgcccgccgcccggaaggtgacctcccggatacggtgaaggatgaccacaaagaagcgctgcggcaactcagggagttacgtgataacaggctcacgctggggctgccgtccactcagaaagatgtgcctgagcctggcgagtttcgtgtacgcagccgcccggccactttcggcggtcgtgacggtttactggagaaatactga

SEQ ID NO: 377063 - DNA, 339 bp, Salmonella enterica
atgggaaccactcagcaggtcattctgatcacaaccgtaacggcaggggccgcactggcacagcagcgttttgtcggggcagataataccccctgtaaagccggtgccgcagcgctcggggttgccgaagtggatgctgttaccggcgacagcacgccggtgagcgttctgggcattattgctgtcgaggccggggccgctgtcagccgtggtgtggctgttcagtcagatgctcaggccagagccgtgccgcagtccggcgacggtaaatcctgtggtattgcacttgatgaagccgggggtgaaggcgacgtcattcgtatcctgcgcggggtgtga

SEQ ID NO: 377064 - DNA, 954 bp, Salmonella enterica
atgtctgattacttaaaaggtaaacgtgtcgttgatccggtactgaccagtatcgcccgaggctataaaaatgccgcattcattggcgaacgtattttccccgtcgtgctgacggacaaggaaggcgtgcgtgtgccgaccttcgggaaaaccgcctttgtggaatatgacaccgagcgtgccgtcggggcggacagcaatgttctggtccgtgagaaaaccggcacgcttgatctggtgctgggtgagcacgatctggctgcgccagtggactatcgcgaacaggcggagtccatgtttaacgaggagagcaaggccatccgtcgcgccacgaatggcgtgaatctgcgccgtgaacttatcgccgcccgtctggctcaggatgaaaaggtctaccgtaccgggcacgttaaaaaactgacagccggcgaccgctgggccggtggtaagggggaccccatcggggtaattgaagccggtatggaagcggtccgtacggccacggggctgcgtcctaacctgatgaccatgggggccggcgtgatggcgctgctgaagttccacccggcaattcaggcagccatcggagccaacgaacgcaagcgcatcaccacggagatcctgcaggacctctttcagatcgaagagatcgtcatcggtgctcctgtctccctgccgtccatgaaagcggcaatggataaggacagcgtgccgacggatatctggggagacaatctgatgctgcattacgtcggcaagccgcagccgggggcggacagcgcggacgagaacgagccgtccttcggctacaccctgcgccgtaaggggatgcctgttgccgacaagtacgacggagccggcggcaaggtgaagtactgccgttataccgatatctacaaagtcgccgtggttggtggcgatgccgggtatctcattaccggtatcagtaaataa

SEQ ID NO: 377065 - DNA, 1116 bp, Salmonella enterica
atgtcagccattcacatttttaaagccggtactcataccgatatgcacggcaaaaaactgccgttcacgccagacgatcttgccgcctgcgtgaaagcctatgacccgtccgtccatgaagcaccactcgtgattggtcatcccagaacggaagacccggcgtggggctgggtgaaagccctgtcgctcagcggcgtcgatctgatggcagagcctgcccagctggacccgcagtttgctgagatggtcaccgacggacgattcaaaaaagtgtccgcctctttctacctcccggattcaccgtccaatccgaagcccggcgtgctctaccttcgccatgtgggctttctcggggcacagccaccttccgtcaaagggctgaaacaggtgtccttcagtgagcaggaagaaggtgtggtggagttcgccgactggcaggccatcacgaatgcctccctgtggggaaagctgcgcgattttctgatcgcccgcttcagtctggacgaggcagaaaaagtcctgccggaatggcagctcaacagtctgcgcgaagaggcgtaccgcgacacactgtcgcaggatgcagcaggtgcacaattcagtgagacaggcccggggccgtcttccgcaagtaacgaggaatcatcgatgacaaaagaagagattgaagcccttcaggaggagaaccgccgcctgaagcagcaggctgctgatcgcgatgcgcgtgatgcacaggtcagacaggagcaactgcataaggacaatgtggcctttgcagaaaaactggtcgcagaggggcgtctggctccccgcgcctcctccgtggtggttgccctgctggatgccgtcgccggtggcgacaagccggtggagtttgctgagggggaaagccgcacaccgctggccaccgccttccgttcattgctctccgacggggagccggtgatgaacttcgccgaacaggccacaaaggatcgtgtcggcgacgcggtgaaggtggatgtggcggagtttgcggaagccgatcctgagcgtctggccctgcatcagaaagcagtggccctgtccaaaaaagaaggcatcagctatgaggctgctgtcgcacgctgcctgtaa

SEQ ID NO: 377066 - DNA, 459 bp, Salmonella enterica
atggcttccgataacctggtcagtatcaccattaacgataaatccctgcgccggagcctccgtgcgctggatctggctgccacagacatggagcccgcgatgcgcaaaatcgccggaaccctgctggcggaaacacagtttaactttcttgatgaggggcgtccggggtggatgccctcgctggcagcggaagaacgtgacgggcagacactgcaggataccgggcgtctgatggggtcagtatcaaccgaccatgacgaccggcaggctgttgtggggaccaacgttgtttacggtgccattcaccagttcgggggtaaaacggggcgtaatgagtctgttgaacttccggcccgcccgttcctgccggtgacgggggatggagaactacagcctgaagtggtaatccccatcctcgataccattgtccgccatcttgaatcagcggcccgtcgctga

SEQ ID NO: 377067 - DNA, 822 bp, Salmonella enterica
atgagcgtgacaacggctgaactggcgtactgcatgacgcttcccccgaagcgggcagtcagttacctgaagtccaaagggtatcagattacctgggactgggaagaaatgtggcaggaggcccatgcccgcgcctttaccgttgctaaagtgacccgcctggatatcctggaagatattcgcggggcactgcagcaggctgtcgatgaaggaaaaaccgatcgctggttccggcaggagctggagccggtgctgaagcgtaagggatggtggggaccacgtgacacgactgacccggtaacgggtaagccggtcaccattcagcagggcagtccgtggcggctcgataccatctttcgcaccaatatgtccgtactctacagcgccggtcgttgggcggaacagatggaaaacgtcgacgacaggccgtactggatgtataccggcatcaacgacagccatacccgcaggagccatctggcgctgcatggtctggtgctgcgctgggatgacccgttctggcaggcattttacccgccgaacggctggcgctgccgctgtagtgtgattgccctgagtgcgacggatgtacgtgcccgtggcctgaaggttatcagctccggctctgccatgggccaggaactgaaactggtctcagagaaaaccggcgaaatgcggaacgtggccacctttaataccggcaccacgaaggtgaccaccgacgtcggctggtcttatgcaccgggggcagcataccgtcccgacctggcccgctatcagggtacgcttcagccactggcacaacaggaactgagaggataa

SEQ ID NO: 377068 - DNA, 1497 bp, Salmonella enterica
atggcgaggggtatctgggtttcacccgatgaatttgttgctttttctgagcctcagaaatcactgaccgcgcagattgcctcccgcagccgcgcgatcgacttttacggactgggcatgtatctgcccaatcctgatcccattctcaaggctcagggacgggatatccgtatctaccgcgaactgcgcaccgacccgctggttgggggctgtatccgcagacgtaaagcagcgctcaaatcactggagcgtggactggagcgcggtcacgcttctgcccgggtcttccgtttcatccgcgacatgctcgacgatctggatctgtcccgcatcatcggtgagatgagtgatgccgtgctctacgggtatcagccctgtgaaatcatgtggggccgttcggtcagggcgtgggcagtgacggatattgtcggcaaaccgcctgagtggtttcagtttgatacggacaactgcctgcgcttccgggcgcgtgatgcgggtgtggagggtgagctgctgtcaccgtcaaaattcgtggtgccggcacaggatgcctcgtatgacaatccttacggtttcccggacctgtccatgtgcttctggccggtcgccttcaagaaaggcgggatgaaattctggctccgctttgccgaaaagtttggctccccgtgggtgatcggtaagcacccgaggggtgcaaatgatgcagagattgaaaaactgctggactccatggagcagatggtggaggacgcggtggccgccatccccgatgacagcagcatcgaactcaaagccgcggatggtaaggcggacagcagcgaggtattccgcgagctgatcacactgtcacgcagtgagatctccattgcattacttggtcagaatcagaccacggaagcgaacagtaacaaggcctcagcacaggccgggctggaggtaacggctgatatccgcgatgcggatgcggacatcattcaggcagcagtgaatcaggttatcagaacggtggtcaccctgaacttcggcgatgtgccgtgtccggtctgggccatgtgggaacaggagaccattgatgacacccgcgccacccgcgacgaaaaactcacccgggcgggtctgcgtctgaccccgcaatactttaagcgtgagtaccagctgcaggacggcgatattgacgagacaccaccgtcggaacgccagaataacatgctgccgctgtcatttgccgaggcgattgatgccgatattcaggctcagcagcagcttgacgacgcgctggacattctgatgaacggaggtgtgttaaatggcacgctggaacccgtcctggcacctctgtttaagcgggtcgaaaacggggttaacccgactgagctgctgggcgaactggcggagctctaccctcagatgaacacggacgatctgcaggaacggctggcccgcattctctttgtggcaaatatctggggacgcctgcatgagcgtgacaacggctga

SEQ ID NO: 377069 - DNA, 1596 bp, Salmonella enterica
atgacaaaatcatccggagtgattttaaacgccgctggcggcggccccgaagggatgagtcccatggacgggaggaataaccttgctcccgttttgcctgatacctcggcgctggatgcccctcccgttctgttgccttaccagcagcgctgggtggcagacacctctccgcttaaggtgatagaaaagagccgtcgtaccggtattacatgggctgaggcatccgataacgtactgaccgccgcctcttctgcgccagcaggcgggatgaatgtgtattacatcgcttataaccaggacatgaccgtcgaatacattcaggcgtgtgcaatgtgggcacgggcattcaactatgcggccagtgaaattgaagaaggattctgggaagaggacgacgacgacaaacacatcaagacttacaccatcaaatttcctgactccggctttcgtattgttgcgctctccagccgcccgtctaacctgcgtggccgtcagggtattattgttatcgacgaagcggcgttccatgagcaactggacgaactgctgaaagcggcgctggcgatgcttatctgggggggaaaggtacgcgttatctccacccatgacggtgacgacaatccgttcaatacgcttatcggggatatccgtgccggacgtcagggaggcagcgtacatcgcatcactttccgggaagccgtatctgaggggctgttccggcgcgtttgtctgcgcaccgggaaggaatggtcagaggcatccgagcaggcctggatggcgtcggtgtacaaattctacgctgccggcgcatccgaagagcttgactgtattccggccaacggtggcggcgcctggctgtcccgtgccctgatagagtcccgcatgtccgctgatacgccggtattgcgtctgacctgtcaggaaggttatgaactgctgtctgatgaggttcgcttccacgagacacaggactggcttgatgagcatctgaaacccttgctggaggcactccccgctgatgcccgctctttcctggggcgcgactttggccgtagcggtgatttgtcggtggactatcccctgctgcaggagaagaacctggtacgacgcgtgccattcgtactggagctgcgtaacgtgccgttcagacagcaggagcaaatcacctggtatctgatggatggcctgcccggtctgctgggtgcagcgtttgatgcccgtggtaatggtgcctatctggctgaatacgccatgcagcgctacggctccagccgggttcagcaggtgatgccaactgaaggctggtaccgggagcatatgcctccggtcaaagctgcactggaagacggtaacctggtggacttaccaaaggatgaagacacactggatgacctgcgggccgttcaggtggtgaacggtgtcccccgcgtgccggagcaacgctcaaaagcaaaggctgacggtggtaaacgccacggggattcagccatcgcactggcgctggcgtatttcgccagccgtgaaattaacaaagggccggtgaaggcaagctcacgctgtcgtcgtcaggcggcccgtatgctggagggattctga

SEQ ID NO: 377070 - DNA, 546 bp, Salmonella enterica
atggccagacgcagcacaatagaaaagctgccggaagacgtgcgccgctggcttgaacgggcgctgactgaatccggcttcagcgggtataacgagctggagtccctgctgcgtgagcgggggtacgttatcagcaaatccgctatccatcgctatggacagaagattgagcgccgctatggtgctatccgtgcggcaacagaagcggcccgcatgctgaccgaaggcgcagcagacgatcaggatgcgcgttcggaggctgtgatagcccttattcagaccgagctgttcgagagtattgtccagttgcaggaggcggaagaaggcgaagtcgatcctaaagaacgcgtggccctgctgtcgaaggtggcgaagaatgtggctacgctgtcccgcgcgtccgtcaacctcaaaaagttccagtctgaagtacgggccagagcgcagcaggcagccagcaacgccgagaaaattgcccgtaaggggggactgtcaagcgacgcagtacaggcgcttcgtcgcgagattctggggattgccacatga

SEQ ID NO: 377071 - DNA, 312 bp, Salmonella enterica
atggtcgatattacccgggtacgccgcgaatccctgcgctggagtctgctggttgccctgaacaagacccgcccttacaccgccagcgagacgctgctgctggatgtgtcccgtgccatctacccggacaccacaccgctggaactgcgccgcgaactggattatctggctgaccgtaaaatggttgatctggagaaaaaaccttctggcgactggtttgctgacctgacccgcctcggcgtagacttggtggaatacaccgtggaatgtggtccgggtattgcccgcccggaaaagtactggagtgaataa

SEQ ID NO: 377072 - DNA, 327 bp, Salmonella enterica
atgacactgcaggttgaattctggacggtagtgagttttctgctcaccttcatggggtttgtgggagggctcgccaaatggttgttcagtaaaacagaagaacgccaggcggcacgattcgcctcccttgaacaggccctgcaacaatccgcctccaactggggcgagctggaaaaagaatttatgcgatttaaagcggatttaccgctgaattatgtccgtcgagaggattatatccgtggccagacagtcattgaggccaaactggacgcgctttataacaaactggaagtggtacagcagtaccgcaataccggaggtcaataa

SEQ ID NO: 377073 - DNA, 651 bp, Salmonella enterica
gtgtggcatctggttaaaaagctgccgtggcgcggcattctgctggccattcttatcaatgcctttctggtcggcctgtatgccatgggatacagaagtggtcatgactctgcaaagcgtgacggtgataccgcgctcagtcagttgcagtcagcatttgacgcgtacaaaacggagcaggcaacgcttgagaatgctgcgctgcgggcctgggccagacggtatcaggagcaggtggccgccgggcagcgggctgaagccggttatcttgagcagattgctcaactggagagccggaataaacaactacaggggcaaattaacgatgtcacacagcgctggattgatgaaaaaggtaagagccatcccattgagtgcgtgtttactcgcggtttcgtgcgccagtacaacgccgcactcggatatgacaatgcatccgtcgacaccggtcattcagactcagttgccgccgctggcacccgctctggcacagcgaccgggcaacctgaaaccactgacacccggttacgcgattcgggtgtctcccagcgtgacgttctcgccaacatcatcgacaacgcaggacaatgtcgtcgctggcggaaccagataaacgcgttactggatgaacgggaaggattacagaaatga

SEQ ID NO: 377074 - DNA, 729 bp, Salmonella enterica
atgaactggcctcaaatcaccctcattattctgttcgcctttggtctgggcgtaaccgccatcagacacggagaaccacgtaacgataaatacagcttctggtggcagcttgctggcaacctggtgattgtctggctgctctggtgtggcggcttcttcagtcaggcccgcgcagcgcagcctccgcaggctgcgctgcagtatcgcgatgatgtgatccgtaatgcccggcttgaatggggactgtctgcgccggtggccgatttcgccgcgcaactgcatcaggaaagcggctggcgacctgatgtggtctcgccggctggcgctcagggactggcgcagttcatgcctgccactgccgactggataagccagttgataccgatgctgagcaatcgtgagccgtttaatcctgcatgggctatccgggcgctggtcagctatgaccgctggctgtggcagcgcgtcagcgccgccaacgactgcgagcgtatggccatgacattgtcgggctataacggtggtctgggctgggtacaacgggacaggcggcttgcatcacagaaaggtctggacagcacccgctggttcggacatgtcgccacggtgaatgccggacgcaatgcggccagctggcgggagaaccgccattatccgcagcgcatcctgcgcgaactggcaccgcgatatctcacatggggaggctgcagttgtgtggcatctggttaa

SEQ ID NO: 377075 - DNA, 351 bp, Salmonella enterica
atgaaaaacctgaaaaaattcattccccctgttaaaaaacctcgcctcagcggctggctgctgacctcagtgctgttgctgggcatcatcgctctggtctcgccacagcagttgcctgttgtgatctacaagctggcactcatcacgctggcagcagtgctgggttactggcttgaccgttcgctcttccccaaagcccgtcccggtcagtacctgaaacatgacgacagactgatggctgaagggcgtttccctgtgcagaccggccttcaccttgtattttctgctgcgttaatccgccgtgcactgattgttgcagcggtctgtctggctgtggcaacaggactgtga

SEQ ID NO: 377076 - DNA, 801 bp, Salmonella enterica
atggaacgaatggctggggactttctcgaaggtgttgatgatttctaccaaagttcctgccgaatgatgcatcacctgacggaacgttctcagcgagaaaacatggctactggtggttatgttctttttgcaaatatcgtgataggacacaatgaacacctgttgatagctattgtaagcgctaccattgggtccactgtcacagatgattttaacatccaagatagtacctatcttgatattgctaagctgcgtatggctgggcgcattgacttaaccgcgtgggaaagtggcgcagagcgctatatcagttttcttaaggggcaaggtaatgtttcaaactattttaaacagttcctaggctgtaatgatgtcttaatcgccaaacgagagtctgaaaagttacgtgacgttttaaaagcatttgcggcagagaaaggacttgacggcgctgaaaaagatgcatttcttaagagtgcgtttgaacacttacatgcactaagtaaggctggtgaaccacttagtcttgaaacccttgttaatgccatttggccccaggctcccgaggagttatctggtaaacttgctgctgaagagttggagttatcggatggcttcgttcctgatggtcgagtcattcgggctctggtatcttttaaaggcaagtctaaatattgggaacttaagtttgaccgggaagggaaaactgaaggctatattgattatgatccggaaacaaatattatcaccctacgtaatgtacctgaagaatttagggaaatgtggatgactgaggtttaa

SEQ ID NO: 377077 - DNA, 432 bp, Salmonella enterica
atgatgcaagcatcgacaaaatacttatccccggcgctgaaaccaaatgtgccaacgttggcacatttgggaaaagccaaacttttcgaattaatgacagaagacgacgaagagcttgccgaactggccgacggcggcacagttgccggcctgacgcttgacgacgttgatcgcatgtcagtacgcgaacttcgccaggccctgcgcgaagcgcgcgaaaccaacgcagcacaacagcgcgtactcgccgataaaaatgaaaaaattgattctctctctaccagactggaaaagaaatcccgtattcagccgcctgagcctgatgaggaggttaagaagctgcgggcggaagtgacagcattagcggttgaggcggaatctgctatcgccgttcgactgtccagcgcttttgagacactgtgcgcatattga

SEQ ID NO: 377078 - DNA, 165 bp, Salmonella enterica
atgattgatacccccagagacttcatggcaggcctggtctgtcaactggaaagcacagcgcgtagcctgcgctccacatttgacctgccggacgagccaacaggcaatgcagcgccttcatggctgactgagccgacgccacagattaacgggctggaggcataa

SEQ ID NO: 377079 - DNA, 1770 bp, Salmonella enterica
atgaatgctgccctgactgaacgactggtttatgtcgcccgcgcggcacgtgacgcggggcatggtaaacgcggtgcaatatacgacgctgcctgtgctgaacttggcatgtcccgcgccactctgctgcgcaggctgaaggaggtctctgtgactgataaacgcaaaaaacgcgccgatgccgggcgcagcgccctgacccgcgacgaagccgcgctgatatctgccacactgcgtgaggccacccgcaagaacggtaagcgtctctattccatcgcggatgcagtggaaaccctgcgggctaacggctttatctccgcaggcagaacagatgaaaccaccggtgagtttttcccgttgtccgaagatgccatcagccgtgccctgcgtaactatggcctgcacccggaacaactggatgcccctgcaccatatactgaagtggccagtctgcatcccaatcatgtctggcagattgatgcctcgctctgcacgctttactacctgagcaatggacataaagggctgcaggtgatggacagcgcgaagttctacaagaacaagcccgctaaccttgcccgtatcgccagtgaccgcgtgtggagttacgagattaccgaccatgccagcggctggatttacgttgagtatgtgacgggggcggaatccggtgagaacctgtgttctgtgcttatcaacgccatgcaggagcgtggcggcgcagacgtgttgcacggtgtgccgaaaatactctatctcgaccccggctcggcaaacaccgcgggtatgacgaaaaacatgtgtcgctcactgggcattgacctgatagcgcacaagccgcataacgcccgcgccaccggacaggtggaaaaggcgcgtgacattatcgaacgcaagctggagccgggtctgaagttccggccggttcacagtctggaagaactcaacgcgctggccgcgaaatggcgcagccactttaacgccacggctgttcacagccgccacggtaaaacccgcacggatatctggctgaagattactgctgagcagctgaaaaaagcgccttccgttgaggtatgtcgtgaactggctgtggcggcaccagaactccgcaaagtcacgccaaaacttcgtgtctcgttccggggcactgaatttgacgtatcaacggtaccgggcgtactggtcggtgaaaaactgatgattacccgtaacccgtggcgcagcgatgtggcacaggtggttctgaccggtgaggacggccacgagacgttcttcctggtcgaagaggtcagaaagaacgagtttggctttgctgaaggcgcggcggtatttggcgaaagttacaaagccctgccggaaaccccggcgcagatggcggcaaaagaaaccgaagcgctggtcaccggtacagacaacgccgcagatgcagctgccgcacgcaaggcgaaggcgctgccgttcggcgggcggcttgacccgtataaacatattgatgacgccacacttccggcctgtataccgaagcgaggtcaggcctctgacgtacgcggaccgcgcactgaacagcgtcccatgactcatgtggaggccgcgaaagccctgcgcgggaagttcagcgccaacggccttacctggacgccggaacattaccgccagttaacggcacagtatccggacggcgtaccggaagccgcactggatgaagtcatggctacgctgaccacgccggcccgcagcagcgttatcagcattgttaacggcaactga

SEQ ID NO: 377080 - DNA, 1167 bp, Salmonella enterica
atgctggtactgaagcagcaactgaaagaggcccgtattccacaggcggtggtggcgagagctgtcgatgtttctgaggccacgctggcccagattgtgaatcataacgcgtggccccgcaccagccccggagaagtgcgccggcgtcttgcgtcctggctggaaagtcaggggattgatacagcgaagagttttgatgctgtacagggcgcggccacgccccgtacagcgggtaccacagataaaacgagcctcagtgaggaagagaatatgttactcaaaaaacaggtgttatttccagcaaccaaaaaagcgtttggtcttttccgtgacccgttcgccgacgaagccatgcagggttctgatgatgtgttcaccacaccagacattcgctacgtgcgtgaggcgttgtaccagacagcccgtcatggtgggtttatggccgtcatcggtgagtccggtgcgggtaaatccacgctgcgccgtgacctgactgaacgtatcaaccgcgagaatgcgccagtgattgttatcgagccatacatcatcgctatggaagacaacgatgtgaaagggaaaactctgaaggcagcagcgattgccgaagccattatcagtaccatcgcaccactggaaagcatcagacgcagtcaggacgcccgctttcgccagttgcatcgcgtcctgaaagacagcaaccaggcggggttcagccacgttctggtgattgaggaggctcacagtttgcccattccgacactgaaacacctcaaacgcttttttgagctggagtccggtttcaaaaagctgctgtccatcgtgctgattggccagccggaactggcgacaaaactctctgaacgcaacatggaagtccgcgaagtcgttcagcgctgtgaggtggtcgaacttctgcctctggacaatcaccttgaagaatttctgacgttcaaactgcaacgggccggtaaacaactgacggacattatggacgccagcgcagtggatgccatacgtacccgcctgagcaatccgggaagtcatcgtaaaaatatggtcagcctgctgtatccgctggccgtcagtaacctggtaatagccgccatgaatctggccgctgaaatcggggttccacaggtcaacgctgacgttgtcaaaggggtttaa

SEQ ID NO: 377081 - DNA, 270 bp, Salmonella enterica
atgaaatccaccacaggtatcaaccagcaaatcagtaaagtgcagtcagccattatggcgcttaaggcgacgaacacggatgtacaaagcatcaccatcaggggtaacaaacctgtcatccgcgtttccaggagtgcgcattgcatgcgcatgcttgagcagggaaaggcctgttatctgtataccggacatgaccacaggggatatttccgtcagggcgttttcgaactgcacggctgtcgcgtcgtgtggccggaatctttgtggtaa

SEQ ID NO: 377082 - DNA, 531 bp, Salmonella enterica
atggcaaaaagtacaaaaggtgcaaaacgtatcaaggccgcagcagcactctgggtgccggggacacgtgaagaggtcattgagggcatcagactgctcggtgacgcacaccgtgaactggtcagggctgaaacagaaatgaatgacgccattggcgatatcaccgcacgttatgccccgctcaccgagagcctgaaaaaacgcatggccgaactgcagtccggtattcagacatggtgtgaggcacaccgtgatgaactgaccggcaacgggaaggtgaagtttgctaacctcaccaccggcgaggtgcagtggcgaaaccgcccgccgtcagtcagcattcgcggagcggataatgttattgaactactgagacgtctggggcttgagcgctttattcgtgtaaaagaggaaataaataaagacgctatcctgaatgaaaaagaggccgtgaaaaatattcccggtatttccattaaaagcgacattgaggatttttcaataattccttttgagcaggatgtgcagtaa

SEQ ID NO: 377083 - DNA, 195 bp, Salmonella enterica
atgatatttaaatgtattcagtgcgagagggatataacagccctgcgttttcacagcgccatcgccgtgatgtccggtaaataccacatccctgcggtacgcgtcaccctggtctgcccgtactgcagccagcatttttcggcagacgtgcctgtcatggaattctcccgccctgacagggaggacgcgcaatga

SEQ ID NO: 377084 - DNA, 273 bp, Salmonella enterica
atgattaccccacaggaagcacgccagcgtacccgcgcccttgttgaacactatgtcaacgagtgtgaatgccgcgacctcaccgatgtgaagcacgtcctgacggcgctaatcagcatggccacgcaggccattgtggcgaccaacggaaaggcggctgcactgcaggtactggtgaacacactcacccacacggcagagaacgaggtgccgtaccggatggaaaccactgcagaaggcggcctgcacatcaccgtcagccggaagcactga

SEQ ID NO: 377085 - DNA, 303 bp, Salmonella enterica
atgacacggaacaccgaactcacccgcaccgccctctaccgtctggccctgcagcgtttcgggccggacgcacaggccctgaaactgacagaagaggccgctgaactggcggccagtgccgcccgcaacctgaacggacagggcagcgaaagtgacctcgcggcagagctggcagacgtggaaatcatgacagagcagctgcgccttcagggaatggaccggctgattgacttccacaaacagaaaaaactggaacgccttgccgcacggctgggcgtcacatacaccggagaaatcatatga

SEQ ID NO: 377086 - DNA, 384 bp, Salmonella enterica; identical to SEQ ID NO: 27722

SEQ ID NO: 377087 - DNA, 216 bp, Salmonella enterica; identical to SEQ ID NO: 27721

SEQ ID NO: 377088 - DNA, 684 bp, Salmonella enterica
atgacagaccaggataagcacattgagaaactgaaaaagttgctggcgctggcagcatccggcaacccgcatgaggctgctctggcactgcgccgcgcccgtaaactgatggatgttcacggcatcacacattccgacatcgccatgagtgatattgatgaaaccatcagtcactactggccgacaggcagcctccgtccgccgcgctacatgctgggcctgatgaacatcatccgcgaggcatttggtgttaactccatcattcaccccggcacatatccgggtgtggggttctacggcaaccgggaacgggccgcactggccgcgtacacctgggaagtgctggcccgtcagctgaaaaaggcgcgtcagcagtatatcagtgcacagaacaaaagaataaaaaccgccacccgcaccagccgtggagaccagtttgctgaaggctgggtgctggccgttatcagtgaaatacagtccttcgccctgaccgatgacgaacgtgaactgatgcagcagtggctggaacataaatacccgcagacgcaaaccaccagggcgcgtaaaccgggaagaagtcgcaatggcgacgcctcgcgctatgcggggtttcgagaagggcagaacgtcagactgcaccgaccggtcagtgggcgggaacagcagaaactggaggccagatga

SEQ ID NO: 377089 - DNA, 231 bp, Salmonella enterica
atgattacgttatcaggtaacagccggaaattaaaagcctgccgaatatctgccagatacctttttgcccgcgccttttttaagaacgtcaggccggggatcacaattggtgttattgccggacgcgaacaggttgaaaaatacatgtcaggtgcatggtggaataaagaccctgtcattgctgcccgtaatattcatatcagttggggggatattcagaatgacgactga

SEQ ID NO: 377090 - DNA, 453 bp, Salmonella enterica
atgatgactaaacaacgtcttatccagctcattcatattgcccgtaatgaactgggtatggatgaagacacctaccgccagatgttacaggggctgaccggtaaagcctcaaccaaaggaatggataccacacaactaaactgcgtgctggaatccatgaaaaggaaaggctttcgcgttaggcctgcaggaaaagccagctccggtttaccgctggataaccatccgcaatccaggaaaatccgtgcgctatggcttgaaatggctgctgccggcattgttcgtgaccgttcagaaaatgcattagcgcggtggatcaagcgggaaacgggcatcagcgccctgcgctggctcaatactgaacaggcaagcagtgttattgagaaactgaagaagtggcagcgcagagctgcgggagtaaaacatgagcgacctgaatcagtttcgaagtaa

SEQ ID NO: 377091 - DNA, 390 bp, Salmonella enterica
atgagcgacctgaatcagtttcgaagtaaagggccggaactcctggtggaactggcacagcatacctctgagaccgttcgcgagattattgatattgagcccgcaattgccgaccagattggtcaggccgtcgcgaaccgcatgatgcaggtctggggcgggcaaaacgtttatttcccgatgggcatggtatggaaggtcagtcagcgcgaccgggaaatcttcagggagtttaacggacgtaaccaccatgaactggcccgcaaatttggtgtttcgcttcagtgggtctacagcgtggttaagcgggtaagaaaagaagaactggatcggatgcagggcaagctatttgctgatgaacccgatgtagatacggagaaaaaagagtaa

SEQ ID NO: 377092 - DNA, 1098 bp, Salmonella enterica
gtgtttaaagctcttgcaggaatcgttctggcactggttgccactctggcgcacgccgagcgtatccgggatctgaccagtgtccagggagtacgggaaaactcgctgatcggctacgggctggtggtcgggctggacggtacgggcgaccagacgacccagacgccatttaccacccagacgctgaataacatgctgtcacaactggggattacggtccccaccggcaccaatatgcagttgaaaaacgtggcggcggtgatggtgacggcgtcgtatccgccttttgcgcgacagggacaaacgatcgatgtcgtcgtttcctcaatggggaacgctaaaagtctgcgtggcgggacgttattaatgacgccgttaaaaggggtggacagccaggtgtatgctctggcgcagggcaatattctggtcggcggcgcgggcgcttccgcaggcggcagtagcgtgcaggttaaccagcttaatggcgggcgcatcactaatggcgcgattatcgaacgcgagttgccgactcagttcggcgctggcaacaccattaatctgcaattgaacgacgaagattttacgatggcgcagcaaattaccgacgccatcaaccgcgcccgcggttacggcagcgccactgcgcttgatgcgcgaacggtacaggtacgcgtgcccagcggcaacagctcgcaggtgcgttttctggcggacattcaaaatatggaagtcaacgtgacgccgcaggatgcaaaagtcgtgatcaactcgcgtaccggttcggtggtcatgaatcgggaagtcacgctggatagctgcgctgtggcgcagggcaatttgtcagtgacagtcaatcgccaactcaacgtcaaccagccgaatacgccatttggcggcgggcagaccgtggtgacgccacagactcagatagatttgcgtcagagcggcggatcgctacagagcgtgcgttccagcgccaatctgaacagcgtagtgcgcgcgctgaatgcgcttggcgcgacgccgatggatctgatgtcgattttgcagtccatgcagagcgcgggctgtctacgcgccaaactggaaatcatctga

SEQ ID NO: 377093 - DNA, 1317 bp, Salmonella enterica
atgagagatctataccgtgaccagtatggggaagtgggagagaatcttgtccatagcgagccactgactattgaccagcatcgctatattaatgaggctcttaatgtactcaaggcctgcatgaagcgcattgaagcgggagatagccagccacttatagattatatagatggatttgatgctgctgctggtgctaatgaccaagcctctgcaactctatctgttagtgctccccaaaaaacaagcattactgaaggcaaacactgcgtaaccgttgcttctctctttgagcagtacgagcaggaaaacgcccagaactggaagccagcaacattacgagaaaacaaagcttctcatgctgcgttaatcgaggtttttgattatctgggcctcaatgctgacgccaatgtgttagctcgtgcggatatgcttagggttcgggatatcctccagcaattgccgaagaatcgtaagcagcgtttcaaagatgttccgttggttgacctgctaggtcgtgaggataaaaccgattgtctggatattgttaccatcaataataaatatctcattaagatggcggctgttttcaagtgggccgtgcgtaatgacctgattaaaaagaatatgacagaagggctagagcttaaggttccccagcgtaaagcctctgaggcgcgtaatgctttctctacggagcaggtaggacaactactggctgccgcccaagtttactcacagagaccttctggtaagccgtatcattattatgttaccgccttggctgctatcactggggcgagactcaatgaaatagcccaactacaggtcaaagacgtcaggaccactgaggcgggaaccgtttatattcatatcaatgaagacgatagtagtctacccggtaagagcatcaagaacgctcatagtgaccgctgtgtgcctctggtcgatggggcctatggttttatattggctgactttatgaggttggttgagacccgtagaggcgctgatggtgatgacgctatggtgttcgatggtcttcgcctcatgaagaacggttacggtgagcaggtgagtaaatggtttaatcggacgttgttgcctaaagtcctcgcagatcgtagcggcttagcgtttcactcgtttagacatacagttgcgacccagttaaaacaacatggggtcgagttggcgtatgcacaggcgatcatggggcatagttcagggtctattacttacgaccgttatgctaaagaggttgaggttgataggctggtcaatgtgatggctgatgtttataaggagattgtggggtaa

SEQ ID NO: 377094 - DNA, 636 bp, Salmonella enterica
gtgatatcttattattttcaaggggttgcccttggcgccgccatgatccttccgcttggcccgcaaaatgcgtttgtgatgaatcagggaattcgtcgccagtaccacctcatgatagcgctgctttgcgcgttaagtgatttagtcctgattagcgccggtatttttggcggtagcgcgttgctgatgcagtcgccgtggctgctggcgctggtcacatggggcggggttgcgttcttgttatggtacggttttggcgcgctgaaaacggcaatgagcagtaatctggagctggccagcgccgaggttatgaagcaggggcgctggaaaattattgctacgatgctggcggtaacctggctgaatccgcacgtttatctggatacgtttgtcgtgttgggcagtctcggcggacaactggctatggagccaaagcgctggtttgctctcggcacgattagcgcgtcgttcttatggttttttgggttagcgctactggcggcctggcttgcgcctcgactgcgtacggcgaaagctcaacgcattatcaacattctggtaggggtggtgatgtggcttatcgccttccaactggcgcgggaaggcgtcgcgcatatgcacgcgcttttcaactaa

SEQ ID NO: 377095 - DNA, 1560 bp, Salmonella enterica
atgcgtataacagtaagtgatatatcaaccagagaatcacagcagacggtacagatacaagctatcagaagttgggataccataccgtacctttcaatgttggatggactttatcaggacgatatctttcatgagcaaatatctaatttaccagaagaatatattaagctggatgagatggccaaagatgaagaaaagaacagcttaaatatttatgaattcttctttgagccaacacatgaaattatatgtgaagaaatccaatcaacattggatttttattattcaaatagcgcaaccttccgtaggctggttaattataaagtagagcgcagtatcaatgacgatgtagataccaataaatgcgaggtaaagatatctctaaattacagttacgaaaatattgatggggggcgaggatgtttatcgcttccatttgatcaaaacggctatccaattccccctgactttcacaactgtgtaaatggaatcacatcaaaaaaaatgttgttagatctatttctaaaacatattttgcacgatcatttaaatgcaagcggtgaagttgcaaacgtttacgccaatgttatttataaagagattgatcccgctgcaattgcacatacatcgtcgtgtttttctcaggtaacgatgagtggtgaacatgagctatttaatgtagatagcgtaactgttccacctaaaagcactgagcaaattatatttgagggaaaggaaattcaaaagcaaattttcttatcttctcatagccgcaatcatcttcagccagtaaccattcataaaatggacaggagtattaaaaacattgcagtaactggtttgttattatcatcaagattagcagtaacatctggtgattataggataaaaaatggtaattcagagggtgagaatgattttttacctgttaaagaattacagagatatgaaagggctctcccggaggatcatcctgccccaactacggagcctaacctggcaggtaaggtgttagatggcctatttgaacacgttacatctatggcagggggacgctacagaaaacaagcctcatatccaccgctgtcatcggaagcgcctaatacgataaaatatggcgacagagagctcgttttaactaaagaacccggttcagaaacgtatcaggcaacctattcggatagcggaaaaaattcagccataacattttaccgatcttctgatggaagattttatcaggcgtcagggctgaaaggtggggggcttattcgccatattgataagccttattcagagttaagagaaggagacacgggttatgatgaagagcttctggatattacggatgattcccccttactggaagatatactggcctctctgtcagaaaatttataccctacatcagaagaaaatgtacaaagtatttataagaaataccagagtggggatgctgtagcaggggagactgaagttgtattatgccgaggtacaataggtccgcaggctgaaaatattgttagttttaaaacagcaggcggtattgagggggcgatgtag

SEQ ID NO: 377096 - DNA, 930 bp, Salmonella enterica
atgaaacaatccaataatcaggtgggtgaaaaagtattggtgctgggcgcgggacaactgggggcgtcagtgctggcgtcgttggttccggcgatcacacagcgtaatggttccgtttgcgttattgtgtcagggcgatccagggataaacagagcaaacgacgttccagcattcatcaacaactggcggatgccggtgcgcggtttatcccggtcgacatcgcagacagttcggttgcagcgttaaaagatcaattccacggttttgatacgatcatcaattgtatggggtttgtcgccggtgcgggtacccagataaaaatcacccgcgcggtactggaggcgggcgttaagcgctatttcccctggcagtttggcgtgaattacgatgtggtcggcaaaggcagcggccagccggtgtgggacgaacagtatgacgtcaggacgcttttgcgcgagcaaaacgtcacagagtgggtgattgtttcaaccggtttatttacctcttttctcttcgaaccggcctttgatgtggtcaacttagaccaaaaaaccatcaatgccctcggcggatgggaaaggcaggtcaccgtcacgtcgcctgcggatattggtcgcctgaccactgaaatttatctgcatcagccgcgtatcactaacgaagtcgtctttgttgcgggggaaacgacctcttatgcaaaactggcgaaaacggtcgaacgcgtgacgcagcaaacctttacccgaggtgtattgacgctacctgacttacaggagcaactccgtttacatccgcatgacccaatgctgcgctatcgcgtcgccttcgcgcgtggtgacggtatgtggtggccgatgagtgacacctggaatgcacaacatcatctgccgacacaggatattgccacctggctgaaaacacagcaatga

SEQ ID NO: 377097 - DNA, 966 bp, Salmonella enterica
atgagatctgttaaggtatatgaggaaacctggccgttacatacgccttttgttattgcgcgtggtagccgaagcgaagcgcatgttgtcgttgtcgaactggaagaagagggcgtaaaaggcatcggggaatgtacgccatatccacgttatggtgaaagtgatgcctcggtcatggcgcaaatcatgagtattgtgcctcagttggaaaacgggctgactcgcgaagcattgcagaaactgttgccggcaggcgcggcgcgcaacgcggtggatagcgccttatgggatttgcaggcccgccagcggcagcaaagccttgccgggctgctcggcgtgacgccgtccccggtttttactaccgcgcaaacggtagtgataggcacgccggaacagatggctgccagtgcggcggcactatggaaaaaaggggcgacgttgctgaaaattaaactcgatgctcgtctgattagcgaacgtatggtggcgatccgctcggcggtgccggaggcgacgctcattgtggacgccaatgaatcgtggcgcccagaagggctggcggcgcgttgccagttactggcggatctgaatgtcgcgatgctggagcaaccgctgcccgcgcaggatgacgccgccctggaaaattttattcatccgttgcccatctgtgcagatgagagctgccatactcgcagtagtctgaaagccctgacggggcgctacgatatgatcaacattaagctggataaaaccggcggtctgactgaggcgctggcgctggcaacggaggcgcgggagcaaggattcggcctgatgctgggctgtatgctctgtacatcaagagcgattagcgccgcgctgccgcttatgccgcaggtgagcttcgccgatcttgatggcccaacatggctggcggttgatgttgagcctgcgctacgctttacgacgggtcaactccatctttag

SEQ ID NO: 377098 - DNA, 258 bp, Salmonella enterica
atgggttcgcccctgattcccgttgttctggggcatcattttatggacaaaaacgatcagcagacacggttggaagaggggccgccagcgaaattacagtcaggaacgctgcccgaaaacttcaagttcaccgctatttcgataatccagtggccagcccccggtcgtcagttactgatgaaggggagaaggctgggcaaaaatgaggaagggataatttgccctggtcagcttccgttgctgacgatgacaaaataa

SEQ ID NO: 377099 - DNA, 129 bp, Salmonella enterica
atgctgaacatcatggtgaataggattacggtgccagcgatggcatgtaacggcatttcgtctggagcgtcacgtgaggactgtgaagcacaatgcgatatgttctggttatatggcgagtttgcttaa

SEQ ID NO: 377100 - DNA, 720 bp, Salmonella enterica
atgtctcaacaagaaatcagcatcattaacctcgaccagcttgtgtccatgacctcagttgaaattgctgagctgacaggcaaggagcaccgaaatgtccttcgtgatattcgcaatatggttgaggagcttaacgcactcaaaactgagcactgctcaaaactgagcagtcctataggggtgattgaagatgtctatctaaatgcgcaggggaaacagcagcctctgtaccgtctcgaccgtaagcatacttttattctggtcgctggctattctgttcacctacgcgccaagtgttacgaccatattcagacgttagaacgtcgagttcttcaactggaagaccagaagaaacgagcagccattcagtcagctaatcgtcgaggcgtgacttggggcgattactgcaaggccaatggtctacccgctcagaaactgatgaccatccttaagaaagagcgcaagctgttccgagtacattcaagcagtggcgagtggtcagtcaatccaaactatgtggagtactttcgaattatcaaacctactgaccatcgattcaacccaaacggtataaacattcggtttaacgctaaggggctggagttcttcagccgacctgaaaacgtactcaagatgcacagaaaggtcatagcggttcatggaagcgacgctgctaaacagcaacacatacaggcagtagcaaagctggaggggaggtaa

SEQ ID NO: 377101 - DNA, 204 bp, Salmonella enterica
atgactaataacacaaatgacacaatcaagattgacccaaggacaccagaaggccgtaaggcgttacgcctgatggtggtaccccccaaggcactgatagctactctgggtctgcctgccaaggaaaaccgcccgtattactctaaagctgccctctgtctcatggcggttgacgcagggctgaccccaagagatttcatgtaa

SEQ ID NO: 377102 - DNA, 411 bp, Salmonella enterica
atgtctatttcttatcgcaaactggatatcgcactgagcgctgacaaagaaactgtactggtattcggtcaggagctatccactaagtatttcaccgaaattgtcgttacaaccatgctgaacagtacaggctctgacatggcgaactcaaatcgtattcttaacgatattcacgccgctggtcttgatgcaggtgattacggcaagtattcccgctggtgggctcaaagcaacgcacaggagcgccaagaggctgaacgccgacgtaaagaagctaaggcacatcaagaacgtatggctgctattcatgcgacaccagaagagattgctaaggcggtcgctgaacgtaaagcccgagaggaagcattgattaaacgcttcggcaataaaggggccgctttcgggctgtaa

SEQ ID NO: 377103 - DNA, 1122 bp, Salmonella enterica
gtgtctattacaaatcaaattaacaaagcatcctcactggcttctctgcgtcagcctcagcgagataaagacggtcaaatcattaaggggtctatatggggcactgacatctcacgcactgactatgttcagatgaccaatggtcaagacgcccaagttctcaacgtaggctttacggaccgctcaggccgtccgatggccttcgggaatgattcacatgattttgttcaggcgctggaggactctttggatgagaccttcaatgatggagacttccgcactgctgtaatggagaatgtcttcccttgtgagtttcgcccatacggcactgaccctacgcctattcgccgtcaggctctccagaatcgcaccgtccgctttaagcataatggcgcgtttaatccagctaaggatgctccgtctaccacagccatcaaaggggcaagcgtaactgtcaccccagtgttgaaccctgagaccaataagacgggcatcctgtgttctgctgctactcatgtatctgacttcgatatgatgggcggttggaccgagggggcattaatccagactgtaggtgatatgcaggttcaatacagccgccagatgttcgccgctgtggtcgatgtcctgaaagatacgccagaccttcaaatcattgaggcagccccactaagtggtaaaccgtctgatcaagctgaagatcttctggatacattagcgttgaatcttccggtcgagttgggaaatacactgagcgattacgctgtattggtccctgagagacttgaggcaatcttggaccgagccgctcaacgcgcaggtcatgaggatattagtgagctattgggctgcactgtatgcagctatgcgggcgatgatacaggtgtctatctcctgcctaagcggttcgcttctatctctttcaggtcaactaaagacgctaagacggtagatgtcaaagtgacccgaaatagtaacactgctgggtatgaccttgagttaatcagtgtggtcgatgtgttggctactggttccgttaaggtgaaagcaggtgagtttgacgttgagaaagacgcctctttcccgttgatacatgttattcggtttactaccccagagtaa

SEQ ID NO: 377104 - DNA, 318 bp, Salmonella enterica
gtgaataatggacagatcctgctgttcggcctgaccggagggcttatcccctgtccggctgcgatcaccgttttactgatttgtatccagcttaaagcgtttacgctgggtgccacgatggtgctgagctttagtcttggcctggcattaacgctggtgacggtaggcgttggcgcggcgataagcgttcaacaggcagcaaagcgctggagtggtttttcgacgcttgcccggcgggcgccctatttttcgagcattctgattggtctggtcggcgtgtatatgggaattcatggctataccgggatcatgcagtaa

SEQ ID NO: 377105 - DNA, 1047 bp, Salmonella enterica
atgccgattttgcagtggtttttgttgttcctgttatcgctgctcatttcccttatttttctctatctgcaccttccggcggcgatgctgcttggtccaatgattgcgggtatcgtgttgagtttgcgaggtagcacgctacaacttcctcgcggtatttttctcgccgcgcaggcgattctcggctgtatgatcgcccaaaatctaaccggttcgatattgaccaccctcgccctctactggccggtcgtgctttttgtgttgctggtgacgctgctttccagcgcggtagtcggctggctgctggtacgttacagctcgctgcccggcaacaccggcgcatgggggtcttcgccgggcggcgcggcggcaatggtagcgatggcgcaagattacggggcggatatccgcctggtggcgtttatgcagtatctacgggtactgtttgtggctggcgcggcggtgctggtgacacgcctgatactcggcgacagcgcggcaacggtcagccaacaggtggtctggtttccgccgcttagcggtaatttattgacgacgctgctattagcgatcgtggcgggcattgccggtcgcctgatgcgtatcccttccggcacgatgctgctccccatgttggcaggcgcgcttctccattcgcaaggcatcattgaaattgaattacccgaatggctgctggccgtggcgtatatggcgataggctggcgtattgggctgggttttgacagacaggtgttttttatggcgctgcggccattgccgcaaatcttattgtcaattttcgcgctgatggcgatttgcgccgcgatggcgtggggaatggcttactacatgcagattgattttatgacggcttatctcgccaccagtcccgggggtctggatacggttgccgcgatcgcggcaggaagcagtgccgatatggcgctcatcatggcaatgcaaaccctacggctgttcagcattctgttaactgggccagcagtggcccgttttatatcaacctatgcgcccaaacaacctttgtag

SEQ ID NO: 377106 - DNA, 834 bp, Salmonella enterica
atggaaaagagtcttttagttattgtccgacataaacctgggcgtactcgtctattaatgcgggccttgcaatccattaatgaccagacgttcaaaaaaataaatattatcattttctgcatggaggaagaattgaaatgtcacaatgtggatgatttttatctgaaagaactgtcaaatatatatagtgttatctacgacgaaaactgtatctttaatgctattaagatgtctgaatctaattatttatgctttatggatgatgacgattcctgggcccctgaatatgtgtcaaggctactcagtgttttggcgaatatacagtcaacgtattcatctgtaaatgcaatagcatgccatacaaataaagttgctgagattgcggaaaataatagaataattataaattcaacgcaaccatggaaccactatttaaatgctggccctgttagttttgatgttatttattacaggaattctattccactatcctcgtgtttattcgataaaaattctgttatcgatgtgattgaaagtcataaattatcctctcctgcatttttctggcctttttttattcattatctggcagaaaatgatgtttggatcttacctgaagcactggcattttatcatttcagagaaaatgatgactttgaatttggcaattataccgtaattaacaatgagttatttgatatagagtgcaaaattgcagaaaataaaatgatgagaagtattgatgactcatcattgctcaatgtgttactttcaaatattgctaacaatagtctttttcataaaatttcttatattgaaaataagattaaataa

SEQ ID NO: 377107 - DNA, 303 bp, Salmonella enterica
atgaacatctttctgacttctctggtcagtattctgcgtaaggcacttccacgtatacgtcacggcaaaagtgaatggatcgccaatcacaccggttatctgcgttttcaggcagaggtctggctggatgataacgaccattttcacgcagtcgtcaacaaacgttccggctggatgaatccacgctatgaacaggtggtggattgtggcaagtttgattcatttcactgtgccatgaataccgcgtactcccaggcacttgaacttgcacatcttcgctatgcctgggaactgaccgattag

SEQ ID NO: 377108 - DNA, 381 bp, Salmonella enterica
atgaacgtttatcaactgaaaaaccgcactgacgttttgatctggctttcgctgattgagggcgatttgctgagtatccaggcttctctgaacgccggtttatatccgctttatgatgacaggcaggaggaaccggagtttgaatgtgcggtatttaactgtggtatggctttcggagaatttatggaaaggcttgaatcagaagatattgacgttctgacaacagccggacatgaactgactggctcgattgaacatatggggagaatgttgtgtgaacccgtttggacacaggctgttcttctggggcgcaatgaagcccgggcagaccgggctatatgcgctgcagaagcggatggctggctgtatgatcctgcttag

SEQ ID NO: 377109 - DNA, 210 bp, Salmonella enterica
atgtctcacattcaccttccgtcggtttgtgaaaaaaccggcaacacactgactccggagcaggaaaaccgcgtgcgccatctggtgcatgaggagtgttattcccgcgaccgcgcagcactgataaagcttattggcctgatgctcctgctgaagctggcgggaaccctcatgctggcaatgttgttactggtgctgcgtctgttctga

SEQ ID NO: 377110 - DNA, 453 bp, Salmonella enterica
atgatgttaaccacccgcttgtttgtatttttgttgcaccatctctggcgcgtcatgcgctggaccgggctgacggtgtatcacggtatttcggtgttatatcgtcgaagacaggccagactgcaggcctccgactggcgcccccgaacggtgtataccggtcgctggcagctggccgatgatggtcagttctgcggtcgggccgttgttctccggctcagggatgcgctgaaacccggcgtggagctgctttacttcggtgaagaggctgcggagccgtattacagcgagagacaatttgtagacgacagggaatccgtgatggtggctgagcagatgttgctgcggtttcttggcagccggcaccggcggcagaaccggcgaaatgctccagtgtcagtgctggttactgacgtagtgacaacagccccggttaatgatgaggccgcatga

SEQ ID NO: 377111 - DNA, 294 bp, Salmonella enterica
atggatataatggcgctgctgagcagcacgccgccggccgtcgctatcgaggagccggtctgggaacaactggtaaaatacccccaggctccggactgtgaaaacgaacggctgcagcggttgatataccacggttttcaggcactcagtcaggcaccttcggggcagggaatagtggagtttggctatttctgtctcccgcctgatggtgacctccatgccccattgtggcagaacgtatgtattaaacgtgaatattcagacggtcaggtgacactcactttcgatcgttaa

SEQ ID NO: 377112 - DNA, 459 bp, Salmonella enterica
atgagcgtaatgaccactaacgaaacccctgcatccacagtagcagaaccggaagtttttcgaagaacccgtaaccgtttcaaccagtggttacaggcggaatttgaccgacattatcacacgatgagggatggcggttatcgcagctttctgaagaagaaccatccgacggagctgctgcgctatgacgaggcatgcgaggccttaaggcgggaagaatttgcccgctttgccgagctgcagacgctggggctgtacctgcatctgcaggtacagcaaaaagaggcgcagttccggcggcggcgtaaccgtctgctgttggggatgaccttaacgggcgtggtgacatcagtgttgttatacggtcactttcatcctgagcagtttttgctgatcggacaggagctggcgacgttgcctggccgtatcctcggatttgttggtcggctggtaccgtaa

SEQ ID NO: 377113 - DNA, 1950 bp, Salmonella enterica
atgaacacatcgttacatccggatgatatcagccggtttatctccggccgacttatcagtagcctggctgcaggccaggtaccgtggcggggcacaattcccgggttaccggaacacgcgcttacgggcgtgccgtttaccggtattaacgtactgttattgtggcaggccatgcagcagcgttcgcttcgttcaggaaggtggctgaccggagatgacctccgccaactgggcggtcaggtcagatccggtgaaaagccagtcaccctggtccgctaccggccttcgttatcgcttttcaaggtaattaaccctgaacagtgtgatggtctgccggatacgctgcaaccggggtggccactgcctccacgacctcagccgtcactgaatgtgatccgcgacctgcttcagaacagtggggttcccgtgatccacagggacaacgttttgccggtataccgggcattgcatgaccggattgagcttccacccgtggcatcgtatgtcggagaggagacatactggcaggacatactgaatctgctggttcaggctaccggacatccgcagcgcttacatcgcttcggattaacagtggatacacgtaccgatgaggttcatgaggccctggttgcagaactgggcgccgcatttctctcggctgctctgggattaccgggagcgatgctatccaggctggatgtggcaccctgggtgacatatttacagggggacccgtggcgtctctttcgggctgcggaagcagcgcgaaaggcgatgatgtggctgaaagagcgaagaccctcgatgacgacagtggagatgtggcagaagatggcctcattgattcttgaaacgcattacggtttttctctcgatgacaccacgctgggatgtcgcagtgtggttgagcggcatattgaatgtgggatcactccactgatggcgattaatgcactggcccgcatttaccagtgggaacgctacgaccagcctcagcggtcgctgtttatcaacgaagcaggaccagacagtgaaatactgactttgtctgaaattcgtcccgaactgctgacctgttaccgcgtgcctgtgccatccggtataccggacaggaaagcggaagcggtgcaggtcgaaagtttacctttgctcctggcaccggcggtgtcggaaggtaagagtgcggcgaatgatgacgggcctgatgacccggatggtaatgacaatgttgtggcgctgccctgggctgcccgcaggggaaaggagaacccgcatatacatcgttttgtcagtatctttaacggtattgcacctcatgaaagccgctggcaggtattcagtgatttcgtccatatggcggcctgttcactgtacaacgctgtacatcgggatcctgattttgaagcggactacatgaggcgggtatcccactattcagctgaagatgcaaacaacatggcccgtttactgtcagaagttgttatggggctggaattcagtccaacagatttcctggggcgaatttatatgatatccggactgggaaattttcataacgcacagtatttcacgccttacagcgtttcgtacgcgatggcgcgaatgacactcagtgaccgtatacctgaactttccagcggggaacgagactttattactgtcagcgatcctgccagtggtgccggaagtatggtcgttgcgctggcagaagccatgctggaggcgggatttaatccgcagaaacagatggtagcgtactgtgtcgatattgacccggtggcctcgatgatgtgttacatccagctatccctgatgggtattccggccattgtggctaccggcaacagcctgaccgtggagattaaacgggagatggcaacaccaatgtttgtactgggtcgttggcatcaccggtggcaggcagatcggacgcgtaaagcggcctag

SEQ ID NO: 377114 - DNA, 909 bp, Salmonella enterica
atgctggccagtttctatattcaacggcagctcagtaaagcactgggcctcagtgtgaacgctgaggaggttttttaccaggtggacgatcgggagtcggattacgtcaataccgatatggtactgaaccgtgaccggttattgtccgtgatgcagtttatgctggatgacgtggcgcttaatccggagctccgggaaagatgccgtcaggcagagcgtattctgacactatggattcgtggtctcgacgcgctggcaacagtgtctgaggatatgtcgatactgccccggacgattacggagtgcagtggacgagttgatcgtctgctgccgggggacccacaggcactgctggcgctgccggatgatgcattcttacgcctgaccgcccagtgtcacctgatgtccggagagcagttcccccgggaacagcttgcagcgacgatgccttactggacgcgttttatggcgtggatagcccgtgaactttatcaggtggaagatcgttgtctggtgcaactcgggcgtctttatcgccggctgcacgtggagcccaggaaaatacggtgctttaacctggctttcggacgtattgagctgcatatgtccggacgggatattgatgaatgtcagtatctctacgcgtatgacgacgcatcgctggaagattatctggaggaaattatggccggtaatctgacgccggttcgctttgaagtgcgggtaatataccgcaacgattcggagctgaacgtcttcaggcgagacgccgacgtgattgatgtggaacatccccatgtcagcgactggcagaatgttgtcagcgaggccctggactggctacgccaggaacggacgtcgctggttgagatacctttaacccggccggcactgaaactggccgcctga

SEQ ID NO: 377115 - DNA, 900 bp, Salmonella enterica
gtgagcattattgacgaatatatcagccagcatttctcagagcggctgtgtctggacgtaaccgaagaggatattacctggcagcttcgcggcagccgttccgactacgtgaatacccggatacagtttgaccgggaaaaactgatggcggtgatggatgtcatgctgtccggtctggacagtgatgaaaccacgctggcgcgctgccggcaggtactgacgctgtggatagccggactggatatgctgtcgaaggaggcagaacaacctgactggcttccccgggttcaccctcacagcagtggtcagtgcgacctgctgctgaagggaaaccctgcggcgctgacggaggcggacgaagaaacgtacctgcgggtgaccggccagcaggatttaccggcacaccggcgtattccacaggtgatattcagcaaaacggtacgatactggcaccgttttgagagctggctggcgcagcagttgcaggacattactcagcattgctatcagaaactgaaatgctttgtggcgaactgcacgacagagcccaggcagctgcgcgaattccgcggggagtacggttcactgcgtttatttgtggggccgcaggatatcgatgagatagacattctggagttcaatccggaatacatcgtgtcctgggtcgacaaagtcgcggacgggctttttactccagtctgctttgtggtgaatgtttactataaaaacggcattttgctggagtcgttcacctgggacagtgaggtggataacatcaacaggatgaccagcagcgattatggtgaggcgatgagccaggccatcagctgggtacgtgagcagtttgagcagccggtgattgatcaaccggtaccacagcagccacgactggctgcataa

SEQ ID NO: 377116 - DNA, 327 bp, Salmonella enterica
atgctgaaattcagtgcaaaagacttaaaaccggtactgcttgaggcacgtaaaaaccactgtggcgtggtactggtcaaggatcatggcgtttatattatgtctgaaaccggtgagctcactccgcgtggccgaaaagtggcttatgcgaagggatgccatccagaaaaggatgaggcctggtgggataccgcccgggcagaagtagggggtgatgattttggtgagacgataaatctgacgaaaagcatgattaaccgcattctgaacgagaggaaaccgctgtatatcacggccagcaacgaagaatttaagatcgagtgttaa

SEQ ID NO: 377117 - DNA, 270 bp, Salmonella enterica
atgagaataaacgtactattactaaccagtctgttagtagctggaccggcactggcaggagaagctcacgtttgtaaatcacagacggtagcgaactctgcagcgaatgccgagttgacggataacacggtatttaaatgcggcgaaagcatttccggaactatcccgtcacttgcccgggagggatggaaaattgtgcaacagacagatcaggcagatgtcaccgatccatcaaaaacatacgcacaattgatcatccagaaggattaa

SEQ ID NO: 377118 - DNA, 378 bp, Salmonella enterica
atgaataaacctctaatagccttattgctcatcaccagcttcagcgcatctgctgacaaaatcccatcttctatccaaaacctgattgctgtttacgataccaggacgcacagcctagaagatggtgggctgactatcagatataacaaacgacttttgctggtagatgcagctgaatcgatgttccaaggcatctgtaatgattattatatgaacaagtggaaacctggcacgatcaagagaattacacttcttaatgtcactagcgatcagggctttgaaatcaatgctggaggggatgagtgtagaaaagctggcacaatgaaagacgagcaggcgcgcacctatagaaccagctttattaaacctcttcaataa

SEQ ID NO: 377119 - DNA, 240 bp, Salmonella enterica
atggcggcggagaaactcaaaatgatgaattgtccaaagtgtggacactcagcgcacactaggagcagctttcaggttacggacagcacaaaagagcgttactgccagtgccagaacattaactgtggtagcacctttgtcacccatgaaacggtagtgcgctttatagttacgccagcattggtaaataacgctcctccacatccaacagtgagtgggcaagggcacatgaatttttaa

SEQ ID NO: 377120 - DNA, 2781 bp, Salmonella enterica
atgagtgataataacctgcgactgcaggtagttctgggggcggtggataagttaacccgcccatttaaaaatgcacaggctggctctaaggagctggcatcagctattagacaaacccgcgatcagattaaaaagctgagtgatgctggaggtcagcttaaatctttcgatcagctaactcaaagtgttagccgtactggtgccgaactggatcaggcgaggctacgcgctcaaatgatgacgcgcgaaatgtcttctttggaatccccgacaaaaaaacaaacgcaggcgcttgaagctcagtggcgtgctgtttcacgtcttgaacaaaaacagcaacaggaaactcgccagatggcggcagccagagctgagctttatcggctggggttatctgctgggggcggagcgcgtgagacggcacggattgcacgagaaactgagcggtataaccgacagttggctgagcaggagcgcaggctgcgtgaagttggcgagcgtcagcgaaagctcaacgccatcaaagccaaggctgaaaagacccgcgagttaaggaactctctggcaggtaatggtgcaggggcgatggcggctggggtaactactggcatgacgttgctggctccagtaaaagcctattcagaatcagaaaatgcagcgaatcaactcgccggttccatgatggggccgggcggaaaggtagcgcctgaatttgaaaaaattaaccggcttgcagttgctttgggtgataagctgccgggaacaacagccgactttcagaacatgatgactatgctacgccgtcagggtatgtcggcgcaggtcatcctgggaggcttgggagagtcagcagcttatcttggcgtgcagttacagatggctcccactgcagcagctgagtttgcggctaagttacaagatgctactcagacctccgaaaaagacatgatgaatctgatggacgtgatccagaaaggattctacgcgggggtagattcaggaaatatgctgcagggtttctcaaaaatcagcagcgcgatgaatatcatcaataagaaggggttggaagcggtcaaaactttcgcgcctttgttggttatggctgatcaggggagtatggctggtgagtctgccggtaatgcataccgaaagatttttcaggccgctctggatgctgacaatattaaggcggttaacgatgacctgaaagaaaagggcgcgggtattaaattcaacttctctgacgggaagggtgggtttggtggtctggaaaatatgtatgcccagctggagaaacttaaaaaattaaatccagaaacccaaatggcaaccatgaaagatttgtttggcaatgatgcggaaacgctacaagcgctgaacattatgctatctaaagggattgaaggatatagagaaactgcagcaaagcttgaaaatcaggcatcgcttagggagcgtgttgatgcatcgctgaacaccctggggaataaatgggaggctgctaccgggacattcactaatgcgatggcgagtattggtgaaaccgtagcacctgcattaaagaacctcgccgattggctgggggagttagcctctcgtttggacggttttgttaaacgccatccctcgcttacgtctgccttattcaagatggctgcaggatttgccgttgctgcaacggctgtaggggctatctctttggcgctggcatcaatccttggtccgatggcaatcatcagagtgagcgcgggcatgttgggcctgaagtttgcgtcggtgggtggcttggttcgtgctgcgctgggagggctcgggaaatcagttttatggctgggccgattgatgtttgcaaaccctatactggctgtcatagggctgatcgccgctggtgctatttatatctggcagaactgggacacgcttgggccaaagttcaaggccatgtgggatgccgtatgtaatgccacaggtacggcatgggattggattaaagaaaaggccagcgccgcgtgggaggggattaagtcactgttctttaattataccttgccgggattaatagctaaaaattgggatgcaataaaatctggcgtttctgaggcgtgggccaatatcagacaatctatcagtgataaatggaatgcgatcctggctgatgtttccgcgcttcctgcgaagtttcaggacacgggcagcgccattattgacagcattctcgatggaattaatgccaaatgggagacactcaaaagcaagctttcctcagtcaccgattatctgcctgactggatgactgaaaataataaaacacaagacaaagcacaggtgcaggtggttggtggcgcagcggctgctgctgttccgtttgccgggatgtatgacagcggtgggattattccgcgcggtcagttcggtattgttggggagaacggccctgaaattgtgaacggccccgcaaaagtgaccagtaggcggcgcactgccgcgttggcttccatcgttgcaggtgtcatgggcgtagcggcagcgcctgcagaggctgctccactacatccttacagtctgcctactgcggcatataaacaaagccagcctgcgaaatctgccagcgcgccgccagtgatgcactttgaaactcacgcgccgatcactatctatgctcagccagggcagagtgcgcaggatattgcccgtgaagttgcccgacagcttgacgaacgcgagcgcaagaccagggctaaagcacgcagtaatttcagtgatcaagggggatatgaataa

SEQ ID NO: 377121 - DNA, 723 bp, Salmonella enterica
gtgacaaaaataactttatctccccagaattttagaatccaaaaacaggaaaccacactactaaaagaaaaatcaaccgagaaaaattctttagcaaaaagtattctcgcagtaaaaaatcacttcatcgaattaaggtcaaaattatcggaacgttttatttcgcataagaacactgagtcttctgcaacacactttcaccgaggaagcgcatctgagggccgggcagtgttgacaaataaagtcgttaaagattttatgcttcaaacgctcaatgatatagatattagaggtagtgcgagtaaagaccccgcatacgccagccagacccgtgaagctatactatcggcagtttacagcaagaataaagatcagtgttgtaatttgctcatcagcaaagggatcaacatagcgccttttcttcaggaaattggcgaagcagcgaaaaatgcaggtctgcccggaacaaccaaaaatgacgtttttacgccaagcggcgcaggggccaatccttttataactccgttgatttcatcagcaaacagtaagtatccacgtatgtttatcaatcaacatcagcaggcatcctttaaaatctatgcggagaagatcattatgacagaagttgcaccactgtttaatgagtgtgctatgccgactccacagcaattccaactgatactagaaaacattgctaataaatatatacaatacactccctga

SEQ ID NO: 377122 - DNA, 408 bp, Salmonella enterica
atgagcgaatattattacagctttaaagaaaaaggttttttctggcaaccggataccgaatccgataattaccctgacgatttaattcccctgacagatgagtattatcgcgagctgatgcagggccaggtggacggaaaatatatcgagcacaggaaaggaggcccggtactggttgagcatcgcgaatatacgcctgaagagctggttgcacaggctgaagccagaaaagcggaacttcttgctgaggcagagtcagttattgcgccactggcgcgggcggtaaaactgaaaattgccacagatgaagagattaaacggctggaagcatgggaactttatagcgtaatggtaaaccgggtggatacagctaacccagactggccggagaaaccagctcagatataa

SEQ ID NO: 377123 - DNA, 1437 bp, Salmonella enterica
atgctttatatcgacccgcagaacagtagccagattattgctgagcaggtaatcccggaaactgagggcgggtggtggattcgtgaagttggcctgtttgatgaaaccggtgcgctgatcgctgtgggtaactgccctgagagctacaagccgcagctgacagaagggagcggacgtacgcagaccgtgcgcatggtactgattaccagcagcaccgataacatcaccctgaaaattgaccctgcagtagtgctggcaacccgtaaatatgtagatgataaggcgctggagctgaaggtatatgtagacgacctgatggcaaagcatcttgctgcgccggacccgcattcacagtatgcgcagaaggacagcccgacactcacagggattccaaaggtaccgacgccagcggcgggtaacagcactaaacagattgcgaacacggaatttgtggcatcgtctattgcggcaatggtggattctgcgcctgcagcactggatacgctgaacgagctggcagcggctctggggaatgacccgaattttgccacaacgatgttaaacgctcttggtggaaagcagccgctggacaatacgctgacgaatttaagcggaaaagatgtcgccggccttctcgcatacttcggtttaggagaaacgataaatcgtgccgccgatgcgctacaaaaatcacagaacggtgcagacattcctgacaagccgcggtttgtacaaaatatcggtttaaaagaaaccctgaacccgacaaaacgcgtgagtataggcaatatcggaaccggcgtttttgacggcagcacaccgtgtataaatatcggtgacagtgacagtggatttatcggcagcgcggatggcgtactggatatttactgtaacggtgccaaagtgggttatatcaatggtaacggattacacatgctcactgatattcatttcgataatgcgagcatgaccactaatggtgacatttttagttcagtgtggggggataactggctgagtatctggattactaatcagctaaatacccgtggaacgattgactggatcaatagtgaactggcaattcgtgacaacaacatcaacacccgcgccaccattgattatgttaaccagactttcgcccgtaaaaataccggcagcattcaggactggggctggattctggacgacagcaccggatttataatgcagtggggaacacttggtaactcaaacggaacctacaatttcccgcgcgctttccctgttggttgctttgccgtttttgtaaccaataccaacgctcagggcacccaggtggataacgcattcggatacccggtgagcaacagtcagttttttgccgccaccaagtcatcaggaatggccaatctggtcaataattttcctgtagcctggtttgcgattgggagataa

SEQ ID NO: 377124 - DNA, 243 bp, Salmonella enterica
atgagttttaaacccacacctgaagaggtgaaacaagctcgtatcaaagctggctttacgcagcaggaagccgctaaacggtttggtttttcgttatcagcctggcaggccaaagaaacatccggcaaaacatctcgcggtctagccgctggtacgtatgaattacttttgctcctggctgatgaacatcccgattaccagctagtaaagcgagaaaaaaatcagaataaagagactaaataa

SEQ ID NO: 377125 - DNA, 270 bp, Salmonella enterica
atgaatgaagtcctgagcgacaggaaaaataaaggtaatgtaacatacaggattgttgtgtctgaagatgcaacacgtttgtttattgaacttgaaaaactaatgaaagttcgctctaaagaagcggataaaaaaacaactaaaaaggttgttttccataaatcattttattatgaagaattctgtaacgttaaagatgaaattgatgatccaattttattgcaattctatacagatactattgtgaaggtactaaatcatgagttttaa

SEQ ID NO: 377126 - DNA, 549 bp, Salmonella enterica
atgcaaaacgataagttttttgaacggtatcaacccgtttttgaaatcgtatgtcgaatcctggggaacggctggcgtgtaaacctgctcgatgattgccagtacaggataaaactaacctcgcctcagtataaaaattactctatacatattcgaatggagaagggaaggttagttatcattggaagcgtagatagtcgaagttggcgaagtccttaccatacttgcactgtatcgccagaacgtaaccctgtagaaattgccgccgatattgaaaagaaaatcctgacagatgctttcgaaaatgtagagaaggcaatggaatatgaaaggcagttacaaaaaaaacgggagcaaacgcaaattctgaaaggaatgctatctcgtttaatacgtcttgatagctggcatgggacattgaccggttttaaagttgagaatgggttagatggtaacgtgtcagaacggggcggcggttttgaaatggtaatacgtggcctgagtgtggatcagctcataaaggtagcggggtttattaaacagctatga

SEQ ID NO: 377127 - DNA, 636 bp, Salmonella enterica
gtgaatactggaataacaattgatttgaccaacctttcagaagatgaattgcttgatttatattcaatgtataaaagtgcaaacatagcacatcaactatggtgcagacgccatgaaaatataccagagcatttttcgataatattcgtgacgcttttagaacgaataaaaagggttacagaaaagaactcagaaggggtaaaaacaccagatgtagacctggatgcattaattgacaccatttatattggttgtcgttcaatgttctgtgaaaaccctgacttaaaaaataactacactctgcaaaactgcctgaggaaagccaattatcacaacgaagctagagtgatagataatattttacaggaaaaaaaattcacagattccatcatgaaagatgagtcattttttagtctggtgaaattagtttccaataagtccattgcacaccaggagagcctttcaggaaaaaaacgggaaaagatagactatcgatataaattcttaaatgacaattcaaatatctgtgagtttcagtattacatttttagatgtcaccgtatttatgagaatattgtgaaagaatatggggatacattactgaatgagcttaaaataaaaaacaatgatatataa

SEQ ID NO: 377128 - DNA, 621 bp, Salmonella enterica
atgaatgataactctacgtcagtaaccagcaaagaagatgtgcaggatatttctttaaaaaactggctaaagaataaaaaaaccattgtattacttatatttactgcattaacaaatgttggcaatgtcctttcgacgattgatattatcacagataaaaccagttctttttacacatggcttggggaatcgaaaaaattcgaaggccattggaccaacaatacagaaggattcatagacggcactcctgattttttactcaagaatgcaggcgatgtcctcataaaatttgacctgaacatcaaaggtggcgaagtgaggggagagcttcacaccgacgcacgactaaaaatgtgtgaaactatagaagaaaagttaaaaactttgtgtacattaatagcctcacatccactaatgattgagggggaaaaatcaccattttccaatgaattcgatgcctatattactgagtatagaaatggagataaaaaaatagtcgcaatattaaatatgaaaattacagacgatgacaaaatgacaataacaaatacaatgagaacaccagaatcagcattatttccaactaaaatatatgctataaaaataataaccgaagaataa

SEQ ID NO: 377129 - DNA, 183 bp, Salmonella enterica
atgatggatgtgcgcatagagtctaaaattggaaacgaagggagacagccagaaaaaatttatggatatgccgttcaggacaacgcagggatatatgtagaaaataatagctatccaattgaatgggatagtaaaaaagagagatttgtagtctacattcccccgagaataagggtaaattga

SEQ ID NO: 377130 - DNA, 867 bp, Salmonella enterica
atgaaaagaattgtccctgataagaaatggctgaaagaagaaagcagcaaaaggcatgcatcatcagaatgcccatatgccaattcatataaatgcccacggtattatgatagcgttattttattctcacggctgcatattatagatggcatgccatccaataaaaagaacgagttggagcagttttggaaaagtactagtttttcatctttatgtaatgaagaaatacctaatatttcaaaaaatgataaaggtggtatttattcgatagataatttctgcccagaaatatcgtttaaatatttaggctactatgcagactatatgtcgaaatatgtcgatgaatacgatcaaagcatagggcaaaacatagctaaaagagacgatatagaaaatgattggaaatatgattggatgacggtaaatccagtattttatgaagactgcactctctttgagagagttaaaactttcgataaagaaagtcatgacaattattataaaagattacaccctaatattgtcatacaaataaatagaatggataattgtttagatttaaatgatccaacgggtgctctacatgcggcatctaatattttggaaactatggcaaaagaaatagtaaatagcccgagcatattaaataaatcattaggttctttctttgcaaaatttgaaaaagaatcaaaattaccgccagatcttattaaagcagttaaagacatttatgatttgcgtaataaattatctaccgcgggacatggtggtttggataaacctgaattgactttagttgatgctataatgattgctgctatagtaaaggccattgttgaaattgagtacagaaatttgaatatttaa

SEQ ID NO: 377131 - DNA, 2247 bp, Salmonella enterica
atgctcactcgcctgcgcgaaatagtcgaaaaagtggccagtgcgccgcgtctgaacgaggcgctgaatattctggtcacggatatctgtcttgcgatggatacagaggtttgctcggtttacctggccgatcatgaccgacgctgttattacctgatggcgacgcgggggttgaaaaaaccgcgtggtcgaaccgttgcgcttgcgtttgatgaggggatcgtcggtctggtgggcaggctggcggaacccattaaccttgccgatgcgcaaaaacatcccagctttaaatacattccttcggtaaaagaggagcgttttcgcgcgtttctcggtgtgccgatcattcagcgtcgccaacttctcggcgtgctggtcgtgcagcagcgcgaattgcgccagtacgatgaaagcgaagagtctttcctcgtcacgctcgctacgcagatggcggctatcctgtcacagtcgcaggtcacagcgctattcgggcaataccggcagacgcgaattcgcgcgcttcctgcggcgccgggcgtggctatcgcaacgggctggcaagacgcgaccatgccgctgatggaacaggtttacgaagcgtctacgctggatacctctcttgaacgcgaacgattgaccggcgcgctggaagaggcggcgaacgaattccgacgatacagcaaacgctttgccgccggcgcacaaaaagagacggcagccattttcgatctgtactcacacctgctttcagacgccagactgcgtcgcgaactcttcgccgaggtcgacaaaggcgctgttgcggagtgggccgttaaaaaaatcatcgaaaaatttgccgagcaatttgcggcgctaaccgataactacctcaaagaacgtgcgggagacttacgcacgctggggcagcggctgttattccatcttgatgattcagttcaggggccaaacgcctggccggaacgttttattctggtcgcggatgagctgtcggcgaccaccctggcggagctgccgcaggacaggctggcgggcgttgtggtgcgcgacggcgcggcaaactcgcatgcggcgattatggtgcgcgcgctcggtatccccaccgtcatgggcgcggatatccagccttcggtgctacatcgccgtacgttggtggtggatggctatcgcggtgaattactggtcgatcctgaacccgtgcttattcaggaatatcagcggctcattagtgaagagatagaactcagtcgtctggcggaggacgacgtcaatcttcccgcccaactgaaaagcggcgagcgtatcaaagtgatgctgaatgccgggctcagccccgagcatgaggaaaagttaggcagtcggatcgacggtatcggcctgtaccgtactgaaattcccttcatgctgcaaagcgggtttccctcggaagaagagcaggtggcgcagtatcaagggatgctgcaaatgtttaacgataaaccggtgacgctgcggaccctggatgtgggagcggataagcaactgccctatatgccgatcagcgaggagaacccgtgtctgggctggcgcgggatccgcattacgctggatcagccggagatctttttgatccaggtccgcgcgatgctgcgtgccaatgcggcgactggcaacctcagcattttgttgccgatggtcaccagtattgatgaagtcgatgaagcgcggcgtctgatcgaacgcgccgggcgcgaggtcgaggagatgatcggctatgcgatcccgaaaccgcgtatcggcattatgctggaagtaccatcaatggtatttatgctgccgcatctggctaaccggatcgactttatctcggtcggcaccaacgatttaacgcaatatatcctggcggtagatcgcaacaatacccgcgtggccagtatttatgacagtttgcatccggctatgctgcgcgcactgtccatgatcgcgcaggaagccgaaaaacatggtctcgatcttcgcttgtgcggcgagatggcgggcgatccgatgtgcgtggcgattcttatcggtctgggatatcgccatctttcgatgaatggccgttcggtagcgcgtgtgaaatatctgctgcggcatatcgattttgaagacgcgcaaacccttgccagacgcagccttgaggcgcagatggcgaccgaagtgcgtcatcaggtggcggcgtttatggagcgccgcgggatggggggattgattcgcggagggttgtaa

SEQ ID NO: 377132 - DNA, 696 bp, Salmonella enterica
atgctgaagcgtttctttattacaggtacagacacttctgttgggaagacggtggtttcccgcgcattactacaagcgttatcgtcgggtggtaagagcgttgcagggtataaacctgtcgctaaagggagcaaagagactccagaagggatgcgcaacaaagacgctctggtattgcaaagcgtctcttcgctggagttgccgtatgaggcgattaatccgatcgcgttaagcgaagaagaaagcagcgtcgcgcatagctgtcctataaattacaccttgctgtccaacggtctggcgagtctgagcgataaagtggaccacgtggttgtggagggcactggtggctggcgtagtttgatgaatgatttacgtccattgtccgaatgggtggtacaggaacagttaccggtattgatggtggtggggattcaggaggggtgcattaatcatgcgctactgactgcgcaagctgtcgctaatgatggactgcccttaattggctgggtggcgaatcgtatcaatcctggcctggcgcattatgctgaaattattgatgtgcttgggaaaaaactgccagcgccgctgattggcgagttaccgtacctgccgcgcgccgagcagcgtgagctggggcagtatattcgtttgtcaatgctcggcagcgtgctggcggtagatagaatcatggcgtaa

SEQ ID NO: 377133 - DNA, 711 bp, Salmonella enterica
atgcacatcctcaccctaaaacgcgtacttgggttcactatcgtcattctgctgttactggcgctgtttatctggggaatcggtctggagacgctgaaagcgcgtcaggtcgatctgctgtatctcggacaacggcatttgatgctggtctttacgtccatgttttttgctttactggtcggtatcccgagcgggattttactcagccgacctgcggcaaaaggatttgctgaatatgtcatgcaaatctttaatgttggtaataccttgccgccactggccgtcctggccttagcgatggtgattatcgggatcggcgatacgcccgccattgtcgcgctatttctggcttctcttctgcctatcgtccgcaatacctatgcaggcctctgttccgttcccgcctcactgattgaagcggcgaacgggattgggatgacaaaatggcagcggcttcgccaggtagagctacctaatgcgtggccagtgatgctgtccggtattcgcatcgcgaccgccatcaatgtcggcaccgcgccgctggcctttctgatcggcgccagcagctacggcgagctgatttttccggggatttatctcaacgattttccgacgttgattctcggcgcaacggccacggcgttattcgcgctgattcttgacactctgcttgcctggtttgggcgacgccttagccctcataccgtctga

SEQ ID NO: 377134 - DNA, 525 bp, Salmonella enterica
atgggattgcaaaaaacactggcgctcagcgccgtagcggcagggatcatgttgagcttatccggtgcgcaggccgcgccgctgcttagcagtagtgagccaatgaccattaacgccagcgatctggcggcgaaagagaaagcgctgacggattttccgttaatggaggcagtgaaatcctctatccagacgttggataacagcgcggtcgaacaaatcgaaccggggcgcgccgctaacccggcaaacgtaaaacgcgttgaaagtattctgaaagaggccgactgggattatctgttcccgatgcgcgcgccggaatacacttactctaacttcctgaaagcgataggtaaattcccggcggtttgtggtacctacaccgatagacgcgatagcgacgctatctgccgtaaaaccctggctactatgtttgcgcattttgcccaggagacgggcggtcacgaaagctggcgtgacattccggaatggcgtcaggcgctggtctatctgcgcgaagtcggctga

SEQ ID NO: 377135 - DNA, 648 bp, Salmonella enterica
atgaatgcacgaaaggcggtactggcagataatccggaattgatcctgcgtgtgctacagctgagatttgacgagtcactgtcgtacccgcgcatttctgcgcagaccggtgtcagcaaaaccgccattttttctctggtgaggcgatttcaccagatattcgctgactggcctctttccggtaaatattcctgcgggcaactggcccgggctcttttcccggggcgatacccttcagccccgaccgtgactcagcctgtgaaagcagagaaaccccgtcggaaccgattttcaccggagtttaaatggagacttgttcagcaaactcttttacccggtgcctgtgtcgcacaaatagctcgtgagaatggaatcaacgataacctgctctttaactggcggcatctctggcgtaacggcggcctgcagccgcccggcgaacatgaaacatcgctacttcccgtgacgttaacgccggagccgaataataaaatcccggaccccgtgcaggttgagcagataaatacaccgaccgacagtctgtgctgcgagctgattctgccggccggaactctcaggctgaaaggtgaactgacaccggcgttattacagtcacttatccgcgaaatgaaagggagcagccactga

SEQ ID NO: 377136 - DNA, 348 bp, Salmonella enterica
atgatatctctccctgccggttcgcgtatctggctggttgccggtatcaccgacatgcgaaatggttttaacggcctggcatcaaaagttcagaacgtcctgaaggatgacccgttctccggacacctgttcatcttccgcagacgccggggtgaccagataaaagtgttgtgggctgacagtgacggactgtgcctcttcaccaaacgcctggagcggggccgcttcgtctggccggtcacccgtgacggcaaggtgcaccttactccggctcagttatccatgcttcttgaaggtatcaactggaagcacccgaaacgaacggaacgcgctggaatccgcatataa

SEQ ID NO: 377137 - DNA, 1092 bp, Salmonella enterica
atggacacctcacttgctcatgagaacgcccgcctgcgggcactgttgcagacgcaacaggacaccatacgccagatggctgaatacaaccgcctgctctcacagcgggtggcggcttatgcttccgaaatcaaccggctgaaggcgctggttgcgaaactgcagcgtatgcagttcggtaaaagctcagaaaaacttcgcgcaaaaaccgaacggcagatacaggaagcacaggagcgaatcagcgcacttcaggaagaaatggcggaaacgctgggtgagcaatatgacccggtactgccatcccccctgcgccagtcttcagcccgtaaaccgttaccggcttcacttccccgtgaaacccgggtcatccggccggaagaggaatgctgtccggcctgtggtggtgaactcagtccactgggatgtgatgtgtcagagcaactggagcttatcagcagtgcctttaaggttatcgaaacacaacgtccgaaacaggcctgttgccggtgcgaccatatcgtgcaggcaccgttgccttcaaaacccattgcacgcagttatgccggagcggggcttctggcccatgttgtcaccgggaaatatgcagaccatctgccgttataccgccagtcagaaatataccgtcgccagggcgtggagctgagccgcgccacgctggggcgctggacaggtgccattgctgaactgctggagccgctgtatgactggatacagactcagatgaaaacactgtcgcgtcactcggatacggcaaaagcgttcgcatacctgctgaaacagtgggatggcctgaacgtgtactgcagtaatggctgggtggaaatcgacaacaacatcgcagagaacgccttacggggagtggccgtaggccggaaaaactggctcttcgcgggttccgacagcggtggcgaacatgcggcggtgttgtactcgctgatcggcacatgccgtctgaacaatgtggagccagaaaagtggctgcgctacgtcattgaacatatccaggactggccggcaaaccgggtacgcgatctgttgccctggaaagttgatctgagctctcagtaa

SEQ ID NO: 377138 - DNA, 1173 bp, Salmonella enterica
atggctcaggattaccaccacggggtgcgcgttgttgaagtcaacgaaggcacccgatccattaccacggtgagcaccgccatcgtgggtatggtctgcacgggcgatgatgccgatgcaaaaatgtttcctcttaataaacccgtgctgatcactgatgtgctgactgccagcggtaaagcgggtgagtcaggcacgctggcccgttcgctggatgccatcgctgaccaggcaaaacccgtgaccgttgttgtgcgtgtgccgcagggtgaaacggaagaagaaaccacgaccaatatcatcggcgcagtgaccgctgaaggtaaaaaaacaggcatgaaagccctgttatctgcccagtcacagcttggcgttaaaccgcgcattctcggcgtgccaggccacgacaccaaggcggtagctactgagttgctgagcgtggcgcaaagcctgcgtggatttgcttacctgtcagcgtatggctgcaagacggtacaggaggcgatcacttaccgtgaaaacttcagccagcgcgaagggatgctgatctggcctgactttactggctgggacactgtgctgaatgccgaagcaacggcatatgccaccgcccgtgcgcttggtctgcgcgccaaaattgacgagcagaccggatggcacaaaagcctgtccaacgtgggcgtgaacggtgtcaccggaatttctgctgatgtgttctgggatctgcaggacccggcaaccgatgcgggactgctgaaccagaacgacgtcaccacgcttgtgcgtaaagacggtttccgcttctggggttcccgctgcctgagtgatgacccgctctttgccttcgaaaactacacccgcacggcgcaggtgctgacggacacgatggcagaagcgcacatgtgggcggtggataaaccgctgaatccgtcgctggcccgcgacattatcgagggtatccgcgccaaaatgcgcagcctggtcagtcagggctatctcattggtggtgattgctggctggatgagtcggtgaacgacaaagacacgctgaaagccggaaaactcaccatcgactacgactacacgccagtgccgccacttgaaaacctgatgctgcgtcagcgcatcaccgatcagtacctggtgaatttctccagccaggtcagcgcgtaa

SEQ ID NO: 377139 - DNA, 516 bp, Salmonella enterica
atggctttaccacgcaaattaaaacacctgaacctgtttaatgacgggaacaactggcaggggatcgttgagtcgctgacgctgccgaaatttacccgcaaatatgagaagtatcgcggcggcggaatgccgggtgcagtggatgtggatctggggctggatgacggcgcactggatacggaattttccattggtggtactgagctgctgctgtttaagcagatgggcaaagccacggtggatggcatccagctgcgctttaccggctctattcagcgtgatgataccggggaagtgcaggccgtggagcttgtggtgcgtggacgtcacaaagaagtggattccggcgagtggaagacgggcgaaagcaacaccaccaaagtgaccagtaccaacagctacgcgaagctgaccatcaatggtgaggtgctctatgaagtggacctgatcaacatggtggaaattgtggacggtgtggacctgatggaagcgcaccgtaacgccctcggcctctga

SEQ ID NO: 377140 - DNA, 303 bp, Salmonella enterica
atgagcgataagaagactgaaaagaccattcaactggatactcccatcaagcgcggaaaaacggaaatcaccgaaattgtgctgcgtaaaccgcagtccggtgcgctgcgcggtacacgcctgcaggccattatggatatggatgtgaacgcgatgatgaccgtgatcccccgcatctccagcccggcactgactgcacaggaaattgcagagatggacccggcagatctcactgccatgtcggttgaggttgtcacttttttgttgaagaagtcggtgcttgccggtttaccgacagcctga

SEQ ID NO: 377141 - DNA, 3078 bp, Salmonella enterica
atgagtgataacaacctgcgtctgcaggtcattcttaatgcggttgacaagctcacccgcccatttcgatctgcgcaggccagttcaagagaactggctgctgctgtcaaaaaatcccgcgatgcaataaagcagcttgatcaggccgggagcagtctggacagcttccgaaagctgcaggcagaaaatcagaaattaggcgacaggctgaactatgcccgccagcgtgcaaatttgctcagtcaggaactgggagcgatggggccgccttcgcaacgtcaggttgttgctctgggccgtcaacggctggctgttcagcgcctggaagaacgccagaaaaagctgcagcagcagacggcgcttgtgcgtgctgaactgtaccgggcgggaatttctgcgaaagatgatgcgggagcaactgcccgtttagcccgtgaaacatcacgttataaccaggaactgtcgaaacaggaggcgcggctgaagcgactgggggaagctcagcgcaggatgaatgtggcgcgtgccagttatgcccgttcgctggaggtgcgcgatcgcatcgcaggagccggagccaccaccacggcggcagggctggcaatggggacgccagtgatggcggcagtaaaaagctataccagcatggaagatgccatgaaaggtgtggcaaagcaggtcaatggtctgcgtgacgataatggcaaccgcactgcacgtttttatgaaatgcaggatgccatcaaggctgccagcgaacagttgccgatggaaaacggtgcggtagacttcgctgcactggttgaaggtggtgcgcgcatgaacgtcgcaaaccctgacgacagctgggaagaccagaaacgtgacctgctggccttcgccagtacggcagcaaaggcggcaacagcctttgagctgccagcggatgaactgtcagaaagtctggggaaaatcgcccagctctacaaaatccctacccgcaatattgaacagctcggtgatgcgctgaactatctggatgataacgccatgtcgaaaggggcagacattattgatgtcatgcaacgtctgggcggtgtggctgaccgtctggattatcgtaaagcggcggcgctgggttccacctttctgacactgggcgctgcgccggaggttgcagccagtgcagcaaacgcgatggtgcgtgaattgtccattgccaccatgcaaagcaagagtttctttgaagggatgaatctgctgaaactcaatcctgaagttattgaaaagcagatgacgaaggatgcgatgggaactatccagcgtgtgctggagaaggtgaacgcactgccgcaggacaagcgtctgtctgccatgaccatgttgtttggtaaagagtttggcgatgacgcggcgaaactggcaaacaacctgccggaactgcagcgccagctaaaactgacagcgggcaatgatgcgctcggctccatgcagaaagaatccgacattaacaaggactcactttctgcgcagtggttgctggtcaaaaccggagcgcagaacaccttcagcagcctgggcgaaacgctgcgccagccgctgatggatattctgtacatggtgaaaagcgtcacgggagcatcgcgtcgttgggtggaagctaacccggaactgacgggcacactgatgaaagtagccgctgtggtggctgccgttaccgtgggcctcggcaccttagcggtggcgctggctgcagtgctggggccgctggcagtcatccgtctggggttctctgtgctgggtatcaaaacgttaccttccgttacggcagcagtaacccgaactagcagcgcgttgtcctggctggctggcgcaccactggcactgctgcgacgcgggcttgcttcatcgggcaacgctgcgggtttacttactgcgccgttgtcgtctttgcgccgcacggcatcactgacggggaatgtcctgaaaactgtagcaggtgcgccggttgcacttttgcggtctggattatccggtttacgtgctgttgctgtgatgtttatgaatccactggcagcactacgcggtgggctggctgccgcaggcgcggtgctgcgtgtgctcgcatccggcccgctggcgatgttgcgcattgccctgtatgccgtatctggtctgttaggtgctctgctcagtccgataggtcttgtggttactgcactggcgggcgtggcgctggttgtctggaaatactggcaacccatcaccgcatttctcggtggcgtggtggaaggattcaaagcggcggcaggtcccatcagtgcagcattcgaaccacttaagcctgtgtttcagtggattggcgacaaagtgcaggcgttgtggggctggtttactgatctgctgacgcccgttaagtcgacctctgccgaactgcagagcgcagcggcaatggggcgacgattcggggaggcactggcggaagggctgaatatggtcatgcatccgctggactccctgaaatccggcgtttcctggttgctggagaaactcggtattgtcagtaaagaggctgcaaaggcgaaactgccggaaagcgtgacgcgtcagcaacctgcgacggtgaatgcagacggtaaagtgatgatgccatcaggtggtttcccatcatggggatatggttttgcggggatgtatgacagcggtgggtatatcccgcgcgggcagtttggcattgtcggtgaaaacgggcctgaaattgtcaacggcccggcaaacgtgaccagccggagaaatacagctgcactggctgccgttgttgccggaatgatgggtgttgctgccgcgccagcagagcttccaccgttgcaccctttggcatttcccgcgaaaggcggtgaagcgatggtgagtcgcgcagccactgtgtcgcccgttcaacggattgaggcaccgacgcagatcatcattcagacgcagccaggacaaagtgtgcaggatattgcgcgggaggtggcccgccagcttgatgaacgtgaacgcaggctgaaggcaaaagccaggagtaactacagcgatcaggggggatacgacgcatga

SEQ ID NO: 377142 - DNA, 486 bp, Salmonella enterica
atgatgatggtgctgggattgtacgtgtttatgctgcgcactgtgccgtatcaggaactgctgtatcaacgcagctggcgacatgcggcaaacagccgggtcaaccgacgtccatccacgcagtttctgggaccggacaacgacatgctgacgctttctggtgttcttatgccggagataacgggcggcagactgtcgttgctggctctggagcagatggcagaacagggaaaagcatggcccctgattgaaggcagcggcacgatttacggcatgtatgtgattgagggactgaatcagactaaaacggagtttttccgcgatggtatgccgcgccggattgagttcaccctgtcgctcaaacgggtggatgaatccctgtccgatatgttcggtgatctcagtgcgcagctgaataatttgcaggatacggtaacgtctgccttaagcgatatcagtaaaacggtgggagggctgctgtcgtga

SEQ ID NO: 377143 - DNA, 1101 bp, Salmonella enterica
gtgaatttcagctctgaactgcttaacaaaggcaacaaaactcccgcattcagcatcagtattgaggggaaggatatcaccactgtgctggataaccgcctgatgagtctgacgctgacggacaatcggggctttgaagcagaccagcttgatttggagctggacgacgccgacggaaaaatcgtgctgccgcgccgtggggctgtcattacgctggcgttgggctggaaggggcagccgcttttcccgaaaggagcattcacggtggacgagattgaacacactggcgcaccggaccgcctgactatccgggcgcgaagtgctgattttcgtgaaaccctgaatacccgccgtgaaaaatcgtggcacaagaccaccgttggggaagtggtgaaggaaatagctgcgcggcacaaactgaagatggcattgggtgaagacctgtcggataaacccgtggagcatatagaccagaccaatgagagtgacggcagttttctgatgcggctggcgcgccagtacggtgctattgcgtcggtgaaaaatggcaatctgttattcatccggcagggacagggtaaaagcgccagcggtaaaccactgccggtgatcactatcacacggaaggacggcgacagtcaccgctttaccctggcagatcgcggagcctacacgggcgtaattgccagctggttgcatacccgcgaacccgcgaagaaagaaagcaccacggtgaagcgtaagcgcaggactaagaagcagaagaaagagccggaagcgaagcagggcgattacctggtggggacggatgaaaacgtgctggtacttaatcgcacttatgccaaccggagcaacgccgaacgagcggcgaaaatgcagtgggaacgcttgcaacgcggcgttgcgtcattctcgctacaactggcggaaggtcgggcagatctctacacggaaatgcctgtgaaggtcagtggctttaaacagccgatagatgatgcggaatggaccattaccaccctgacacatactgtcagcccggataatggttttacgaccagtctggagcttgaagtgaggattgatgatttcgaaatggaatga

SEQ ID NO: 377144 - DNA, 216 bp, Salmonella enterica
atgacgcttgagcgaatcagcgcctttatcacgtattgcatcgccgtcgtgctggcctggctgggcgatttgtccatcaaggatgcctcaacgctgggcggcctgatgattggtgtgctgatgctggctatcaactggtactacaaacacaaagcctaccagcttctgcgcgacgggcagatctcgcgggaggactatgaatccatcaatcgttaa

SEQ ID NO: 377145 - DNA, 513 bp, Salmonella enterica
atgaatccatcaatcgttaaacgctgccttgtcggggccgtgctggctattgctgccacgctgccgggttttcagcagcttcacacctccgtggaggggctgaaactgattgccgattacgaaggttgtcgtctgcagccgtatcagtgcagcgcgggtgtctggaccgacggcattggtaatacgtcaggcgtcattcccggcaaaaccattacggagcgacaggcagcagaagggctgatctccaacgtgctgcgtgtggagcgggcgctggaaaggtgtgtgaagcaacagccgccgcagaaggtgtatgacgctgcggtgtcgtttgccttcaacgtgggaacgggcaatgcctgcagttccacactggtgaaattactcaatcagcggcgctgggcggatgcgtgccgacagttgccgcgctgggtttatgtgaaaggtgtttttaatcaggggctggataaccgccgtgcgcgggagatggcctggtgcttacagggagcaaactga

SEQ ID NO: 377146 - DNA, 378 bp, Salmonella enterica
atgaaaaagaaattaatcagcggactgtttctgatgttatggatggcgctgttaatcgcagcaatggtgtatccgcaggggatttttccggtactggcagcgtccggcgtttgggtagcctgtttgctgacatgggcggtaattccggtagcactggctgcgttaattaagaatggcccgctctggcaggagttaagggcatctttgctgaagacaattacccgaaaagaaaacgtatttaccagttgggtgatgcgattgctgattgttgtaagtctcgcctggacggggtgggctattaccctggtcttttatctactgaccgttattgccttctggatcacccgtaatcagatggcgcaacaggtagcagcatga

SEQ ID NO: 377147 - DNA, 429 bp, Salmonella enterica
atgaaccggttgctgctggttgtgctggcgttattactggcggcgctgggctggcagacgtggcggctggctgatgccagccagaccatcagcacgcaggcagacgagctgcagagcaaaagccaggcactggcaaagagcaacagccagcttatcagcctgtccattctgactgaaaccaataaccgggagcaggcgcggctctatgccgaagcagaacagaccagcgcacagctgagacaacgacaacgccggatcgaggaactgaaacgtgagaacgaggatttacgccactgggctgatactcctttgcctgctgacattatccggctgcgggaacgtccggcactcaccggaggtgcagcttaccgtcagtggttgtccgcgagtgacgccgtgtcggctggagcaggcagcaccgcgcactaa

SEQ ID NO: 377148 - DNA, 432 bp, Salmonella enterica
gtgaacaaaccacaatccctgcgccacgccctcaataaagcggtgccttatgtccgcaataacccggacaaactgcatctgtttgtggataacggttcgctggttgccacgggggccagctccatgtcatgggagtaccgctataccctgaacgtggtgatagaggatttcagcggcgaccagaatctgctgatggccccggttttactgtggcttcgggataaccagcccgatgccatcaataacccggcgttacgggaaaagctattcacctttgatgtggatattttgcgcaacgatgtctgtgatatcagccttaatctgcaactgacggaacgtgtgctggtcagcactgacggcagtgtgtcgagcgttgaagctgtagcagaacccgatgaacctgaagaaatgtggacggtgaaacgtggctga

SEQ ID NO: 377149 - DNA, 447 bp, Salmonella enterica
gtggctgaactgcagaaggtggacgactggctgagtgccttgctggcgaatctggaaccagccacgagaagccgcatgatgcgccagctggcgcaggaactgcgccggacacagcagcagaatatcaggatgcagcgcaatccagatggcagcagttatgaaccgcgcagggtaacagcacgcagcaagaaagggcgcatcaaacgtcagatgtttgcaaagctgcgcaccacaaaatacctgaaaactgccgccagcgccgactctgccagtgtacagtttgaaggcaaggtgcagcgtattgcccgtgttcaccattacggcctgcgtgatcgcgtcagtcgcaaaggaccggaggtccgttacgcagagcgtcgcctgctgggtgtaaatgatgatgttgaggcaatgacccgcgacatgattctgcaatggctggcggggtga

SEQ ID NO: 377150 - DNA, 579 bp, Salmonella enterica
atgaacgcacaattaaccgaaatcatgcgccttatcaccaatctgatccgcactggtgtagtcaccgaagtggaccgggaacactggctttgtcgggtgaaaacgggcgaccttgaaaccaactggattaactggctgacgctgcgcgcgggtaatgcccgcacatggtggaaaccatcggaaggtgagcaggtggtgctactgagtctgggcggcaatctggaaactgcctttgcgctgcccgctgtctattcgaatcagttcgcaccaccgtcgacgtcggcagacgcctgcgtgacagaacatcctgacggtggctggtttgaatacgaacccgccaccgggcgctggtatgtcaggggcatcaaatcaatggtcattgaggccgctgacaacatcaccatgaaaaccagtgagtttgtactggaggctgaccgcacgcgcattaacagcgaagtggtgatcaatggtggcgttacccagggcggcggagcgatgagttctaacgggatcgtggttgatgcgcatcagcatactggcgtcctgaaaggcggcgatacaaccggaggcccggtatga

SEQ ID NO: 377151 - DNA, 360 bp, Salmonella enterica
atgacgctttatagcgggatgaacaataccagcggcaaagtcattactgatattgaccatctgcgccagtcggtgcgggacattctgctgacgccgcagggtagccgcattgctcgtcgtgaatatggttccctgctgtcgtcgctaatagaccagccacaaaatccggcattacgcctgcaggtcatgtcggcagtgtatgtggcgctgagtcgctgggagccacggctgacgctggattccatcaccatcaacagccattttgacggttcaatggtggtggagctgaccgggcggcgtaataacggtgtacctgtttccctttccgtatcaacaggagcagagaatggcagtgattga

SEQ ID NO: 377152 - DNA, 510 bp, Salmonella enterica
atgaatacttcaatcgttaagtgctgccttgtcggggcagtgctggctatcgcagccacgctgcccggatttcagtcgcttcatacctccgttgaggggctgaaactgatcgccgattacgagggatgccgcctgcagccttatcagtgtagcgcgggcgtctggactgacgggatcggcaatacgtccggtgtggtgcctggaaaaaccatcacggaacggcaggcggcgcagggacttatcaccaatgtgctgcgcgtggagcgggcgctggaaaaatgtgtggtgcagccgatgccgcaaaaggtctatgacgcggtggtgtcgtttgctttcaacgtgggcaccggcaacgcctgcagctccacgctggttaagttgctgaaccagcggcgctgggcggatgcctgccatcagctgccgcgctgggtatatgtcaaaggtgtgtttaatcaggggctggacaaccgccgcgcgcgggaaatggcctggtgcttaaaaggagcctaa

SEQ ID NO: 377153 - DNA, 1203 bp, Salmonella enterica
gtgggtgagttagcgcttacaggcgcattacgcggcgttcctggcgcaatatcaagtgcaacggaagccatcagggccggcagaaatattatcgtcgcaacagagaacacggcggaggttgggcttatcagcaaagaaggatgttttatcgccgatcatctacaaaccgtctgcgcctttctggaagggaaacacgccctggaaagacctttagctcaggatatggcatcgtctaccgcaactgccgatcttcgcgatgtgatcggtcaggagcagggtaaacgcggcctggagattacagcggcagggggacataatctgctattgatcggcccgccgggtacgggtaaaaccatgctggccagtcgactgagcgggattcttccaccattaagcaatgaagaggcgttggaaagcgccgcgatcctcagtctggttaatgccgatacggtacaaaaacgatggcagcaacgtccctttcgctcacctcatcatagcacctcacttactgctatggtcggcggcggcgcaatacccgccccgggagagatatcgctggcgcacaacggaattttgttccttgatgaattgcctgaatttgaacgacgcacactggatgcgctacgtgaacctatagaatccggtcaaattcatttatcccgtaccagagcgaaaataacgtaccctgccaggttccagttaatcgccgcaatgaatcccagcccgaccggacattatcagggaaaccataatcgctgcacgccagaacagacactacgttaccttaatcggttgtcaggcccgtttcttgatcgttttgacctttcgcttgagataccgcttcctccgcccgggattcttagccaacacgcctcaaagggtgagagcagcgctacggtaaaaaagcgggtcatcgccgcccataaacggcagtaccgacgccagaagaagttaaacgcgcgtctggagggtcgcgaaatccaaaaatattgtgttttacatcacgatgacgcccgctggcttgaagacacgctggtgcatcttggattatccattcgcgcctggcagcgtttactaaaagttgccagaaccattgccgacatagaactggctgaccagatctcgcgtcagcatttgcaggaggcggtaagctatcgggcgatagacaggttgttaattcatttgcaaaagctgttggcgtaa

SEQ ID NO: 377154 - DNA, 459 bp, Salmonella enterica
atgggggacgaaaagagcttagcgcacacccgatggaactgtaaatatcacatagttttcgcgcccaaataccgaagacaagcgttctatggagagaagcgtagagcggtaggcagcattttaaggaaactatgtgagtggaaaaatgtgaacattctggaagcggaatgctgtgcagatcatattcacatgcttctggagatcccgccgaagatgagtgtgtcagggtttatgggttatctgaagggaaaaagtagcctgatgctttatgagcagtttggcgatttgaaattcaaatacaggaacagggagttctggtgcagagggtactacgtcgatacggtgggtaagaacacggcgaagatacaggattacataaagcaccagcttgaagaggataaaatgggtgagcagttatcgatcccttatcctagcagcccgtttacgggccgtaagtaa

SEQ ID NO: 377155 - DNA, 246 bp, Salmonella enterica
atggagagcgcgacgattgcagcccagggctatcgcttccgcgtgccttacggcacgctgctttgtgtttctgacaaacctttacacggtgaaattaaactgcccgggcaggcaaaccggttttatgagggggctatttcagaacatttgcaaattggtattcgtgctattgatttactacgcgcagaaggtgatcgtttgcactcacgtaaattacgcacgtttaatgagccgccgtttcgctaa

SEQ ID NO: 377156 - DNA, 834 bp, Salmonella enterica
atgacagtgaaagcaaagcgtttccgcatcggggtggaaggtgccaccactgacgggcgcgagatccagcgtgaatggctggtacagatggctgccagctacaacccgacggtctataccgcgctgattaaccttgagcacatcaagtcttatctgccggagagcacttttaaccgctatggcagggtgacggggctggttgcagaagaaatccaggacggcccgctggcgggcaagatggcactttatgccgatatcgaacccactgacgccctggtggaactggtgaaaaaaggccagaagcttttcacctccatggaggtcagcacgaagtttgccgacaccggcaaagcctaccttgtggggctgggtgcgacggacgatcctgcgagccttggcaccgaaatgctggctttcagcgccagcgccgcacataacccgctggcaaaccgtaagcagaaccctgaaaacctgttttcggaagcggttgaaacgctgatcgaactggaagaagcccaggacgaaaagccgtccctctttgccagcgtcaccgcgctgttcaccaaaaaagagcagaccgacgatgcgcgtttctccgatgtgcataaagccgtggaacttgtcgccaccgagcagcagaacctgagcgagcgcactgataaatccctggctgaaaacggtgagcgcctttccgcgctggagtcctccctgcaggaacagcagaccgcctttgccgagctacagcagcaactgagccgcgaagacagccgcaaggattaccgccagcgcgcgccgggcggtgacgcaccggcaggcaccctgaccaattgctga

SEQ ID NO: 377157 - DNA, 1065 bp, Salmonella enterica
atgaaaaagaaaacccgctttgcctttaacgcttacctgcagcagctggcgcgcctgaatggtgtggatgttgaagaactctccagcaagttcaccgtggagccgtccgtgcagcagactctggaagaccacatccagcagtctgctgctttcctgacgctgattaacatcacgccggtcactgagcagtccggtcagttgctggggctgggcgttggcagcaccattgccggaaccaccgataccaccaccaaagagcgcgagcctaccgatccgacgctgatggaagacgtggaatacaaatgcgagcagaccaactttgatacggtgctgacctacgcaaaactggacctgtgggcgaaattccaggacttccaggtgcgtatccgcaacgccatcgtcaagcgtcaggcgctggaccgcatcatgatcggctttaacggcgtgaagcgcgccaaaacctccaaccgtgctgaaaacccgctgctgcaggacgtcaataaaggctggctgcagaaaatccgcgaagacgcgccggatcacgtcatgggcagcaaaaccgcagaagacggcaccactactgcagaaccagtaaaagtaggtccgggtggtaagtatgtaaatcttgacgcggtggtgatggataccgtcaacgagctgatcgatgtggagtatcaggatgatgacgagctggttgttgtctgcggacgtgaactgctgtctgacaagtatttcccgctggtcaacaaagagcaggacaacagcgagaaaatcgccgccgatctgatcatcagccagaaacgcatgggcggcctgcaggctgtgcgcgcgcctttcttcccggcaaatgccctgctaatcacccgtctggataacctgtccatctactggcaggaagacacccgccgccgttcagttatcgacaacccgaaacgcgaccggattgaaaactttgaatccgtcaacgaggcgtatgtggtcgaggactaccgctgcgcggcgctggtagaaaacatcgaaatcggtgatttcagcgcgcctgccgcaccggaaagtggggaataa

SEQ ID NO: 377158 - DNA, 651 bp, Salmonella enterica
atgagcctgagtcccgcacggcagcaccgcctgcgcattcaggctgaacaggccgcccgtgagggcggcagtgttcgccatgcgtcgggctatgacctgatgctgctgcagctggcagaagaccgccgccgcctcaagggcgtccagtccacggtgaaaaaggcggaaatcaaggtggaactgctgccgaaatattccgcctgggcggagggcgtgctggctgccggaggtgcgcagcaggatgacgtgctgatgtacgtgatgctgtggcgtatcgacgccggtgattatgccggtgcgctcgaaatcgggcgccatgcgctgcgccatggctgggtgatgcctctgggcaaccgtaacgtgcagaccgtgctggcagaagaaatggcagacgcggcgcaaagcgctctgcttgccgctgccggttttgatgccgatccgcttctgcagacgctggacctgaccaccgatctggatatgccggaccagtcgcgggcgcgcctgcataaagccatcggtgctgtactgagcgaaagcaacccggcgtctgccctgaatcaccttaaccatgcgctgcagcttgatccccgctgcggtgtgaaaaaagaaaagcagcagctggagcgcagactgcgcaatgacagccgctaa

SEQ ID NO: 377159 - DNA, 834 bp, Salmonella enterica
atgacagtgaaagcaaagcgttttcgcatcggggtggaaggtgccactaccgacggacgcgaaatccagcgtgaatggctggaacagatggcagccagctacaatccggcggtgtataccgcgctgattaaccttgagcacatcaagtcttatctgccggacagcacctttaaccgctacggcaaggtgacggcgctgtttgctgaagaaatcacggaaggtccgctggcgggcaagatggcactgtatgccgacgttgagccaacggagtccctggtggagctggtgaaaaaaggccagaaattattcacctctatggaagtcagcccgaagttcgctgatacgggcaaagcctacctggtcggcctggctgccactgatgaccctgccagtctgggcactgaaatgctgacattcagcgccagtgcagcccataacccgctggcaaaccgcaagcagaatcccgccaatctctttaccgccgcagaggaaacggtgatcgaactggaagaaatccaggaggacaagctgtccctgtttgcccgcgtcacggcactgttcaccaaaaaagagcagtccgacgatgcccggttctctgatgtgcataaggccgtggagttggtcgccactgagcagcaaaacctgagcgcacgcaccgaaaaatccctgtctgagcaggaagaacgtctgtctgagctggagactgccctgcaggcacagcagacagcctttaacgaactggtgaataagctgagtcatgaagacagccgccaggactaccgccagcgtgcaacaggcggtaacgcccccgctgacactctgaccaattgctga

SEQ ID NO: 377160 - DNA, 1059 bp, Salmonella enterica
atgaagaagaatacccgctttgcttttaacgcttacctgcagcagctggcgcgtctgaacggtgttgcagttgaagaactgtccagcaagttcaccgtcgaaccgtccgtgcagcagacgctggaagaccagatccagcagtccgccgctttcctgacactgattaacgtcacgccagtgactgagcagtccggtcagttgctggggctgggtgttggcagcaccattgccggaaccactgataccaccgcgaaagagcgtgaacctgtcgatccgacgctgatggtcgatgtggaatataaatgcgagcagactaactttgacacggtgctgacctacgcgaagctggacctgtgggcgaagtttcaggatttccaggtgcgtatccgtgacgccatcgtgaaacgtcaggcactggaccgcatcatgatcggctttaacggcgtgaagcgtgcgaaaacctccaaccgtagcgaaaacccgctgctgcaggatgtgaataaaggctggctgcagaaaatccgtgaggatgcaccggatcacgtcatgggcagcaccaccacgggcggtgaaactacaccgggtgcggtgaaagtcgggaaaggtggcgaatatgccaacctagacgccgtagtgatggatgccgtcaatgagcttatcgacgtggtttaccaggacgatgacgatctggtggttatttgcgggcgtgaactgctgtctgacaagtatttcccgctggtcaacaaagagcaggaaaacagtgaaaaactggctgccgatatgatcatcagtcagaaacgcatgggtggcctgcaggccgtgcgtgcgccgttcttcccgccgaatgcgctgctaatcacccgtctggataacctgtccatctactggcaggaaggcacccgccgccgttcagttatcgacaacccgaaacgtgaccggattgaaaactttgaatccgttaacgaagcctatgtggttgaggactaccgctgcgccgcactggtggaaaacatccagattggcgatttcagcgccgctgcagcagaagccggagcgtaa

SEQ ID NO: 377161 - DNA, 651 bp, Salmonella enterica
atgagcctgagtcccgcacggcagcatcgcctgcgcgttcaggctgaacaggccgcccgcgagggcggcagcgttcgccacgcatctggctatgacctgatgctgctgcaactggcggaagaccgccgccgtctcaagggcgttcagtccacggtcaaaaaagcggaaataaaggtggagctgctgccgaaatatgccgcctgggcggagggcgtcctggctgccggaggcgctcaacaggatgacgtgctgatgtacgtgatgctgtggcgcattgatgccggagattatgccggggcgctggagatcgggcgtcatgccctgcgtcatggctgggtgatgccgctgggtaaccgcaatgtgcagaccgtgctggcagaggaaatggcagatgcagcgcagagcgcaatgcttgccgccaccggctttgatgccgatctgttgctgcagacgctggagctgacagacggtctggatatgccggaccagtcacgggcgcgtctgcataaagcgattggcgctgttctgagtgaaagcaatccggcttccgcccttaatcatctcaaccatgcgttacagctcgatccccgctgtggcgtgaaaaaagacaaacagcagctggagcgcagactgcgcaatgacagccgctga

SEQ ID NO: 377162 - DNA, 465 bp, Salmonella enterica
atgaagtttgttgcgccagaacaggcaccggaacaggcggaaatcatcagaaatacgccgttctggcctgatgtggacctgtcggagtttcgcagcatgatgcgcactgatggcacggtgacgcagccgcgtttaaagcaggttgcgctgtcggcaatttcggaggtcaacgcagagctgtatgagtttcgcagacgccagcagatgctggggtatgcctcgctggcagaagtcccggcggaacaactggacggcaaaagcgagcgcattcagcactatttcaacgcggtttactgctgggcacgcgccatgctcaacgaacgttaccaggactatgacgccacggcatccggtgtgaagcggggcgaagaactggcagaagccagcggtgatttgtggcgtgacgcccgctgggccatcagccgggtgcaggatgcgccgcactgcacagtggagcttatctga

SEQ ID NO: 377163 - DNA, 1332 bp, Salmonella enterica
atgctttatatcgacccgcagaacagtagccagattattgctgaacaggtgatccctgaaaacgagggcggttggtggatacgtgaagtgggcctgtttgatgagtccggggcattgattgccgtgggaaactgcccggaaagctataagccgcaactggctgaaggcagcgggcgtacccagaccgtgcgcatggtgctgattaccagcagcacggacaatatcaccctgaaaatcgaccctgccgtagtgctggcaacccgcaagtatgtggatgataaggtactggagctgaaggtgtacgtggatgacctgatggcaaaacatcttgccgcaccggacccgcattcacagtatgcacagaaagaaagtcctacgtttaccgggacacccaaagcgccaacgccagcggcggggaataacaccacgcaggttgcgaccaccgcgtttgttcaggctgcactgacggctattattaatggtgcgccagccacgctggacacgctgaaagaaatagccgtagccattaacaatgatccgaaattcagtaccaccattaataatgcgctggcactgaaagcgccgctgttgagtccggcactcaccggaacgccaacagcccccacggcggcgcagtcggtcaacaatacacagattgccactacggcttttgtgaaatcggcgattgcggcaatggtgggttctgcacctgcggcactggatacactgaacgaactggcggcggcgctggggaatgacccgaactttgccacgacaatgcttaatgcactggcaggtaaacaaccgctggacaatacgctgactaatttgagtggaaaggatgtagcgggtcttctcgcataccttggtttgggagaaggttcggcattacccgttggtgtgcctgttccgtggccttccgccactccgccaacaggctggctgaaatgcaatggtgcggctttttctgctgaagaatacccggaactggcaaaggtttacccgacaaataaattgcctgatttacgcggtgaatttattcgtggctgggatgacggacgtggagtggatgccgggcgacaattattatcttcacagggggatgcaataagaaatattgagggattcgcagatggcgggatcggtatgtcttttgatgcaatcagaggggctttttatgatgcaggaacacgatctgcgagaatgccgaataacacaactgatataggcaaaaccgatgaccttggattcgacgcctctcgtgtcgtgccaacagctaatgaaaaccgtccacgtaacatcgcctttaattatattgtgagggctgcataa

SEQ ID NO: 377164 - DNA, 504 bp, Salmonella enterica
atgtatgttcaggattatccaccggcaaacctgacatcgctgtgtacgccgatgagccgtagcctgacatttatgtgggagaacgtgttggatgctgtgcgccaggggttgcccgttgggctacaggaacatcaggcgatggggttactgttagcgcttttacatgatggcgcggcgggaccgctgcttattgaacggcgttacaccctcacggagcaggtgcggcaactgattatgctctcacctgctaagctatggacagcccaggagatagcccgccgccttgctatgggaacatcgacgctgcgtcggcgtttgcagcgcgaatcgcagagttatcggcaaattattgaagaggtacgcatgtcctgcgcgctttctcaactgcaatcgacgacgctgccgatcggcgaaatagcgctacggtgcggctacctgtcggggtcgcgatttacggccagattccgccaacattatgggtgtctgcccagtcaggtacgttaa

SEQ ID NO: 377165 - DNA, 429 bp, Salmonella enterica
atgtaccccaatctggcaaaggcttatcctacaaataaactaccggatctacggggtgaatttatccgtggctgggatgacggacgtggcgtggatgcggggcgagccttgctaaggcttcaggatgactcttttgaagcgcacaggcatgagtcctttttttatgcgggtatttcacgcaatgaaatcccattaaaaaatcttccaagttcagacgagatgctgactttaagttccacaactaatgccttgtcaccggacggtattgatgccaccaattcgttaattggtaatgacgattacaactgtctgatcgaagggaataaaaataacaaacgaacagcaacgggtctaagtaccagtattgtcggcgcaactgaaacccgcccccgtaacattgcgtttaattacatcgtaagggcggcatag

SEQ ID NO: 377166 - DNA, 618 bp, Salmonella enterica
atgaataatgctgctgcagtacttgatcagaatggtatcgctataactgcaggcgatattaccgtttataactacgatgctgaaaaccgtgaatatctctctgccactgttgagtatctcgcttatggtgttggaattccggctcactcatgcattgacgcgccaccagaaaaacgccccggcttcgctgtctgtcgtgataccgaccagaacatctggaaatatgttccagaccacagaggcgaaacggtttacagcacagagaatggtaacgctgtgcaaatcacacaaccgggagattaccctcctgatacgacggtgaaacagccagctactatctatgatgtctgggatggtgagacctgggtgacagatgcgggacgacagcacgcagcagaactggaagctgccggagcgcatcgtcagcaacttgaggaacaggcaatggcatctgttgagcttataaatctcaaactacgagccggacgccgattgacgccccaggagacggaaaaactaaacgccgtgcttgatttcatagatgtgcttaatgcgactgacatcagcactgcaccggatatcaactggccggaaatgcctctggcagcagccagttga

SEQ ID NO: 377167 - DNA, 1209 bp, Salmonella enterica
atggacgaaaaacagttacaggctctggctaacgaactggccaaaaacctcaaaacccctgaagacctcagtcagtttgatcggctgctgaaaaagctcagcgttgaagccgctctcaatgcagagatgacacaccatcttgggtatgagaaaaatcagtccagaccaggagctaactcccgcaacggtttttccacaaagaccgttatcacaggcgacggtccactggaactgcgtactccgcgcgatcgtgacggtaccttcgaaccacaactggtaaagaaaaatcagacccgtattaccgggatggataaccagatcctctcgttgtatgccaaagggatgaccacccgtgagatagctgctgcgttcaaagaactgtatgacgcagatgtttcaccggcactgatatcaaaggttaccgatgccgtgatggagcaggttgtagaatggcaaaaccgaccactggatgctgtttaccccattgtttatcttgactgtatcgtcctgaaagttcggcaggacagtcgcgtcatcaacaaatcggtgttcctggcactgggcatcaatatcgaaggtcagaaagaactgctgggtatgtggctggccgaaaatgaaggggcgaagttctggctcaatgtgctgactgaactgaaaaaccgcggtctgaacgatatcctcatcgcctgtgtggatggcctgaaaggcttcccggatgccatcaacacagtatatccgaaggcccgcatccagttatgcatcgtgcatatggtgcgcaacagcctgcgcttcgtgtcatggaaggactacaaagccgtcactcgcgacctgaaagcgatttatcaggctcccacggaagaggcaggccagcaggcactggaagcgttcgctgcggcctgggactgtcgctatcctcagataagccgaagctggcaggctaactggccgaatcttgccacgttcttcgcttatccaacggacatccgcaaagtgatctatacgacgaatgccatcgagtcgctaaacagcgtgatccgccatgcgatcaaaaagcgtaaagtgttcccgacagacgactcggtgaaaaaagtggtgtggctggcaatccaggcggcttcacagaaatggacgatgccactgcgggactggcgtatggcaatgagccgctttattatcgagttcggtgaccgcctggacggccacttctga

SEQ ID NO: 377168 - DNA, 606 bp, Salmonella enterica
atgaatagtctgctgccaccgggttcaacaccactggagcgccgattggcgcaaacctgcagcgggatttctgatctgcaggtgccgcttcgtgacttgtggaatccggcaacctgtccggtcagtttcctgccttatctcgcctgggcgttctctgtggatcgctgggacgagggctggacagaaagcgtcaagcgccaggtggtgaaggatgctttttatattcatcagcataaagggaccaccagtgccgtgcggcgggtggtggagccgttcggctttttgatccacattattgagtggtggcagaccggagaggcaccgggcacgtttcgcctggatatcggcgtgcaggaccagggcatcactgaagatacctatctggaacttgagcgactgataagcgatgccaaaccatgtagccgccacatgatcggcatgtccatcaatctgcagaccagcggcccgcattgggtgggagccgccagctatcttggcgaagaaatcacgatctatccgtatatcaacgaaacgattatttccggtggcaccgcgcatgaaggcggggcggtccatgttattgacacaatgagagtgaatccatga

SEQ ID NO: 377169 - DNA, 411 bp, Salmonella enterica
atgcagtggagaaagctgcatagaatcattttcctaaatattattggtggggtattttttattggtcttggtacgttatttatttatgttttaaaggattatatctatagcataattgctaacggtatagattataatattagtggggttgtttttgttttactggctgtgtattttagtataagagtttggtgtgatacatttgctatgttacttcaaagtatgaaccaattaaaaattctttggctcatagttccgtgtcaggcattaattggtggtgtgactcaatggtattttgcagagcattatggaatagttggtattttatacggactaattttatcgttctcgctaactgttttttggggattgccagtgtattatatgtataagagtaaaaggctagcataa

SEQ ID NO: 377170 - DNA, 354 bp, Salmonella enterica
atgaataatgaggagccagatgtaatcgaaagcctgaagaaatttatgcctgaactaattattcatgatgcgaagtcttttactgaatggctatctgttattaagaactcagtagtactaatctcaggaaggtaccattattctattgcggcaatgtgttttggtacaccaacagtatgcttttcatctaatacaccaaaattggatgaaattaataagatgtttaatttaccaggctgtgtcagaacacatgatgaatttactaaagcgcttaacgaaattgacaatttaacatggcaaccactttctaaagagatgtctgacttagctgaatacaactataatttcctttaa

SEQ ID NO: 377171 - DNA, 1011 bp, Salmonella enterica
atggattcatttcctgagatagagatagctgaatataaagtttttgatgaaagtaatgataatgatgataacgtattaaacatttcttatggcgtcgatgaaaactatcttgatggtgtgggggtatcaatcgcttccgttgtattaaacaataatatcccgcttgcttttcatattatttgtgactcatactccccgtgttttgtaaaatatatagagcgtttagccgtacagcatcacattaaaatttctctttatcttattaaagtagaaagccttgaagtattgccccaaactaaagtatggtcgagagcaatgtattttcgtttatttgctttcgattatctcagcaagaaggtaaacaccttactttatttggatgccgatgttgtatgtaaaggatctttgcaagatcttctacagcttgatctgacagagaagattgctgcggtagtaaaagatgttgattccatccagaataaggtaaatgagagattaagcgcttttaatttacaaggtggttattttaactccggcgtggtttttgttaacctgaaattatggaaagagaatgccttaactgaaaaggcatttttacttctggcaggtaaagaagctgactcttttaaatatcccgatcaggatgttttgaatattctcctacaggataaagttatttttctacctcgaccatataataccatttatactatcaaaagtgagttgaaagataggtcacataaaaaatatagcaatataattaatgataatactattttaattcattatacgggcgctacaaaaccatggcatgcctgggcaaattatccttcagttatctattataaaaatgcacgactgaactcgccctggaaagattctcctgcaaaagatgcgcgtaccatagttgaatttaagaagcgatataaacatcttctcgtgcaggggcattattttaaaggccttctggctggaagcgcatatctttatcgtaaacttttccacaaataa

SEQ ID NO: 377172 - DNA, 126 bp, Salmonella enterica; identical to SEQ ID NO: 376778

SEQ ID NO: 377173 - DNA, 1455 bp, Salmonella enterica
atggaaaataaaggcacaaacctgacacccgagcaggcgctggatcgcctggaggagctgtacgagcagtcggttaacgcgctccgtgaagccatcgctgactatgttgataacggcacgctgcccgatccccatgccaggcttaacggactgtttgtttatccttcgctgtctgtaagctgggatggcgcgacaccgaacccgcctaaaacacgcgcttttggacgctttactcatcccggctgttataccactaccgttacgcggcctgcgctatttcgcgcttatcttctggaacagcttaacctcgtttaccatgattatggcgcgcatattgcgatagaggcctcgcaccatgagatcccgtatccttatgtgatcgatggctcggctctgacgctggatcgttctatgagcgccgggctaacgcgccattttcctaccacagaactggcgcagattggcgatgagacggcagacggtctgttccaccccggcgaattctatccgttatcgcacttcgacgcgcgtcgtgttgacttctcgttggcccggttacggcactataccggtacgccggttgaacattttcagcccttcgttttgtttaccaactacacccgctatgtcgatgagtttgtgcgctggggatgcagccaaattcttgatcctgacagtccctatatcgcgctttcctgtgccggcggaatttggatcacggcagaaacggaagcgccggaagaggctatttccgatctggcctggaagaagcatcagatgcctgcctggcacctggtaacggcagatgggcaggggattacgctggtaaatatcggtgtcggcccttcaaatgctaaaacgatttgcgaccatttggccgtgctgcggcctgacgtctggcttatgattgggcactgtggagggttacgagaaagtcaggcgattggtgattatgtgctggcccatgcctacttacgcgatgatcatgtgctggatgctgttctgccgcctgatattccgattccaagcattgcggaagtacagcgtgcgctgtacgacgctaccaaagcggttagcggaatgcccggcgaagaggtgaaacagcgactgcgcacgggaacggtcgtcaccacggatgaccgtaactgggagcttcgttattccgcatctgcgctgcgattcaaccttagccgtgcggtcgcgattgatatggagagcgcgacgattgcagcccagggctatcgcttccgcgtgccttacggcacgctgctttgtgtttctgacaaacctttacacggtgaaattaaactgcccgggcaggcaaaccggttttatgagggggctatttcagaacatttgcaaattggtattcgtgctattgatttactacgcgcagaaggtgatcgtttgcactcacgtaaattacgcacgtttaatgagccgccgtttcgctaa

SEQ ID NO: 377174 - DNA, 387 bp, Salmonella enterica
atgtctctccaacaaatggtcgttgatctgaaactaacagataaagtgacttttttacatgaagtctcatttaatgaattaaaagttttatattctaaagcctacgcgcttgtttatccatctattgatgagggttttggcatacctcctattgaagcgatggcatcaaatactccagttatagcgtccgatataccagtatttcatgaagtgttaaccaatggtgcattatatgtgaatccggatgatgaaaaaagctggcagagtgcaattgaaaatatagggcagttgcctgatgcaatttccagatttaacaactatgtcgcacggtatgactttgataatatgaagcagatggttggcaattggttggcggaatcaaaataa

SEQ ID NO: 377175 - DNA, 1086 bp, Salmonella enterica; identical to SEQ ID NO: 376734

SEQ ID NO: 377176 - DNA, 459 bp, Salmonella enterica
atgggggacgaaaagagcttagcgcacacccgatggaactgtaaatatcacatagttttcgcgcccaaataccgaagacaagcgttctatggagagaagcgtagggcagtaggcagcatattaagaaaattgtgtgaatggaaaaacgtacgaattctggaagcggaatgttgtgcagatcatattcacatgcttctggagatcccgccgaagatgagtgtgtcgagcttcatgggatatctgaagggtaaaagtagtctgatgctttacgagcagtttggggatctaaaattcaaatacaggaacagggagttctggtgcagagggtactatgtcgatacagtgggtaagaatacggcgaagatacaggactacataaagcaccagcttgaagaggataaaatgggtgagcaattatcgatcccttatccgggcagcccgtttacgggccgtaagtaa

SEQ ID NO: 377177 - DNA, 666 bp, Salmonella enterica
atggataatgatcgcctgacgctggttcagcctgagggggccatcagccataacgccatgcagcagcgtagcctgtggcgcgaagtattcacgccaattgtactgatgtatacgctggcctatttttgccttaccaatacgcttagcgccattagtatctggacgccgcaaatcctgaaaagttttaatgaaggcagcagcaatatcaccatcggcctgctggcggcgatcccgcagatttgtactgttctgggcatgatttactggagccgccattcggacaaacatcaggagcgtaaacaccacactgcgttaccgttcctgtttgccgccgcgggctggctgctggcgtcggcgaccgaccgtaacctgatccagctcctggggatcgtgatggcatccacgggttcctttagcgcgatggcgatcttctggaccacgccggatcagtcgatcagtttacgcgccagggcgataggcattgcggtcatcaatgccaccggcaatattggctccgcgctcagcccggttatgattggctggctaaaagatatcactggtagcttcaatagcggactctggtttgtcgcttctctgttagtcgtcggcgccgccattatctggctcattcccatgaaagcatcgcgtccgcgcgccaccccttga

SEQ ID NO: 377178 - DNA, 3159 bp, Salmonella enterica; identical to SEQ ID NO: 376826

SEQ ID NO: 377179 - DNA, 1191 bp, Salmonella enterica; identical to SEQ ID NO: 376827

SEQ ID NO: 377180 - DNA, 1038 bp, Salmonella enterica
atgtctgaaataaatcagaacgtaaaagatagccgtcagcagtattaccagcatatttccgggcagaatctgacgccgctgtgggaatcgttacatcacctggtaccgcagacgccaaacgccaactgcgcgccggcctactggaattatcaggaaattcgtccgctactgatggaaagcggcaatgtcattggcgcgaaagaggcgatccgccgggtgctggtgctggaaaatccggcattgcgcggtcagtcgtcgatcacggcgaccttatacgctggtttacagctgatcctgcccggcgaagtcgcgccgagtcatcgccataaccagtcggcgctgcgttttatcgtcgaaggtaaaggcgcatttaccgcggtggacggcgagcgcacgccaatgcataccggcgattttatcctgacgccgcagtggcgctggcacgatcatggtaatccgggatcagagccggtggtatggctggatggtctggatctgccgttagtcaatctcctgggctgtggttttgcggaagactatcccgaagatcagcagccggtgacgcgaaaagagggcgattatctgccgcgctatgcagcgaatatgctgccgctgcgccaccagcgcgggaactcgtcgccgattttcaactaccgttacgaccgcagtcgcgaggcgttgcacgatctgacccgtatgggcgatccggatgagtgggaaggctacaagctgcgttacgttaatcccgtcactggcggttatccgatgccgtcgatgggcgcgttcctgcaactgctgccaaaaggctttgcctcgcgtgtggcgcggagcaccgacagcactatctaccacgtcgttgaaggggcagggcaggtcactatcggcaacgaaacttttcatttttccgcaaaagacatttttgtggcgccgacctggcatgaggtgtcgtttcgcagcagcgaagacacggtgttattcagcttttcggacaagccggttcaggaagccctggggctgttccgcgaagcacgttattaa

SEQ ID NO: 377181 - DNA, 792 bp, Salmonella enterica
atgaatcgtaattctttccttgccgcgacagcgagcttaccgctttttattttgctggcgggctgcgcccctatgcacgatacccgccagtcgctgacccagcagacgccctcttctcatgttgattccagcctgccggcggcattgaaaaacggttggccggatagccagtggtggaaggcgtatcacgatgcgcagcttgacgcgctgattgataatgccatacagcattcgccggatatgcaggtggctgaacagcgtattcaactggcggaagcgcaggcgaaagcggttgaggcgcaggacggcccgcagctcgacttttctgccgacattgagcgccagcgaatgtccgcggaagggctgatggggccattcgcgattaccgaccccgcggcgggaacgaccgggccgtggtataccaacggtacattcggcctgacggcgggctgggatctggatttatgggggaaaaaccgcgctgaagttaccgcgcggatcggggcggtcaaagcgcgcgaagcggagcaggagcagacccgacaattgctggcaagcggcgtggcgcgactctactgggagtggcagacgcaggcggcgctgaaaaatgtgctgatgcaaatcgagcatgagcagcaaaacgtggtggcggtaaaccgggagctgtatcaacacggtattacttcttctgttgaaggggtcgagaccgatatcgacgccagcaaaacccagcagcagttgaatgacgttaacggtaaaatgaaggttattgaagcgcggctcagcgcgtaa

SEQ ID NO: 377182 - DNA, 621 bp, Salmonella enterica
atgaaagaaaatgccgtaagacgcgccaatgatcctaagcgacgggaaaaaataattcaggccacactggaagcggtaaagacctatggcgttcatgccgtgacgcaccggaaaatcgccgctatcgctcaggtgccgcttggctcgatgacctactattttgccggtatggatgcgttattgagtgaagcttttacacttttcaccgagaacatgtcgcgtcaataccaggatttttttgcgcaggtgacggatgtggagggggcgtgccaggcgataacggaaatgatttacggctcgcaggttacgacgccggataatatggcgttaatgtatcagttatatgcctatgccagcgataagccagcgttaaaaatagtcatgcaaaactggatgcagcgtagccagaatacgctggcgcagtggtttgacgcacagaccgcccgcgcgctggatgcgtttatcgaggggatgacgctgcattttgtgacggatcgaacgccgttggcgcgtgaagcgattttacagatggtaaagcgaatagccggagagtcaatgtcgtgtcactctgcgtcgggcaacaaaaaacccaccaaccttgaaccgaaatggcggggttga

SEQ ID NO: 377183 - DNA, 216 bp, Salmonella enterica
atgatggcgatagccatgaccatcgcctggtcgcgcgtctatctcggcgtacactggccgttagatatgattggcgcgctgctggtagcgatgcttggctgcctgagcgcacagctgatctggcaatggtacggcgcgccgctctaccaggcgctgcaacgttgttaccgtttctgtttcgcattgcccattcgaaaaggctgggtacgtgactaa

SEQ ID NO: 377184 - DNA, 1143 bp, Salmonella enterica
atggacattattgatttaaaatctcaactagaaaatgaagataatgccaagaaaagagcagagttgcttgctcagctagaggtgataaagcaaaacgctgaagagcaaattcgtgctgagcaaaaggatgtggattttgagaccaaagaatttaccgttgagttattagttaataagtatcatagcggattagaggatgatactaacgaactctttgttcctgattatcaaagggattttgtttggagtgaaaaaagacaatcaagattgatagagtctttgattttgggttttcctataccatatatatttacagcagatgttctctccgaagatcccgatttagatgggcgaattgagattgttgatggctcacagcgagttaggactatacacgcttttatccaaaatgaattagttttacaagatctgaaatctttagacgcccttaatggtttcaaattccaagatttaccattatcacgtcaacgtcgtttcatgagaattcctgtccgcgttatagaattgagttctaaatgcaatgaagaaacccgtagagatctttttgaacgtattaactctggcagcgatatattgaaagatatggaagtccgtaaaggatcagaacttggttcaacaaatttatatacacaggttattaagccatgctcaacaatacctaaatttaaagaattagcacctttatctcagactaaagaaaaacgagatgaacggttagaatttacattaagattctttgcctacttagataagtacaagaactttgatcattccgtacgggattttctaaatgactatatgttagaaaatcgagatatagacgaaactaaacaaaactcaatgaaacaagagtttgctaatgttctatcttttgttgataactatttcccagcaggattcaagaaaactattactgcaaaatctacacctcgagttagattcgaatctctcgctgttggcgcagcacttgcattacgtgaaatccctgaccttgttcccaagaacttggattggctaagctcagaagaattcaaacgattgaccacttcagacggagctaatagtcgcgtgaaggtaattgaacgaattgaatatgttcgggataaattattagaggattaa

SEQ ID NO: 377185 - DNA, 681 bp, Salmonella enterica
atggatcgttttcgtgaggattttgacgaaaggtcaggagagatcttggcctatttagatcttttgaaatttattgagtatgccggtgcagaactgatatcatctgatgataaagaacataagttctccattactgctcaatcacgaaaaactctaaagggggcagtatatattctattatataacctcattgaatcaacaatgagagaagctatctgccttattcatgagactatttatgatagaaacgtagaatttgacaaactcaggaaaaatatcaggtcagaaatattaaaaagattaaaaaatgaatctgtaaatattgaaagtttagttaaccgtcttactaaaggtatatcttgcggtatatcttatggcactttcaacaaaaagaaaatattctcaggaaatattgatagagaggaaatcaaagaaaaatcgaaaatatatggtttttcaacatattctgattacactcacactaaacatggtgaaaaattagccactgtcaaacaacatcgtaatgatttatctcatggcaatgtatcatttgctgagattggaaaaaatgtttcatatcaggacttagagaatatttcattagaagtaatcgcctatcttgatgcaatcgcgaataatatagagcactatataaataataatgaatatttagaacaatag

SEQ ID NO: 377186 - DNA, 1023 bp, Salmonella enterica
atgactgtaaaggtgatagaccttttttgtggtgctggcggattaactcatggtttacagcttgcggggcttgatgtcgttgcaggcatagaccttgagggggaatgtcggtttccctatgaaagaaacaataaatctaagtttattgagcaagatatcgctaaagtaacaaaagaggaactgctgaggctttatggtgatgcgtctgtaaaagtattggcaggatgcgcaccttgccaacctttttcaaaatatactcaaggaaaagataaggctgatgataaaaaatggcctcttctttatgagttcgaacgtttaattcgcgaagtatctccagaaatcgtaacaatggagaacgttcctgatgtaactaaacataaagtttataatgatttttataattcattgttaaagttgggctattatgtttgggcgtcgaaggttgattgtgtcgaatatggaatcccacaaaaccgttcccgtcatgtattgttggcttcaaaattgggggcgattgagttagtaaaacgtgacgatgttattttgaaaacagttagagatgcaataggaaatcttcctccgttagaagatggccaaacagatccaaatgatatattacatagagccagtaaattaaatccgattaataaaaaaagaattatacactctgttcctggtggtacatggaaggactggccgaaggagctgattgctgcttgtcatatgaaatctagcggtaaaggatatgctagtgtatatgggcgcatgtcttgggataagccgagtccaacaattacaactctttgttatggtttcggaaatggacgttttggacatccagaacagcatagagcgatttctcttagagaggctgctttattgcaaacttttccgatggattatatctttgtagaagacaaagacaagtttgttataagaagtattgggaaaatgataggtaatgctgttcctgtggaactaggaaaagcaattgggcaatcaatcaagaaccatttagaatga

SEQ ID NO: 377187 - DNA, 225 bp, Salmonella enterica
atgccggacaacgtagattttattcaggaacaacaggctgaattactggagcgccagattaacgcggcaagggtaaaacattgcggtgcttctgcgctggtttgcgaagagtgtgacgcgccaatacctgctgcccgtcgtgcggcttatccgtcagccacgcgttgtgtttcctgtcagtcagtctttgaagcaaaaaacaaacattaccggagaacggcatga

SEQ ID NO: 377188 - DNA, 459 bp, Salmonella enterica
atgagggacgaaaagagcttagcgcacacccgatggaactgtaaatatcacatagttttcgcgcccaaataccgaagacaagcgttctatggagagaagcgtagggcagtaggcagcatattaagaaaattgtgtgaatggaaaaacgtacgaattctggaagcggaatgttgtgcagatcatattcacatgcttctggagatcccgccgaagatgagtgtgtcgagcttcatgggatatctgaagggtaaaagtagtctgatgctttacgagcagtttggggatctaaaattcaaatacaggaacagggagttctggtgcagagggtactatgtcgatacggtgggtaagaatacggcgaagatacaggactacataaagcaccagcttgaagaggataaaatgggtgagcaattatcgatcccttatccgggcagcccgtttacgggccgtaagtaa

SEQ ID NO: 377189 - DNA, 4089 bp, Salmonella enterica
ttgaacaggacctacagtatcgtctggagcgccgtgcgaaatatgtatgtcgtagcttcagaactggcgcgaagccacagcaaagttaaaatacaggcgcacgctaatgaagtcgccccttctattaaaaagcctgattcaggatgggcaagacaccatgcgctggccctggcaattgttgccgcgcttggctttgccagcccgctggccatcgccgataatccggtgtcatacaccgatggggtcaagcacgacctgagcgacgattcgccgatttcctactcaggcactggtgaaggttctgcactgcacctcgaaggccttgcaacgcccgaagggggctggcaggcaacgtcgggtacaggtacaaatgtcgtgattaacaccaacggcggcggcgatcctgttcagggaactcatgctatcgccacggcagttaccctcaacaagggcgcaacacttgacctgaccggggcgcagatctctacggaaggaacctacacggcaggtatcgacctccaggcgcaaagcagcatgacgctgaatggcgggagcatccagatcggaagtaattacggcatcctgaccctctctggcgagtcatgggctgccctgattggcaccgacgttacggcaacgacgcaaagccgtagcagcatagtgtcacaatcaggtagcacgcttaacattaaggacgggagcgtaattacgctgacaaacggccaggtgcgcgtagtaggcgagacgacatacaactcctggctgaatgtgtccgatagcacgatgagctccacgggtacggatagtacgcttcttgtgtccaacaagggcgttcttgatattacgaactctaccgtcacgcacgataatgccacaggcgccgctattgaggtgaaaaacgcctcaacggtgagcatctctgatgataaagattcgatggccatcaactccaaaggcatcggtattaaaatcctcgcctccagcgtggatattaacggcgccaccatcaacgccgacggcgacggcatctttataacaagcaaaggtaaaagcggtgggtatgatgatatcaacgcgctgacggttaacaaagcacaggttaattcagagacgattgcgctgcatgtggactctggcacgacgattaacgatcctatcgtgctaaccgatagcgcatttgacgcgccggcagtgatcaagctgggcagcaaggcggtcattcaggccgacaatacgacattgaacggtgacgttgttcagagtgacatgtcatcgtcatcgctgtctttaagccagggttccacgttaaccggtagtgtagatgcgatgtttactacactgtcgctcgacgatactagccagtggaatatgaccgactcgtcaatcatcggcaacctgaccaacaacggcgacattacgctgaacaacgagagcggttcgacaggcacgctgctgacggtgggcaataccctgaccttgcaggacggcagccagataaacgcgacgctggataccgccaacagctcgccaattatcaaagccgccaacgtgacgctggatgggacactgaaccttagctcagcggccacctttgtcgcgcccgaaaccgacgagcagttaggatcgttcacgctaattgattcgcaaaccgcgattactaccgattttgacagcgtaacgctggatgccgacacctctgctatgccggattacctgacgatcaacgcgggcgttgatgcgaatgataataccaactacgtgttgtctacgggcctgagctggtacgcggacgcaaaatctgcgcgcgttgcgcacggcacctttaccgttgacgcaggcgatacctttaccgtcaccagcgaactggatgaaaccgcggccacctccaactgggacggtaaaacgctgttcaaagaaggcgacggtacgctcgtcctcagcaacacggcgaacgacttcggcaataccgacattaacggcggtacgctgtctgcgaatgatgccgccgcgctcggcagcggcgacgtggccattgcagaaaacgcaaagcttgagttgagccaaggcacgctggataacaacgtgaccggcgagggccaaattgtcaaaagcggtagcgatgagctgatcgtgaccggcgataacaactacagcggcggtaccactatttccgacggcacgctgattgctgaccatgcagattcgctgggtaccggggctgttgccaacagcggcgtgcttcaggtcggcgaaggcgagctggaaaatacgctttccggcaacggttcgctgatgaaaaccggtacgggcgagctgacgttaagcggcgacaacacttactccggcggcaccactatttccggcggtacgctgattgccgccaacgttaacgcgctgggcggcggtgatgtcgataacgcgagtacgctgaagctggacgcggagggcgaattcaaccttgcgaatgtcacgacccagtctggagcaacgactgagctgtccaaaggtacgacgctcaacgtcgactcgctgactcagcaagccgatagtacgctgaatattgacctcagtaagactaatggtgaaagcgccattaccgctgacagcgtctcgttggctggtgcgctcaacattaccgggatcggcaacgtcacagacagctggacgcctgaggcatacacctacacgctgattgacagcgacagcgccattacgaccgatttcaatgatttgaccgtcgcgggaatgaatagcgaagatgttgacttcctgaccatcgacggaaaagtcgacgaagcagatagcacaaactatgatctgacggcctccctctcctggtatgcggacagagacaacgcttctaccgacgcccacggcacctttacgctaagtgaccctgacggcagctttaacgttgcggctaaactgacagatgttgatgacgcgctggatccgggcagcacatgggacggtaagtcgctgaccaaagaaggcgcaggcacgctgatcctctccggcgacaacgactacagcggcggcactacaatcaatgaaggtacgctggtcgccgccagcacgacggcgctgggcaccggtctggtggacaataacgccacgctggtactggacgcagacggtgaagtcagcgcggtgggcggcatcaccactcatggcggcgcgacgacccaactggcgctcggcacctcgttggatctcggcgacagcgcgttaattcaggaagatggcagtacgctgaacgttgagctgaatagtgactcagcgcaaccgctgattaccggtggcagcgccacgcttggcggtgatttggtcgtcagcgacgccagcctacaagcgcgcgcctccgacgcggagttccagtcctttaaactgatggatatggacagcgatatcagcggcgactttaccagcctgacgatgaacctcaccgacaagccggactatctgaccgtaaccggaacaatcaatcctcaagaccagtctgaatacctgcttaccgaagggctgagctggaatgcgaccgccacgtcagcgacgccagcacacggcaccttcactctgggcgcaggcgatagctttgaagtcaccagcgtactgggcgataaaaccggcaacggcggctcgctttacctgaataccgtcctgggcgacgatgattcggcgaccgataagttggtcattaccggcgatgcctccggcaccaccgatctgtacatcaacggcatcggcgatggggcgcagaccactaacggtatcgaagtggtggatgttggcggcgtatcgaccagcgatgcgtttgtgttaaaaaatgaggtaaacgccagtctgtatacctaccgtctgtactggaatgaaagtgacaacgactggtatctggcgtcaaaagcacagtctgatgatgacgacagcggtggcgatgtcacgccttcggacgacggcggcgacggtggcgatgtcacgcctccggacgacggcggcgatgtcgcaccacagtaccgtgcggatatcggcgcgtacatgggcaaccagtggatggcgcgcaacctgcaaatgcagacagaccctctatga

SEQ ID NO: 377190 - DNA, 459 bp, Salmonella enterica
atgggggacgaaaagagcttagcgcacacccgatggaactgtaaatatcacatagttttcgcgcccaaataccgaagacaagcgttctatggagagaagcgtagggcagtaggcagcatattaagaaaattgtgtgaatggaaaaacgtacgaattctggaagcggaatgttgtgcagatcatattcacatgcttctggagatcccgccgaagatgagtgtgtcgagcttcatgggatatctgaagggtaaaagtagtctgatgctttacgagcagtttggggatctaaaattcaaatacaggaacagggagttctggtgcagagggtactatgtcgatacagtgggtaagaacacggcgaagatacaggactacataaagcaccagcttgaagaggataaaatgggtgagcaattatcgatcccttatccgggcagcccgtttacgggccgtaagtaa

SEQ ID NO: 377191 - DNA, 3114 bp, Salmonella enterica
atggcgaatttttttatcgatcgccccatttttgcctgggtgctggctatcctgttgtgtctgacaggggcgttagccattttttctttacctgttgaacaatatcccgatctggcgccgcccaacgtacgtattaccgcgaattatccgggagcgtcggcgcaaacgctggaaaataccgtaacccaggttattgagcagaatatgacgggcctcgataatctgatgtacatgtcatcacaaagcagcggaaccggacaggcgaccattacgctgagcttcattgcgggaaccgatcctgatgaggcggttcagcaggtgcaaaaccagttacagtccgcgatgcgtaaactgccgcaggcggtacaggatcaaggcgtcacggtacgcaaaacgggcgataccaatattttgaccatcgctttcgtctctaccgacggttctatggacaagcaggatatcgccgactacgtcgccagtaatattcaggacccgctcagccgcgtcaacggcgtgggcgatattgacgcttatggttcacagtactctatgcgtatctggctcgatccggccaaattgaatagttttcagatgaccacgaaagacgtgaccgatgcgattgagtcgcagaatgcgcaaatcgccgtcgggcagcttggcggtacgccttcggtcgacaagcaggcgctgaacgccaccatcaatgcgcagtcgctgctgcaaacgccgcaacaatttcgcgatatcaccctgcgcgttaatcaggacggttccgaggtcaaactgggcgatgtcgccaccgtggagctgggggcggaaaaatatgactacctcagccgttttaacggcaatccggcttccggccttggcgttaagctggcctccggcgcgaacgaaatggcgaccgcgaagctggtactggatcgcctcaacgagctggcgcagtacttccctcacggcctggaatacaagatcgcgtatgaaaccacctcctttgtcaaagcctcgattatcgatgtggtcaaaacgttgctggaagctatcgcgctggttttcctggtgatgtatctgttcctgcaaaactttcgcgccacgctcattccgacgatcgccgtgccagtagtattaatgggcaccttctccgtgctttacgcgttcggctacagtattaacacattaaccatgttcgcgatggtgctggcgatcgggctcctggtcgacgatgccatcgtggtggtggaaaacgtcgaacgtatcatgagcgaagaagggctcacgccgcgtgaagcgacgcgcaaatccatgggacaaatccagggggcgctggtcggtatcgcgatggtgctgtctgcggtattcgtaccgatggcgttctttggcggtaccaccggggcgatttatcgtcagttttctatcaccattgtctcggcaatggtgctgtcggtgctggtcgccatgatcctgacgccggcgctgtgcgcaacgttattaaaaccgctgcacaaaggcgaacagcacgggcaacgcggatttttcggctggtttaaccgtaccttcaatcgtaatgccgaacgttatgagaaaggcgtagcgaaaattttgcatcgcagcctgcgctggattctgatttatgttctgttgcttggcggcatggtgttcctgtttttgcgtctccccacctcctttctgccgcaagaagatcggggcatgttcactacgtctatccagctaccgagcggctctacgcaacagcagaccctgaaagtcgttgaaaaggttgaaaactattacttcacccatgagaaaaacaacattatgtcggtcttctcgacggtcggttccggccctggcgggaacgggcaaaacgtcgcgcgtatgtttgttcgcttgaaagactgggacgcgcgcgatcccaccaccggctcctcgttcgccattattgagcgggcgacaaaagcatttaaccagattaaagaagctcgcgtcttcgccagcagcccgccggcaattagcggtctgggcagctccgccggttttgatatggaattacaggatcacgccggagcaggccatgacgcgctgatggccgcacgagatcaactcattgagctggccgggaaaaacagttccttgacccgcgtgcgccacaacggcctggacgacagcccgcaactgcaaattgatattgaccaacggaaagcgcaggcgctgggcgtatcgattgacgatatcaacgacaccctgcaaacagcctggggatcgagctacgtcaacgactttatggaccggggccgcgtgaagaaggtctatgttcaggccgcagcgaaatatcgtatgttgccggacgatattaatctttggtatgtccgtaacaaagacggcggcatggtccccttctccgccttcgccacctcgcgctgggaaaccggatcgccgcgtctggaacgctataacggctattcggcggtagaaattgtcggagaggccgcgccgggggtcagtaccgggacggcgatggatgtcatggagtcgttggtgcatcagctaccgggcggttttggcctggaatggacagccatgtcttaccaggaacggctctccggcgcgcaggcgcctgcgctgtacgctatttcgctattagtcgtcttcctgtgtctggcggcattgtatgaaagctggtcggtgcccttctcggtgatgctggttgtgccgctcggggtcatcggcgcgttactcgccacctggatgcgcgggctggaaaacgatgtttacttccaggtggggctgttgaccgttatcggcctctcggcgaaaaacgcgattctgattgtggaattcgccaacgaaatgaatcagaagggacacgcgctgttagacgccacgctgtacgccagccgccagcgcctgcgaccgatactgatgacttcgctggcgtttatctttggcgtattgccgatggccaccagcaccggggcaggctcgggtagccaacatgctgtcggaaccggcgtgatggggggaatgatctcagcaaccattctggctatcttctttgtacccctgtttttcgtgctgatacgtcgccgcttcccgctgaagccgcgcccggaataa

SEQ ID NO: 377192 - DNA, 525 bp, Salmonella enterica
atgggattgcaaaaaacactggcgctcagcgccgtagcggcagggatcatgttgagcttatccggtgcgcaggccgcgccgctgcttagcagtagtgagccaatgaccattaacgccagcgatctggcggcgaaagagaaagcgctgacggattttccgttaatggaggcagtgaaatcctctatccagacgttggataacagcgcggtcgaacaaatcgaaccggggcgcgccgctaacccggcaaacgtaaaacgcgttgaaagtattctgaaagaggccgactgggattatctgttcccgatgcgcgcgccggaatacacttactctaacttcctgaaagcgataggtaaattcccggcggtttgtggtacctacaccgatggacgcgatagcgacgctatctgccgtaaaaccctggctactatgtttgcgcattttgcccaggagacgggcggtcacgaaagctggcgtgacattccggaatggcgtcaggcgctggtctatctgcgcgaagtcggctga

SEQ ID NO: 377193 - DNA, 651 bp, Salmonella enterica
atgagcctgagtcccgcacggcagcatcgcctgcgcgttcaggctgaacaggccgcccgcgagggcggcagcgttcgccacgcatctggctatgacctgatgctgctgcaactggcggaagaccgccgccgtctcaagggcgttcagtccacggtcaaaaaagcggaaataaaggtggagctgctgccgaaatattccgcctgggcggagggcgtcctggctgccggaggcgctcaacaggatgacgtgctgatgtacgtgatgctgtggcgcattgatgccggagattatgccggggcgctggagatcgggcgtcatgccctgcgtcatggctgggtgatgccgctgggtaaccgcaatgtgcagaccgtgctggcagaggaaatggcagatgcagcgcagagcgcaatgcttgccgccaccggctttgatgccgatctgttgctgcagacgctggagctgacagacggtctggatatgccggaccagtcacgggcgcgtctgcataaagcgattggcgctgttctgagtgaaagcaatccggcttccgcccttaatcatctcaaccatgcgttacagctcgatccccgctgtggcgtgaaaaaagacaaacagcagctggagcgcagactgcgcaatgacagccgctga

SEQ ID NO: 377194 - DNA, 1059 bp, Salmonella enterica; identical to SEQ ID NO: 377160

SEQ ID NO: 377195 - DNA, 834 bp, Salmonella enterica; identical to SEQ ID NO: 377159

SEQ ID NO: 377196 - DNA, 429 bp, Salmonella enterica; identical to SEQ ID NO: 377165

SEQ ID NO: 377197 - DNA, 366 bp, Salmonella enterica
atgcgcactgacggcacggtgacgcagccgcgtttaaagcaggtcgtgctgacggcgatctctgaggttaacgctgagctgtacgacttccgcaaccgtcagcagatgctgggctggcggacacttgctgaggttcccgcagaaatgctggacggtaaaagcgagcgtatccggcactaccacaacgctgttttttgctgggcgcgcgctgtgcttaatgagcgttatcaggactatgacgccacggcgtcaggcgtgaagcgaggggaggagctggcggaggccagcggcgatctgtggcgtgatgcccgctgggccatcagccgggtgcaggatgcaccgcactgtacggtggagcttatctga

SEQ ID NO: 377198 - DNA, 369 bp, Salmonella enterica
atgatgcgcactgatggcacggtgacgcagccgcgtttaaagcaggttgcgctgtcggcaatttcggaggtcaacgcagagctgtatgagtttcgcagacgccagcagatgctggggtatgcctcgctggcagaagtcccggcggaacaactggacggcaaaagcgagcgcattcagcactatttcaacgcggtttactgctgggcacgcgccatgctcaacgaacgttaccaggactatgacgccacggcatccggtgtgaagcggggcgaagaactggcagaagccagcggtgatttgtggcgtgacgcccgctgggccatcagccgggtgcaggatgcgccgcactgcacagtggagcttatctga

SEQ ID NO: 377199 - DNA, 243 bp, Salmonella enterica
gtgacggataccgaggcacagcatagcgccgcagtagaagctgcagaagcacagcgccagtcgctgattgatgctgcaatggcttccatcagtctgattcaactgaaattacaggccgggcggaagctgacgcagccagaaaacacccgacttaacgctgtgctggattatattgacgcggtaacggcaacagataccagcacagcgccggacgtcatctggcctgaactgccggaggcgtag

SEQ ID NO: 377200 - DNA, 1167 bp, Salmonella enterica; identical to SEQ ID NO: 376679

SEQ ID NO: 377201 - DNA, 429 bp, Salmonella enterica; identical to SEQ ID NO: 377165

SEQ ID NO: 377202 - DNA, 462 bp, Salmonella enterica; identical to SEQ ID NO: 376681

SEQ ID NO: 377203 - DNA, 225 bp, Salmonella enterica; identical to SEQ ID NO: 376789

SEQ ID NO: 377204 - DNA, 834 bp, Salmonella enterica; identical to SEQ ID NO: 377159

SEQ ID NO: 377205 - DNA, 651 bp, Salmonella enterica; identical to SEQ ID NO: 377161

SEQ ID NO: 377206 - DNA, 495 bp, Salmonella enterica
atggaaatgaccaacgcgcaacgtctgattttgtctaaccagtacaaaatgatgacgatgctcgatcccaccaacgccgagcgttaccgtcgcttacaaacaattattgaacgcggctacggcctgcagatgcgcgagctggatcgcgagtttggcgagctgacggaagagacctgtcgtaccatcatcgatattatggagatgtaccatgcgctgcacgtctcctggaccaacctcaaagatacgcaagccatcgacgaacgtcgcgtcaccttcctggggtttgacgccgcgacggaagcgcgttacctcggctatgtccgttttatggtgaatatagaaggacgctacactcactttgacgccgggacgcacggctttaatgcccagacgccgatgtgggaaaaataccagcggatgttgaatgtctggcatgcctgcccgcgtcagtaccacctgagcgcgaatgaaatcaatcaaatcattaatgcctga

SEQ ID NO: 377207 - DNA, 1827 bp, Salmonella enterica
gtgaacggtgaattgatttgggttctctctttactggcgattgccgtcgtgttgtttgcgacgggcaaagtacgtatggatgcggtggctttattcgtcattgttgcttttgtccttagcggtaccttgaccctttcggaagccttctccggctttagcgatccgaatgtcattcttatcgccgccttatttattattggcgacggcctcgtgcgcaccggcgttgcgacggtggtcggtacctggctggttaaaatggcgggcagcagtgaaatcaagatgctggttttactgatgatcaccgtcgccggacttggtgctttcatgagttcaaccggcgtggtggcgatttttatccccgttgttcttagcgtttctatgcatatgcagacctcgccttcgcgcctgatgatgccgctgagttttgccgggcttatcagcggaatgatgacgctggtggcgacgccgccgaacctggtggttaacagtgaactgctgcgtgaaggcctgcacgggttcaacttttttagcgtgacgccgctgggggtagtggtgttggcgctcggcattgtttatatgctggtgatgcgcttcatgctaaaaggcgatgcgcccggacaacaggccggtaagcgtcgcactttccgcgatcttatccgcgagtaccgtctgacggggcgcgcgcgtcgtctggcgattcgccccggttcgccgatggtgggacagcggctggacgaccttaaactgcgcgaacgttacggcgccaatgtcatcggcgttgaacgctggcggcgctttcggcgggttatcgtcaatgtgaacggcgtatcggagtttcgcgctcgcgacgttctgctgattgatatgtcggcggcggaggttgacctcagagagttctgcgccgagcaactgctggaaccgatggtattgcgtggagaatatttttccgatcaggcgttggatgttggcatggcggaaatttcgcttattccgaagtctgaactgataggcaagtcggtgcgtgaaatcgccttccgtacacgttacgggctgaatgtggtcggcctgaaacgcgacggcgtcgcgctggaagggtcgctggccgatgaaccgttattgatgggcgatatcattctggtcgtggggaactggaagttaatcagcctgctggggcaaaaaggccgcgactttgtggtgctgaatatgccggtcgaggtcagcgaagcctcgccggcgcacagccaggcgccgcacgccattttctgcctggtactgatggtggcgctgatgttgaccgatgaaattcccaatccgagcgcggcgattatcgcctgcctgctgatggggaaatttcgctgtattgatgctgaaagcgcgtataaagcgatccactggccgagtattatcttgattgtgggtatgatgccgtttgcgctggcgttgcaaaaaaccggcggcgtctctctggtcgtgcaagggttaatggatatcggcggcggctatgggccgtatatgatgctgggatgcctgttcgtgctgtgcgccgtcataggactgttcatttctaacacggcaacggcggtgctgatggcgccgattgcgctggcggcggcgaaatcgatgggggtgtcgccctatccgtttgcgatggcagtagcgatggcggcatccgccgcctttatgacgccggtttcatcgccggtcaatactctggttctggggccgggaaactatagctttagcgattttgtgaagcttggcgtgccgttcacgcttattgtgatggcggtttgtattgtgatgattccgatgttgtttccgttttaa

SEQ ID NO: 377208 - DNA, 450 bp, Salmonella enterica
  misc_feature (401)..(410): n is a, c, g, or t
atgaacgtagttaataatagccgtgatgttattcattcatcaggtattgtgtttggaacgagtggggctcgcggtcttgtaaaagattttacacctcaggtatgtgctgcttttacggtttcatttgttgccgttatgcaggaacatttttcctttgataccgtagcattggcaatagataatcgtccaagtagttatgggatggctcaggcgtgtgctgctgcattggcagataaaggcgttaactgtattttttatggtgtggtaccaaccccggctttggcctttcagtctatgtctgacaatatgcctgcgataatggttacgggaagtcatattccattcgagcggaacggcctcaagttttatcgtcctgatggtgaaatcacgaaacatgatgnnnnnnnnnngctgcgatccttagtgttgaagatacgtgcagccatttag

SEQ ID NO: 377209 - DNA, 939 bp, Salmonella enterica
atgataaatgcaaatcgtccgataattaacctcgatctcgatctgctgagaacgttcgtggccgttgccgatctgaacaccttcgccgcggcggcggcggcggtatgtcgtactcagtctgcggtcagtcagcaaatgcagcgtcttgagcaactcgtgggaaaggaattgttcgcccgccatggtcgtaacaaacttttgagcgaacacggtatccagcttctggggtacgccagaaaaatcctgcgttttaatgatgaggcgtgttcatcattaatgttcagtaatcttcagggagtgttaacaatcggcgcttctgatgaatcagctgatactatcctgccttttttgcttagccgaatcagctcggtttatccgaaactcgcgcttgatgtacgggtaaaacgcaacgcctatatggtggacatggttaaatcgcaggaagtagatttggtggtgacgactaaccaacctcattcgctggactgtctgaatttgcggacctcgcccacccattggtattgtgcggctgagtatgttttgcaaaggggagagcccgtaccattagtcctgctggacgatcccagcccattccgcgatatggtgctggagacgctaaatgcagcgggtattccctggcggctggcctatgtggcctctacattactggcggtacgcgcggccgttaaagccggtcttggcgtaacggctcgacctgtcgaaatgatgagtcccgaccttcgcgtgctgggcgccgcagatggattaccgcctttgctggatacggaatatatgttgtgccgcgatcccaatagccagaacgagctggcgatggtgattttccatgcgatggaaagctatcaaaacccatggcattacaaccagttttctgcagagggcggagatgatccgctgatggtggaagggggttttgagtag

SEQ ID NO: 377210 - DNA, 264 bp, Salmonella enterica
atgaagtcatctcatttttgtaaactggcagtaactgcatctttagttatgggaattgtctccggcgctcaagccgcgggtagcaacacagcaaaggttactttccttggtaatattgttgattccccctgctctgtcacattggatacggaagatcaaacagtcaatatgggctcaagtatcggtaatggcacgctgagtaatggtaaaacgaccatcaacaatgcccgtacctttcatatcgatcttgagggttgtacctag

SEQ ID NO: 377211 - DNA, 528 bp, Salmonella enterica
atgattacacattctttcggcatcgttaattattttgtattatttggctacctcctggccatgatgttagtcggtgtctatttttccagacggcaaaaaacagcagacgattattttcgcggtggtggccgggttcctggttgggcggctggggtcagtgtatttgctactacgttaagctcaattacatttatgtcaattcctgccaaagcgtttacttccgactggacgtttatcattggtcagtatctggctatcgcaattttaccgctggttttttatttctatattccgttttttcggaaattgaaagtcacatcagcctatgaatatctcgaagcacggttcgatgtgcgctgccgtctgttcgccagcatgtcatttatgttgtttcatattggacgtatcgccattatcactttcctcaccgtgctggccttgcgccccttcatcgctatagacccggtgattttggtactgttgattagtgtgatgtgtatcatttatacctggatgggggggaattga

SEQ ID NO: 377212 - DNA, 2136 bp, Salmonella enterica
ttgattcgtctgggtgacgatgcaaccatcgaaacctccggcgcatcctcaacggggatttacgcagcatcctcctccagaaccgagcttagcaacaacactactattacggtgaacggtgccagcgcacacgcggtatatgcaactaacgctaccgttaatttgggagagaatgccactattagcgttaacagcgccagtaaggctgcatcctatagtaaagcccctgccggtttatacgccctctcccgaggcgccattaatctggcaggcggtgcggctattactatggcgggcgataacagtagcgaaagttacgccatcagcacggaaactggcggcattgttgacggttcttcaggaggtcgtttcgtcatcgacggtgatattcgtgctgctggcgccaccgctgccagcggtacgctaccgcagcagaacagtacgattaagctcaatatgacggacaactcgcgatgggacggggcgtcgtacatcaccagcgctacggcgggcacaggcgttatctctgtacaaatgagcgatgcgacctggaatatgaccagcagctcaacgctcactgacctgacgctgaatagtggcgcaatcattaacttcagccatgaagatggcgaaccatggcaaacgctcaccatcaatgaagattatgtaggcaacggcggtaagctggtctttaatactgtgctcaacgatgatgattccgaaacggacaggctgcaggttctcggcaatacttcaggcaacacatttgttgcagtaaataatattggaggagccggggctcaaaccgttgaaggtattgaaattgttaacgttgctggcaattccaacggtactttcgaaaaagcaagtcgtattgttgccggagcctatgactacaacgtggtgcagaaaggtaaaaactggtatctgaccagctacattgagccggacgaaccgattattcctgatccggtagaccctgttattcctgaccctgtcattcccgatccggtagaccctgatccagtagacccggttatccctgaccctgttattcccgatccggtggaccctgatccagtagaccctgatccagtagacccggtcatccctgatccggtcattcctgacataggacaatctgacacaccgccgataacagaacatcagttccgtccggaagtgggcagctatcttgccaacaactatgcggcaaatacgctgttcatgacgcgtctccatgaccgtctgggtgaaacccagtacaccgacatgctgacgggtgagaagaaggtcaccagcctgtggatgcgtaacgtcggcgcccatactcgcttcaacgatggcagcgggcagctaaaaacccgcatcaacagctatgtgttacaactgggaggcgatctggcacagtggagcactgacagtcttgaccgttggcatattggtgcaatggcaggttatgccaacagccagaaccgcacgcagtcgtccgtgagtgactatcattcccgtggtcaagtcaccggttacagcgtcggcctttacggcacctggtatgctaacaatatcgatcggtctggggcttatgtggatacctggatgctgtacaactggtttgataacaaggtcatgggtcaggatcaggccgctgagaaatataaatccaaaggaattaccgcctcggttgaagccggttacagtttcaggttaggtgaaagcgcgcatcaaagctactggttgcagcccaaagcgcaggtggtatggatgggcgtgcaggctaacgaccatcgcgaagccaatggtaccctcgtcaaggatgataccgccggtaatctgctaacccgcatgggcgtaaaagcctatattaacggccacaatgctattgatgacaataaatctcgagagttccagccattcgtggaagcgaactggatccataatacgcagcctgccagcgtgaagatggacgatgtcagcagcgatatgcgtggtacgaaaaatattggtgaactgaaagtgggtattgaaggacaaattaccccgcgcctgaacgtatggggtaacgtggcgcaacaggtaggtgaccagggctatagtaatacccaaggcctactgggggttaaatacagtttctga

SEQ ID NO: 377213 - DNA, 966 bp, Salmonella enterica
atggcaaatctacccgaaaccccgcagtgggaaagcggcatctaccagattgaggtctctgaccccgttctgggcggacctgacggaatttctaaccgccaggctaaacaactggccagccgaacgtcatacctcaaacagaaggtcgaaaaaagcggaacagacctggctgcacatatcgcggcagttgacccgcatacccagtacgcgacgaaagccagtccgacattcaccggcacaccaacagcacctacacctgcaaatggtgataacagcaaaaagctggcgacgacggagtttgtggccaaagcacttgcggcacttgcaggcagcgcccctgagacactggatacgcttaaagagctggctgacgctctcggtaatgatccaaactttgcgactacggtactgaacaagctggcggaaaagctggctaaagaccagaacggcgcagatattcctgagcctgcgctgtttgtcaaaaaccttggtttgggggaaggctctgcactgcccgttggtgtgcctgttccgtggccctcagccacaccgccagcagggtggctgaaatgtaacggagcagcattttcttctgaaatgtaccccaatctggcaaaggcttaccccgcgaataaattaccggatttacggggtgagtttattcgtggctgggatgacgagcgcgggattgatcctggtcgccagttgcttgagtggcagaaaggtactttggttggtggtagagatgacaatgatgccgcagttgatatttcatatatgagtaacggaaatagtattgattacggtggcgataaaacattttcaacgaattaccggagtgattatttatggtatgcaattctgggtaacgtcactggtcgtgccaaagctgctttaagtgggtccttttttaatgtaactcgtccacgcaacatcgcctttaactacattgtgagagcaacatag

SEQ ID NO: 377214 - DNA, 252 bp, Salmonella enterica
atggtgcgaaggattcgcattctggttttgctattagtgtctggagtatcagttgcggcttccggcgcaggtaactctgtacctgcaaacgatgaaagccactcctccctgcctgatttagccagcgaatccgcgaaaaaagaagaacaggaaaataaaggaaagtcctttaaagaacagggcgctgactactttattaattccgccacccagggctttgataatctcaccccggaagcgctggaatcctag

SEQ ID NO: 377215 - DNA, 1506 bp, Salmonella enterica
atgctgttaacgccgattgcgccgccagcggatgctaaagtatttgcctaccattattccggggagcagctctggtactggtacggcactacggatgagagcggcagggtgcagtttgagctgacgcaggataatacccccggcctgaaaacagcgctgcaggcgatgctgtccgacaatccgccgaccgtcagcaatatggatgtcatttttaccgtcattaccagcccggacagcgataaagccaaaatgtggggccatatgccggaaacggcggccaacagcgcgggggtgaaattccaccgcccgctgctggctgcggagatgacgtcgaatagcggcacctactattacaataacgaaacatggcctctggtgactatcgcgaacacccagaaagcgggcgcgaccacctgtgatgctgcatatcagccgttgtttaatgacctgcaaacgctgtatagcgaccatccagacagcgctctcaatacggcattcggctggccggtaggggcgggtaaaagctggctggcggtggaccaggagcctggaaccgggtattaccagtatctgcggctggataccggcgccaaaggccacaccagttccacgagcgtgtctggcgcgcaggtgtgtctggtcgagccgcatacgtctactcctgccaatattacgctgacctcgacggcgatggacagcgcgaaaaacgcggcggtagtggagaagggaagcgcgatgccgttaacggtgacggtaaaagatagcagcggtaacccggtcgccaacgtcggttttacgttgtcacgtggcgattcgaaaaatcgggcaggtacggtggtaacggatggcgacgtggcagcggatgccggagcagatgatctcatgcttaaagagctgactcccgcaagcgccagccgaagtatgaccaccaccgggattgtctttaccggcactaccggcagcgacggtacggcaacgtttacgcttaatcaggataaaagtctggggttaaaaacgccactcacggtgaaactgacggacaatacggctcttcacgcctcactggatgtgatttttatggtacttaccagcccggatacggataaagcgttgttctggggaaatatgtcggatacgacatccgtcaacggaaaaacgctgcatcgtccgtggctgcaggctgagctaccgtcaggcgtgacgccagtatttaccaacggagttcatgcaaataacgagtactgggcgatgacgcatacggtggacaacactaaatgggatattgctaaacagtgcggtagcctgagcaaagcaccggataataacgacctgttgacgctgtatcattcaattagctcgttaggctggccgacgctgggctatccctatttatctaaatcaacctcgggcggcggcatgtattgcggcgtggatgagaatactaagcagcaaaactgcgccattcagccggcaagtacagcaggttatgcgacgtgcgtggagtaa

SEQ ID NO: 377216 - DNA, 753 bp, Salmonella enterica; identical to SEQ ID NO: 376830

SEQ ID NO: 377217 - DNA, 585 bp, Salmonella enterica
atgcctatcagagtattagaatctatctcatcacttgatgcagtattcataaattgtggaacatcactgccaccaaatacgagtttatatgcatatactaaacaaaaagcaaatgaactcgccgccgccattatagataaagtttgcggtaaatatatagagttaaaattggagcatttctatggagcttttgatggagacgataagtttaccagtatggttattagacgttgtttaagtaaccagccagtaaagttaacatctggtttgcaacagagagatttcttgtatataaaagatctactaacagcgttcgattgtattataagtaatgttaataatttccccaaatttcatagtattgaagttggtagtggagaggcgatatcaattcgtgaatatgtagatactgttaaaaatatcacaaaaagcaattctataattgaatttggcgtggtcaaagaaagagtaaatgaattgatgtatagttgtgctgatatagcagaacttgaaaaaataggatggaaaagagagttctctcttgttgatgcattaactgaaataattgaagaggaagggaaatga

SEQ ID NO: 377218 - DNA, 426 bp, Salmonella enterica
atgtattttttacttcaaaaagtaattttaccaaacattgatctatgcacggaagagcagctttatttcagaactcagggcgggaagtataactatacctcacgtaacttacttgttccgcgtcataaggttgcatattttgatactttttttaatgcattctcaattaagaaatggaaaaaatatacaaccttaacatcactttttttgcgggttaatataattggtcgcggaactataactgtaaggcataaagagaatggtgtcattagagtattaaagcaaattgattttaaatcgtcatgtaatattagtgatgagattgagattgagattgagattgagattgatatatcaaaaataaattttggatatatctatgtggagtggcaatcagacgaagactctgttttaaatggattttaa

SEQ ID NO: 377219 - DNA, 402 bp, Salmonella enterica
atgctatgttttctgggaggatcgtcaggttatgcgaattcagaaaagaacatttctaaagaacttcttagtgagtataaaaatttttcacttgctgagtgtattgaaaaaaattatgaaaaaatgggcgttgtttttactaagctacctttaaaagataatacaagaggatttatcgatttggatatggggcttgctttttatcgggataaagataatgttttagcttcatttatagaaaataaaacgggtgatttttataagcccaggcaggcttatggtgatttggcatcggtaaacatggttatatatgactgtatcgatttttatcattcaaaagaattgaatatatttttacgtaaaataatttctgaaagaaacattagaaatgagaatgattaa

SEQ ID NO: 377220 - DNA, 198 bp, Salmonella enterica
atgaaggcgttgtccgacatcggccttgaactatcgattaccggcggcattaccccagcggatctgccgctgttccgcgacattaacgttaaggcatttatcgccggacgtgcgctggcaggtgccgcccatccggcgcaggtcgccgccgaattccacgcccaaattgacgccatttggggagaaaagcatgcgtaa

SEQ ID NO: 377221 - DNA, 1278 bp, Salmonella enterica
atggccgtggtgatatttctctgctgcctgctcggcgggatcgcgataggtttacccatcgcctggtcgctgctgctttgcggcgctgctctgatggcatacctggatatgtttgacgtgcagattatggcgcaaaccctggttaacggcgcggacagtttctccctactggccattcccttttttgttttggccggtgaaatcatgaacgcgggcggcctgtcaaagcgaattgtcgacctgccgatgaagctggtcggccataagcccggcggcctgggctacgtgggcgttattgcggcaatgattatggccagcctttccggctctgcggtagcagataccgctgcggtcgccgcgctgctggtgccgatgatgcgctccgcaaactacccgatcaaccgctccgttgggttaatcgcttccggcgggatcattgcgccaattattcccccctcgattccttttattatcttcggcgtttccagcggcttgtcgatcagcaagctgtttatggccgggatcgcaccgggcatcatgatgggcgcggcgcttatgctcacctggtggtggcaggccgggcgattaaatctcccttctcagcctaaagcaacaccgcgtgaaatctggtattcattggtttcaggtatctgggcgctgtttttaccggtgattatcatcggcggcttccgttccggacttttcacgccaacggaggcaggggcggtcgccgcgttttacgccctctttgtcgccgtggttatctatcgggaattaacgttttccagtctctaccacgtgctggtcaatgccgccaaaacgacgtcagtcgtcatgtttctggtggccgcggcccaggtatccgcctggctgattacgatcgcggaattacccatgatagtgtcagatttgctgcagccgctggtcgactctccgcgactcttatttatcgtcattatgatctcaattatggtcgtcggtatggtgatggatttgacgccaacggtgttaattcttacccctgtattattgccattagttaaagaagccaatattgacccgatttatttcggcgtcatgttcattattaactgctctattggattaatcacaccgcccgttggcaacgtcctcaacgttatttccggggtagcaaaattgaaatttgatgacgcggtaagaggcgtattcccttacgttgtcgtactgatgtcgctgctggttttatttatttttattcccgagctaattatcacaccgcttaaatggattaattaa

SEQ ID NO: 377222 - DNA, 2424 bp, Salmonella enterica
atgaatcggttagccagttacatcaaaccgcatgctcagaggacggcatttacgaaggcctggctggctgaaacagaacagcatctgcgaaatatcacccggccggaaggtttgttcactgattcacttgtcaccggggttccctggcggggacaaaatcgttccgtcaggatggtggtatatcgatacctgccagcgaattacaaagatgattcgccggttgccgctctcaaccaggtttgtgagcgcctgacttcagccttatctgcagccggcgttctgagtgtccgacagaatggcgagcagatacatcgatggttgttacgtcacttcaatcctgagcccgactggatagacaaagatacgctttaccgggaggctcgttattatgatgatgcacctgattcattgcctcttggcaatgatttcactgagacgttgtggtttaaccctccacgttctgatacccgaaatggtgtgtggtggtttgataatgtggcgcatcgtgccgttcctgttgaaacattacgtcgccctccgggacccggtcatctgacgggggaggttaagcgtggcgacaatattaatactctgatggatttattgcctgagggcacaatggtatcgctcactattgtggcgcaggctcaggacacgctggaagccgggtttgacacgctgggtaaaaatgcaatagggcagaacacggaatccaggcggacccgtagtgatgtggagcaggtgaagagtttgctgggcatgcgtcacaaactttatcgtgcatcgataacttttttgatgcgtgcacctgatgtcagtgagctgaataaaaaaatacagcaacttaccgctacattgctgactgcggggctccagcccacgaaacctgaatacgaagtggcgcccctgaatgactatttgcgagcgcttcctatgtgttttaacccgcaactggataaaaaaaactggtatacccgcctgacctgggttcagcatctggctggattgcttcccgtgaccggtcgcagccagggaaccggacaccccgggtttagtttttttaaccgtggcggagaactgttgtcttttgatcccttaaatagtctggacagaacgcagaatgctcacctgttgctttttggtccgaccggggcgggtaaatcagccaccttatgtagtgcgttatcacagttaatggccgttcatcgtccacgcctctttattgccgaagccggcaacagttttggtttgctggcggagtatttccgggggctgggactgagcgtaaatgtactgagtatcaaacctggctgcggtatttctttaccgatgtttgctgatgctcattccttaatgcgagtagatccaaagaaaaacgtggtttctgaggaagctctacctgagctggagccagccaataccgacagcgcagaagatgaaagtgaagagcgtgacattcttggcgaaatggaaattgcagcccggatgatgatcaccggtggcgagaagcgggaggaggaacgtcttacccgggctgaccgcggtcttattcgtgaagctatcatgatggcggcggagaaaacatatcaggacggacatcagatgctggctgaggatttacaggctgccctgtggaatatctcacgtgataattccattggtgcaaatggcgagcctatgcggaatcagtcccgtcgcgatcgtgctgctgagatggcagaagccatggccatgttcactcagggatttgagggagagttattcaaccgtccgggaacaccatggccagaggctgatgtcacactgatcgatttaggtcatctggcacgtgaaggctatggtgcacaaatggcgctggcgatagtctctttaattaacacgattaacaatatcgccgaacgtgaccagggaacagcccgggatattgtggccgtatttgatgaagcccatatttccacgacgaatcctttgttgtcgccctatatgaccaaggttgtgaaaatgtggcgaaaactgggggcatggctgtggctggcgacacagaacctcgaggattttcctgatattgcgcagaaaatgctgaacatggctgaatggtggttgtgcctggttatgcctcccgatgaggtggagcagattgcccgtttcaaaaccctcagcgaggagcaaaaagttattttgcgatcagccagtaagctcaaaaactgttataccgagggcgtcgttttatcaaagcaggttgaggcactgttccgggttgtgcctcccagtctgtatctcgccctggggatgactgaaaaagaggaaaaagcggaacgtcagcggctgatgcgagagtatcagtgcagtgagcttgaggcagcgatccgggtggcccgcaggctggatgaggcacggggtttttgtccacaaaaagcggcctga

SEQ ID NO: 377223 - DNA, 1173 bp, Salmonella enterica
atggctcaggattaccaccacggggtgcgcgttgttgaaatcaacgagggcacccgacctattaccacggtgagcactgccatcgtgggcatggtctgcaccggcgatgatgctgatgcgtccgtgttccccatcaataagcctgtcctgctgactgatgtgctcaccgccagcggtaaagcgggggagtccggcacgctggcccgctcgctggacgcgattgcagatcaggcaaaacccgtgactgtcgttgtgcgtgtggcgcagggcgaaaccgaagcggaaaccacctccaatattatcggcggcgtaacttccgacggtaagaaaacgggcatgaaagcgctactgtcggcgcagtcgcagctcggtgtcaagccgcgcattcttggggtgccgggacatgacactcaggccgttgctactgaactgctgggcgtggcgcaaagcttgcgcgggtttgcctaccttgctgctaatggctgcaaaacggtggaggaagctattgcctatcgcgagaatttcagtcagcgcgagggaatgctgatctggcctgacttcatcaactttgacaccgtgctgaaagcagacgcgacggcttacgcctccgcccgtgcgctcggcctgcgtgccaaaatcgacgagcagatcggctggcataaaaccctgtccaatgtgggtgtgaacggtgtcaccggcatttccgctgatgtgttctgggatctgcaggacccggcaaccgatgcgggactgctgaacaaaaatgacgtcaccacattgatccgcaaagacggcttccgcttctgggggtcccgttgtctcagtgacgatccgctgtttgcctttgagaactacacccgcacggcgcaggtgctggctgacactatggcggaggcgcacatgtgggcggtggatggcgtgcttaatccgtcgctggcccgcgacattattgaaggactacgcgccaagatgcgcagtctggtcaaccagggatacctgattggtggtgactgctggctggatgagtctgttaacgataaagacacccttaaagccgggaaactgaccatcgattatgactacacgccggtgcctccgcttgaaaacctgatgctgcgccagcgcatcaccgatcgttacctggtcgattttgccagccgtgtcgctgcataa

SEQ ID NO: 377224 - DNA, 1620 bp, Salmonella enterica
atgagcgcaaaattttataccctgctgacggagatcggcgcggcgaaactggcaagcgccaccgcgctcggtatcccgctgaaaattacccatatggcggtgggcgacggtggcggtgtgctgcccacacccagcgcacaacagaccgcgttagttgctgagaggcgccgcgcagcgctgaatatgttgtatatcgacccgcagaacaacagccagattattgctgagcaggtaatcccggaaactgagggcgggtggtggattcgtgaagttggcctgtttgatgaaaccggtgcgctgatcgctgtgggtaactgccctgagagctacaagccgcagctgacagaagggagcggacgtacgcagaccgtgcgcatggtactgattaccagcagcaccgataacatcaccctgaaaattgaccctgcagtagtgctggcaacccgtaaatatgtagatgataaggcgctggagctgaaggtatatgtagacgacctgatggcaaagcatcttgctgcgccggacccgcattcacagtatgcgcagaaggacagcccgacactcacagggattccaaaggtaccgacgccagcggcgggtaacagcactaaacagattgcgaacacggaatttgtggcatcgtctattgcggcaatggtggattctgcgcctgcagcactggatacgctgaacgagctggcagcggctctggggaatgacccgaattttgccacaacgatgttaaacgctcttggtggaaagcagccgctggacaatacgctgacgaatttaagcggaaaagatgtcgccggccttctcgcatacttcggtttaggagaaacgataaatcgtgccgccgatgcgctacaaaaatcacagaacggtgcagacattcctgacaagccgcggtttgtacaaaatatcggtttaaaagaaaccctgaacccgacaaaacgcgtgagtataggcaatatcggaaccggcgtttttgacggcagcacaccgtgtataaatatcggtgacagtgacagtggatttatcggcagcgcggatggcgtactggatatttactgtaacggtgccaaagtgggttatatcaatggtaacggattacacatgctcactgatattcatttcgataatgcgagcatgaccactaatggtgacatttttagttcagtgtggggggataactggctgagtatctggattactaatcagctaaatacccgtggaacgattgactggatcaatagtgaactggcaattcgtgacaacaacatcaacacccgcgccaccattgattatgttaaccagactttcgcccgtaaaaataccggcagcattcaggactggggctggattctggacgacagcaccggatttataatgcagtggggaacacttggtaactcaaacggaacctacaatttcccgcgcgctttccctgttggttgctttgccgtttttgtaaccaataccaacgctcagggcacccaggtggataacgcattcggatacccggtgagcaacagtcagttttttgccgccaccaagtcatcaggaatggccaatctggtcaataattttcctgtagcctggtttgcgattgggagataa

SEQ ID NO: 377225 - DNA, 147 bp, Salmonella enterica; identical to SEQ ID NO: 376695

SEQ ID NO: 377226 - DNA, 1116 bp, Salmonella enterica
atgccggataacccggtaaaagccaaaatttcggtgatgaactgggtgcaggccgcagacgacgccagcaaagtgacgccggatatggggctgaaagatgccgataagctggacagtaacatccgtattctgttctcgctggccgggaactatctggcgaatcagaaccccgatctgcaccaggcggtacgcgtactggaggatgaatcaaagatccagtttattgtcgccagcgatctgtttatgacgccgagcgcgaaatacgccgatctactgctgccggaaaccagctttatggaacgttggaacatcggtgaaacttggggcacggcaagctacctgatactctctgaaaaactgatcgagcctgaatttgagcgtcgctccgactacgactggctacgtgaggtggcggcgaaattaggcattgagaatgaatttagccaggggcgcgatgagaaagcgtggattgaacacatctgggaacagacgcgcctggcgatgccggacgaaaatctgccggattttgccacactgcaaaagacccgtcagcatctgttcaaaagcgcgccatttatcgcctttgaagacaatattcgcgatccggacaatcatccgttcccgacgccgtcagggaaaatagagatcttctcgaagcgcctgtacgacatgcagcatccggaaatcccggcgttgtcgcactacgttcccgcgcatgaaggcccggaggatgcgctggtgaaagattttccgctccagttaattacgtggaaaggaaaaaaccgcgccaactcaacgcaatacgctaacccgtggctgattgaagtgcagcagcagacattgtggatcaacccgcaggatgcgcaaacgcgcggcattacgcatggcgacatggtgcgcattcataactcacgcggaatttgcgaaatcccggcggaagtgacgccgcgcattattcccggcgttgtcgcgatgcaggctggcgcctggtggcagccggatgagaacggtattgataaaggcggctgcgcgaacgtcctcagctcggcccgtattaccgccctggcgaagggaaattcacatcaaaccatgctggtggaggtggcaaaagcatga

SEQ ID NO: 377227 - DNA, 198 bp, Salmonella enterica
atgcatgagttaccgctgctgatttttacgctctgtttgcaagggtccgtgggcgtgactctgtggctggcgctgggccgtcagtacgccgtagagggacgcgtacctgcgcgcggcgcgcttcccgcgatggcggggcgtttgtactggcctgcgtggggctgcttgcttcagcgctgcacatgggctatcccctga

SEQ ID NO: 377228 - DNA, 2538 bp, Salmonella enterica; identical to SEQ ID NO: 376872

SEQ ID NO: 377229 - DNA, 2547 bp, Salmonella enterica
ttgcacggcgttacggcagaaaaactgcgggataaaacgcaggaggctattgccgtcttacagacacgctggctggggatcttccgcgatctcgtgaaacaggaaagtgaatcgcagcccaatacgccgtaccgcaggcgactggaactggagaaaaaacggcattgtggtgaatacctgttacgcgatctggcggcccgaactttcctacccggatatggcttcccaacggatgttgtcacttttgataacttcaccatggaagattatatccgcgagaaaacgcacaaaagccgtgataagaatgaccgggaggataacgtttcgcgttataaagggctgccttcgcgcaacctttccgttgcgatccgtgagtatgcgccgggcgcggagattatccttgatggtcgggtattccgctcggccggtgtttcgctgcactggcataaccttaacgccgatactaacgaagcccagcgtctggacagcgcctggcgttgccataaatgcggtactttaggctatgaggaaggtattggtggctcgggggatttattctgtaccaatagcgcgtgcggggagcggatcacgctggataaccgacgtcaggtattacagcccgccggttttgtcaccgatgcccatactcccgttacgaacaacattgaaacaatgaaattcatcccggtggtgcctgcctgggtgtttgtgaaagcagaacgcgtgccactgccaaacccgctgatgggttttatggcgtcaggcgcggatggtcatgttttccagcagagcatgggcgaaggtggacacggttatgcgctgtgcctgagctgcggccgggcggagtcaatgctcaatgccaccgatacgccgaaatcgatggaagcgcattatcctccgcgccccggtaaatctgatcgcgacagccagaatcagcggattatctgccctggctccacggcgctgaataagaatgtcacgctgggtgcgctggcgcgcaccgatgtgtttgaactcattttgcgccgtccgcaaaacggggagtatatccccgataattctgatgaaggccgtattgtggccatgacgctggcggttgcactacgtcgagcgctggccagcgtgctgggggtatcggcgacagaactgggctatgcggtgcgtccggtcagactggataatgagcaatcggtcctggcggtgcagctttacgacattatcagcggcggtgcggggtttgcttccagtgcgccattgcatattgaagcggtcctcaaagggatggtgaaacagctgggatgccgccactgtgataccgcctgtagcgaatgtctgctcgattcgcagacccgccacgatcacgatcagctggatcgtaaagccgcgcaggcctggctgggggaggatttcagtcactatatcggtttgccggaggcggaaaaattctccctggccgacgcgcagtattgcccaggcagcattgaggatgctatccgtcgtgccattaacgacggggcgcgcaaactcacgttgtggatgaatgggccgcttaacgagtgggatttgtatgcccgccagttccgaacggcgatccagaactatcggctgaaagatgaggttgaggttacgctggttgtgcccggtcatattgaagatccggagcttttacaggagattgcgcagtttgccgccattggtatgcagctttgccagtctgagctgaatacggatacgccggttgtcgcacaggtagcattcaacgatcgcctgatgatgttgatttctcgcagcccagaggccaccatccccggcccgaactggcatctgaatagccagatggttattcgcagccatgcgtttgagccgataacgcttagtaaagcagagctattatccgatgccgcaggtagcagaggcctggtcaacgatattgagatccataagcagcttaatggcccggtttctcaatttggtcagcgtttctggggcgtgttaaccggggcgcaggaagatattcagacgctgctgaaggaaaaccaggtgacgcgcattcactatagcgatcgttatctgcaaaacccggtggcgctggcgttattaggcgggctgttaaaaccgctgaaatcgatcctggcgcaggatgcgcaagtgacgattgatacgctgtttaagagtaaagagcggccaggcaacaagccgttccatgactggatgagtgaagcggattttcaggattttgccgaccagtggtttgcggcatctatgggcagagccgtcgtggttaacaccgttggctcgccgcgtgatattccacaccatcgtaaactgatggtgaccttcagtaatggtcaggcgctgaagatccgttttgaccaagggatgggatactggcgcatcgtctttgcgcgagcgtatcgcgattttgattttaacgatgatgtggctttccagctcgggaatatggcaaaagcctgcgttgaaggtcaggtggtcaacagcgaggaaagttgggcaaccgatgtgctggtgcaggtgatagtcccttaa

SEQ ID NO: 377230 - DNA, 798 bp, Salmonella enterica; identical to SEQ ID NO: 77520

SEQ ID NO: 377231 - DNA, 834 bp, Salmonella enterica
atgcaaacagaagctgaagtcttaactgaccataatgagataatttgctcaaccagtatcgaacgcatcgtcacaggacgtgatgctgcgctgagcctgatggaaatcctgaaccataagcttgatgatatctcacggctaacctccagcatcggtggtgatgtggcggagcattgggcgatgcgagagggccattcctttgactgctggctgatgcaaccagtagataaagcgatgccggtgattacccgcaatatcgatcgcagtatctggcgcgatctcatgctgaagtccgggatgttgaccttgatggatgccgaagcccgcagccagtgggctaaaaacctcgaagagggcgatcttccggccatcagtgaagccaacatcctgagtacctttgaacaactccaccacaataaacaggatgttttcgaacgtgggattatcaacgtattcaaaggactaagctgggactataaaaccaacaatccctgctgtttcggcaagaagatcatcatcaacaatctggtgaagcacgaccgatggggctacagcctgaactggggctggcggcgcgatcagttagctgatctggaacggatgctctacttgctggatggtaaaaccattcccgataaccggcatgatgtctccatccggtttatggattttgtgcgcgacaatccgtatcagcagattttcgaagatgagttgttcactattcgataccttcagaagggcagtggacatatcacgtttaaacgccttgatctggtggagaagataaatgacatcgtggcgaagcactttccggggatgttccctgctaaatga

SEQ ID NO: 377232 - DNA, 342 bp, Salmonella enterica; identical to SEQ ID NO: 77517

SEQ ID NO: 377233 - DNA, 366 bp, Salmonella enterica; identical to SEQ ID NO: 77516

SEQ ID NO: 377234 - DNA, 222 bp, Salmonella enterica; identical to SEQ ID NO: 77515

SEQ ID NO: 377235 - DNA, 480 bp, Salmonella enterica; identical to SEQ ID NO: 77514

SEQ ID NO: 377236 - DNA, 477 bp, Salmonella enterica; identical to SEQ ID NO: 77513

SEQ ID NO: 377237 - DNA, 264 bp, Salmonella enterica
atgcagtgtattcctggcggcgtgattcaggtttcgccacatccgttctccctgatcagtgagcaaagctgccgctacatctctgatgacgacctgtgcgcctggtgctctcaccttctttatcgtcccggtgaactcagccagtgcggcataagtatccctgaggggcactggccttcacgctgtgatgatgatggctatgtgcagttctgtccgtcactttgtcacaacaacccacatgaaaatacaaaggaaatcaaatga

SEQ ID NO: 377238 - DNA, 819 bp, Salmonella enterica
atgcgcttagccagccgttttggtgcggccagtctcgtacgccgcgaccgcccactgacccgtgatgaactggcacactatgtgcccagcgtattcagtgaagaaaagcacgaatcacgctcagaacgttatacgtatatcccgaccatcacactgcttgataatctgcagcgggaaggcttccagccgttctttgcctgccagacccgcgttcgcgacctgaataaacgcgaccacacaaagcacatgctgcgtctgcggcgtgaggggcaaatcaccggcaaacaggtccccgaaatcatcctgcttaacagccacgacggctccagctcataccagatgctgccgggcctgtttcgctttgtctgccagaacggacttgtctgtggcgaaacctttggtgaggttcgcgtaccgcacaaggggaatgtggtggataaagtcattgaaggggcttatgaggtgctggggatatttgaccgggtggaggagaagcgggatgccatgcagtcactgctacttcctccgccggcacaacaggcgtttgccagagccgccctgacgtaccgctttggggaagagcaccagccggtgacggaagcacagattctgtctgcgcgacgctggcaggatgaaagttccgacctgtggaccacctaccagcgtatccaggaaaacctgattaaaggcggtctgccgggcagaacaacgaaaggtaaacgggcccacacccgtgcggttaacggcattgacggcgacgtgaagctcaaccgcgccctgtgggtaatggcggaaagcctgctcgggagcctgaagtaa

SEQ ID NO: 377239 - DNA, 150 bp, Salmonella enterica; identical to SEQ ID NO: 77510

SEQ ID NO: 377240 - DNA, 468 bp, Salmonella enterica
atgaaaaagaaaatactgcttttcactcttctgatatctgctctgactccggcagtgtcacaggccttcggtaaccgtgatacctgggccagcggctggggtcagggcgtgtctgagtttgtaattctggggaaaggacagtcacagctttacctgacctgcgaagacaccggctcacaagcggccaccctgaccttcaccgacgcaaacggtcatcaggtcaggatggataacggccagtcgctggacatgaaaattgacgatgaggagcctgtcagcgtcagtgacagcgagtcacatgtgggctcagacaacgtggcatgggcatgggataaactgcgcaccggtaagcgggtcattgtgtccggggagggcgtaaaggcagccgtgtttacgcttaacggtgcggggaaggtccttcccgcgttcggcgacagcggctgtctgccgaaatatgccctgccgtaa

SEQ ID NO: 377241 - DNA, 402 bp, Salmonella enterica
atgaaaaggttttttatggcgctgaccgccagtctgttgttcacctcacttccctccctggccggtagcgatatgcccgttaaagtggaggtcagccatgccggccatgagtgctatggctgcatctatgtcaccgtgacagcaaaaaccgacaccgttctgataaagaaaatcgatgttaaccggggaaaatgtccgatgctgacacaccgaaaaatagcctacaggggccggaatgtggatggctggtggcccacagataaaccgttcacaccccgtaaaatgaccttcgctgagagtgtcttctggaaatttggtcacactttggattttggtaaagcctgcaattttgttgaggcccgggtgttcaccgatcagggcacattcaccgtcagccagtga

SEQ ID NO: 377242 - DNA, 888 bp, Salmonella enterica
atgaaacatccttcgggctatgcccttatccgtcgccatctgcggcgctatccccgtattctgcggcagcatcttctccgggagctcagccgcctcgtcgcgtatgaacccgtgattggcatcatgggcaagaccggcgtcggcaaatcctcgctgtgtaatgcgttgttccggagtgaagtctgtgcggtgaatgccgtggaggcctgtacccgtcagcctcagcgtgtacgtctgcgcttcggtaaccattacctgacgctggtggatttacccggtgcgggagagagcatcagccgtgacaacgaataccgtgagctgtaccgcgaactcatgccacaactcgatatggtgctgtgggtgctcaaggccgatgaccgcgcattctcggtggaagagcttttttatcaggaggtattcgcacaatacagcggaccgctgccaccggtgttatgggtcctcaaccaggtggataaaaccgaaccggctgaacagtggaactggctgtcggcacagccttcagtatcacagagtgagcatattacgcagaagcgccaggccgtcgcccgtcagatgggaacagcagagacgaatattcttccggtgtcagtcagggggcggtaccacctgtcccgtctggtggaggcgatgattacccgtctcccaaagcaggcccgcagcccgctggtgcctcacctgcaaagcgggtaccacacccccggcattatcactaccgcccgcaacagctttggcgatgccgtggtggaagtgattgacgcggtcatcgaccaggccccgttgccgcaggttgcacgttgcgcgctccggacagtcacacacaccgtggcccgtgctgcccggaccgtctggtccttcttctttggctga

SEQ ID NO: 377243 - DNA, 1104 bp, Salmonella enterica; identical to SEQ ID NO: 77506

SEQ ID NO: 377244 - DNA, 576 bp, Salmonella enterica
atggaatacgtaatcaactcaaaccacaaaccagactattctcttcagtcagtattatttaaccatcaggaccggttatttgactgtcattcgaaattactcatgcttcgggtggatttcgcgtacaggaaaaactctgattcatacgcgtatggtgatattcatcaactggcggctgagatgacatggctgactgaacaatgcgcagagatatctggtctggtgggatattcctgggtaatggaatatggggaagaccaccgttaccacattcatgctgcgttttatatcaatggtcagagccaccggaaggtctggtgcttctgggaagccatccagtcacgatgggaggaaattacgtatggtgatggctatgcgcaccggtgtgagcctaagggacattaccgggtgcaaggtgaacgagtaatcaacttttcagatcgcagaggaagggaaggtatgcagtacatcctgagctatctgggtaaacagtcacagcgtacagagcagcggatttacagagtcagcgcagtccctgccccggcagtcagtggcaggcggcgtaagcggagctga

SEQ ID NO: 377245 - DNA, 207 bp, Salmonella enterica
atgaccacaccaaaccgcctgcttaacgataagtttgtcgatatggccttcattacgcagctcaccggcttaaccgacaaatggttctacaaattgatttcattgggtgaattcccaaaacccattaagctgggcagaagctctcgctggcttgaaagcgaagtggaagcctggctacagcaacgcattgctcagtcccggcggtaa

SEQ ID NO: 377246 - DNA, 162 bp, Salmonella enterica
atgacgatttacgccaaatcttttatcgcgcttgatggcaatcagcttcttacaggcgccaccactgcacagatttccccttacgaccgctactcttgccacctctgcagcagtgcgctggcattccaccctgaatgggcctccaaccacccgtggttctag

SEQ ID NO: 377247 - DNA, 387 bp, Salmonella enterica
atgcaattccgcactattcgtaccgcccttgaccacgagggcgtagtcactcacctctgggatttggctccgcattcacgggggatctggttctaccgttcctgcaacaatcccctgcgtctgcactggacgcatgacagcggaggttatttcgaacataacttggaagacgctgacgaacgcaggttaacgcattgtgagtaccggagcattacccaggataaatcggtatccacttttgaccaggctgtgaatgcactgatggaacgtgatgatatatacgccacagcgccttcaaaaaaggattacttctgcgtgctctgtcagcatgaagattatggtattcgctgctgtccggagtgcggacagcatatgcgcaaaaaataa

SEQ ID NO: 377248 - DNA, 606 bp, Salmonella enterica
gtgaaattcaaatcactcaacgagctgtttgctgaggaccgtgctcacgcgttgttaacactcatcctcacgctctaccgatggaaatcctttaaccagcccgtttttgccagcgatggaaaatcgatgcaggcgctgtcgcagctttttacggtttatgaagagggtgttatagataaaatattgtgcgctccttggccaggaaactttcgccaactagaacgctttgcgtgggatctcttctttgtcctcggtgacagaaccagagtgaccaacgagattattgacagtctgctcaaagaggaagcaaatcgtattcctgcctcgtttattgaagcacagcaaatcaacaacgagcaaactgcccccacaatattcagcgaagtggaaaacattatcaaaaacaaccatttcaacttgaaagcctcactgcctgaactcggtgtgtatcgtctgcgaacctacaatgctctgaaaggattcattcgcgaaaacagagctcagttcagtaagggatttctggctgactccaaaattacgaagatcatcacctccgggattgcaggacggaagggacctgaaaactataagccgatcacttcttaa

SEQ ID NO: 377249 - DNA, 3678 bp, Salmonella enterica
atgaataccaataacatcaaaaaatatgccccacaggcccgtaacgatttccgcgatgcggtgatccagaagctaacgacgcttgggatcgctgcagataaaaaaggcaatctgcagattgccgaggccgaaaccattggcgagaccgtgcgttacggtcagtttgattacccgttatcgacccttccccgccgcgaacggctggtaaaacgcgcccgtgagcagggttttgaggtgctggttgagcactgcgcctacacctggtttaaccgcttatgtgcgatacgctatatggagctgcacggttatcttgagcacggcttccgtatgttgtctcacccggagactccggccgcgtttgaggtgctggatcatgtgccggaagtggcagaagctctgctgccggaaaataaagcgcagctggttgagatgaagctttcaggtaatcaggatgaagctctgtaccgtgaactgctgctggggcagtgccacgccctgcaccacgcgatgccgttcctgtttgaagcggtagatgacgaagcggaactgctgctaccggataacctgacccgtactgactccattctgcgtgggttggttgatgatattccggaagaagactgggagcaggtagaggttatcggctggctgtatcagttctatatttcggaaaagaaagatgccgtgattggcaaagtggtgaagagcgaagatattcctgccgccacccagctgtttacgccaaactggattgtgcagtatctggtacagaactccgttggccgccagtggttgcagacctacccggactcaccgctgaaagacaaaatggagtactacattgagcctgcggagcaaacgccggaagtgcaggcgcagctggcggcgattaccccggccagcattgaacccgaaagcattaaagtgctcgacccggcctgcggttccggtcatattttgattgaagcctataatgtgctgaaaaatatctacgaagagcgtggttatcgcgggcgtgatattccacaactgattctggaaaataatatttttggtcttgatatcgacgaccgggcagcacagctttccggctttgcattattaatgatggcacgtcaggatgaccgcagaatatttaaccacgatgtgcgtctgaatattgtctctttgcaggaaagtctgcatctggatatcgccaaactctggcagcaactcaatttccaccagcaggtacaaaccggcagcatgggggatatgtttgctgaaaataccgcgttaacccaaaccgacagcgcagaatatcagctgctgatgcgcacattgaaacgctttgtgaatgccaaaacgctgggatcgctgattcaggtgccgcaggaagaagaagcggaactgaaagtatttctggacgcgctgtatcgcctggaacaggaaggcgatttccagcagaaagcggcagcgaaggcgtttattccttatattcagcaggcgtggatactgacacagcgttatgatgcggtggtggcgaatccgccgtatatgggaagcaaataccaatcattaagtgtaaaaaaacatcttaaagataattttactggttatgataaggatttattttcagcctttatagtcagaaacttagagctttcaaaacaaggggctcaacttggattcatgacgccatttgtctggatgtttatcactacgtacgaagaattaagaaaaaaactgatagagcaagaaattattacatcgcttgtgcagcttgaatattcaggctttgacggtgcaactgtgccaatttgcacattcacattacagaaaggtcatattaaccattttactggtagctatatccgcctctctgattttcgtggtgcatcaaaccaaggtcccaaaactcttgaagcgatacaacaccataattgtggatggttttatgaagcgcagccagacaattttaaaaaaattccaggagctccaatcgcttactggataagtgaatcatttcggaattcattttccgttaacaacaatgttgactcattatttaagccacgcaaaggtattgatactggagataatgagaaatttttgcgcggatggcatgaaattagtcattctaaaataggtttcaatatggcatccgaagaggaaagcattagttcaggcctaacttggtttccatataataaaggtggagactttagaaagtggtatggaaatttttactacgtaattaactggaaaaatggtggttttgaagttaaaaaccacattgacaaaaatggtaaaataaaaagtaacattagaaataaaaatttctttttcaaatctggaattacatggacagatattagctcatcatattttggagtaagatatctcccgcaaggctttatttgtgacaatagtggctctgcatgttatggagatgaaatacattacccatcattccttgcaatgcttgcatcaaaaccaacctttagtttactaaaaattcttaaccccacgcttcactttcaggcagggaatatatcttcattgcctgtttgggggatcagtagtcctgaaataaaattaaatgccaataaagctatagatattgcaaaagaagactgggattcatatgaaacctcatgggacttcaagagaaacaaattgatatctaagggtgttttacgcgataaatatcatcaatcaatcaatgaaaataatatttcatttaataaactaaaagaaatagaggaaaaaaataatgaacacttcattaattcattacatatttctactgacgaactttctccagtagttgagaacgatagtatcacacttaaatcaaatatttttcaccgatatggtattaatactccttacaatgaaggtttatcaagatactgctctgaaacaattgctgaaatgatcagctattccctaggttgccaaatgggccgctattccctcgatcgcgaaggcctcgtctacgcccacgaaggtaacaaaggctttgccggtctcgtcgccgaaggtgcctacaaaaccttcccagccgacagtgacggtatcctgccgctgatggatgacgagtggtttgacgatgacgtcacctctcgcatcaaagagtttgtccgcaccgtctggggtgaagaacacctgcaggaaaacctcgaatttatcgccgaaagtctctgtttatacgcgatcaagccgaaaaaaggcgaatctgcgctggagaccattcgccgctatctttccacccagttctggaaagaccatatgaagatgtataaaaagcgcccaatctactggctattcagctccggtaaagagaaagccttcgagtgcctggtgtatctgcatcgctataacgacgccacgctgtcgagaatgcgtaccgaatatgtggtaccgctgctggcgcgttatcaggccaatatcgatcgcctgaacgatcaacttgatgaggcgtctggcggtgaagccacacgcctgaaacgcgaacgcgacagcctgatcaaaaaattcagtgaactgcgtagttatgacgatcgcctgcgtcactatgctgatatgagaatcagtattgatctcgacgatggcgttaaggttaactacggcaagtttggcgatctgctggcagatgtcaaagccatcactggcaatgccccagaggtgatctaa

SEQ ID NO: 377250 - DNA, 603 bp, Salmonella enterica
gtgatagatcccgttcttgaatatcgcctgtctcaaatccagagtcgcattaacgaagatcgcttcctcaaaaataacggctccggaaatgaaattggtttttggatctttgattatcccgcgcagtgcgaactgcaggtacgggagcatttgaagtatctgctccggcatctggaaaaggaccataaatttgcctgtctgaatgtcttccaaatcatcatcgatatgctcaatgaacgcggccttttcgagcgcgtctgccagcaggaaatcaaagtgggtactgagacgctgaaaaagcagcttgctggtccgttaaatcagaaaaagatcgctgattttatagcgaaaaaagtcgatctggctgcccaggattttgtcattcttaccggcatgggcaacgcctggccattagtacgcggtcatgaactgatgagcgccttgcaagatgtcatggggttcaccccactgctgatgttttatcctggcacctacagcgggtacaacctttccccgctcacagacaccggttcacaaaattattatcgcgctttcagactggtaccagatacgggacccgcagcaacattgaatcctcaatga

SEQ ID NO: 377251 - DNA, 606 bp, Salmonella enterica
atgattaaaaatgacaaggcatggataggagacttgctgggcgggccgctcatgagcagggaaagccgcgtcattgccgaactgttgctaaccgatcccgatgaacagacatggcaagagcaaattgttggccacaacattttacaagcctcttctcctaacaccgcaaaacgttacgcggcaacaatcaggcttcgcctgaacacgcttgataaaagcgcgtggacattgattgccgaaggtagcgagcgtgaacgccagcaacttctgtttgtggctctgacgctacattcgccggtagttaaggattttctggctgaagtggtgaacgatctgcgcaggcagttcaaggaaaagttgcccggcaatagctggaacgaatttgtgaatagccaggttcgccagcatccggtactcgccagctactcagattcatctattgcaaaaatgggaaacaatctggtaaaggcgcttgctgaagcgggttatgtggatacgccccgcagacgtaacctgcaggcagtttaccttttaccggaaactcaggcagtgttacagcgcctggggcaacaggacttgatatctattctggagggaaaacggtga

SEQ ID NO: 377252 - DNA, 879 bp, Salmonella enterica
gtggcgctgtacaatatcgcaaataaagaactacatgctttagaaaaaacgacctttactctggaaggattacagggacgttatgatttacaagaagcaatcaaaaaaaatatagatattattgctcctgattgtctggtgatttccgaagagttttctgactgggaagatagccgtcggcgaattgatttattggcaatcgataaacaggcaaatttagtggttatcgaattaaaacgtgatgaaacgggtgcgcatatggagttacaggcactacgatatgcggcgatgatttccacaatgagttttgcgaaagcatgtgaatatttccagacgtatttgaaaaaacaaaactgcgatgccgatgcgaaagaaaaaatacttgaatttgttgagctggatgaaactgagcttgttgatttcggaaaagatatcagaattgttttggcttcatcggattttagcaaggaactgactaccactgcgatttggttaagagataagggggtagacattcgatgcgttcgtctgacgccttatagatttaatgatgatgttcttatcaatgcagagcaaatcataccggttcctgaattggaagaatatcaagttaaatttcgtgaaaaacgtgatgagcagctaattagcagtcaggaaaaagagaaggactatacgtggtatatatataaagataaagaacttaataaacgtaaattagctcttgaattattacgtgattggataagacaatttaatccagcaagttataatgatttaataagtggattaagtgaaactttaaaaaacgtacagttatgcttgtcgatcagataccagagaagcaaaagagtcgctatcatatcaatgaagatgcattga

SEQ ID NO: 377253 - DNA, 1998 bp, Salmonella enterica
atgagtgaaaatgatacaatcccaaagaagtctacaagtcagattaacaaagcggtattctttacatctgctttgctaattttccttcttgtcgcctttgccgccgtattcccggatgtcgccgacaaaaattttaaactacttcagcaacaaatcttcacgaatgccagctggttctacatccttgctgtggccctgattttactgagtgtcacgttccttggactctcacgctacggtgatatcaagctgggcccggaccatgcgcagcctgatttcagctaccactcctggtttgcgatgcttttttcggcagggatggggatcggcctgatgttctttggcgttgccgaacctgtaatgcattatctttcgccacccgttggcactccagaaaccgttgcggcagccaaggaagcaatgcgtctgacctttttccactggggactgcacgcatgggcaatttatgccattgtggcgctgattctggcgttcttcagttaccgtcacggtctgcctttaactctgcgctccgcactctatcccattattggcgatcgcatatacggacctgtaggacatgcggttgatattttcgctgttataggcacggtctttggcgttgcgacatcactgggttacggtgttttgcaggtgaatgccggtttgaaccatcttttcggggtgcccatcaatgaaacggtgcaggtaattctgatcgtggtcatcacggggttagcgacgatttcagtggtgtccggtctggataagggaatacgtatcctgtctgaactcaatctgggtctggctttgttgctcctggcgctggtcctgtgtctgggaccaaccgtgcttctgctgaagtcatttgtggaaaatacgggcggttatctttcggaactggtgagtaaaacgttcaacctttacgcgtatgagcccaagtcgagcaactggctggggggctggacattactgtactggggatggtggctttcatggtcgccgtttgtggggatgttcatcgcacgggtctcccgcgggcgaaccattcgcgagtttgtcaccggcgtgctgtttgttcccgcgggttttacgctaatgtggatgacggtgtttggtaacagcgcgatctatctcattatgaaccagggggccgcagacctcgccaatactgttcagcaggatgtggcgctggccctgtttaatttcctggagcatttcccgttctcttccgtgctgtcattcattgcaatggcgatggtcatcgtcttctttgtaacgtctgctgattcgggggcaatggttgtggatactctggcatcaggtggagtggcaaacacacccgtctggcagcgaatattctgggcctcgctcatgggcattgttgcaattgcgcttctccttgccggagggctaagtgcgctgcaaacggtgacaatagcgagtgcattgcccttctcagtgatcttactaatatccatatacggacttttaaaagctttgcgccgggatttgaccaagcgtgaaagcctgagcatggcgacaattgctcctacggctgcacgtaacccaattccttggcagagaaggttacgcaatatcgcgtatctgccgaagcgatctcttgtgaaacgttttatggtcgacgtcatccagcccgccatgacgttggttcaggaggaactgaacaagcaggggacgataagccacattagtgatgcagtcgacgatcgtattcgtcttgaagtcgatttgggcaacgagctgaattttatatatgaagtgaggcttcgcgggtatatctcaccgaccttcgcgctcgccgcaatggataatgatgagcagcagactgaacaacatcgatattatcgcgctgaggtttatctcaaagaaggcggtcaaaattatgatgtgatgggctggaaccaggaacagctgattaatgacatactggaccagtacgaaaaacacctgcacttcctgcacctagttcgttaa

SEQ ID NO: 377254 - DNA, 522 bp, Salmonella enterica
atgatttcacgctggaaatggatgctgaagcagacatttaaaaaactatggttcagggcaacgttattcgcaattgtcgcgataataacggcccttttatcaattctttttaaatcaatgattcctgagtcggtttccgtgaaggttggtgcggaagcagtcgataacattctgaacatactggcatcgagtatgctggcagtgaccacattttcgctgagtatcatggtcacagcctacggttcagccactactaatgtgattcccagagctacgcgtttagttgttgaagacgtcaccacacaaaatgtattggccaccttcatcggttcttttctcttcagtctggtagggattattgccctcaatatgggagcttatggagaaagggggagagtcattttattcattgtcacactggttgtcattgccttaatcctcatcacattgggggatgcggacgatttcctgaactgctttatcattccagcccgcattgttggcggtacatttcagggctga

SEQ ID NO: 377255 - DNA, 405 bp, Salmonella enterica
gtggtggccatcggtattaccggcagtctgctgggttataaaattctggatccgattgcggcattggtggtcgggctgtttattctgcgcatgggggtgaaatttaccctgcattcgcttcaggatttaatggatcgcggtgcggatgaagaaaccattgccaaaatcacgcaatctgtgatggatactccgggggtggagggggttcatgatctgaaaacccgtaagtccggcgattatttgctggtggatgtccatattgaaattgatgaaaacctgacggtcaaagaagggcatgatatcgctattgcagcggaaatgaatatccgccgtgatccgcaggtgctgagtgtgatgatgcatgttgatcccgcccagtccgtccgggccgggctgacaacatga

SEQ ID NO: 377256 - DNA, 1269 bp, Salmonella enterica; identical to SEQ ID NO: 77285

SEQ ID NO: 377257 - DNA, 360 bp, Salmonella enterica
atgaataactttaacctgcctccagttaataaaataccaaccagaatcaacacattcaatacagaatattttttgattggttttccaatgataccacaagaaagaattgatttaaataaatccatattttttgatacaaaaaaaagaagcgaatttaatttaaaatcatacgacgcatttataaatacagatttttctgttaaacccagaaaaatatatccagatgtattttacgatgttgatactatcggttttcaggggaaagggctatttttttctgacagactgatcgatgcaatacaggacgccgggattgtcgggctgcatgttgatgacactgaaatggaaatgaatccatag

SEQ ID NO: 377258 - DNA, 294 bp, Salmonella enterica
atgaccgcgatgttgttttttctgttgttagtgagcaaaccggcaattggtagtaatacactgaagatcccgactcatcaccggaatatccccggtgtcattcagcgcaccgggaaaatctttcagccatgctttaacgtttcgctggttgatataggtcacgcccatcccttcaatacagcccaacagttcacgggtattttgcagcgtgatcacgatgcagtctttcatcacccgaattttaacgggcactccgttaataaacccggcctgcggcatccattcaccgcataa

SEQ ID NO: 377259 - DNA, 1029 bp, Salmonella enterica
atgacgatgcaccgggagccgggcggcgaacggtattactacacctgggcgtggtttgaaggcccggacgatgcggcgtggcgggtgacgggccatcatacggacagcggcgagcagtaccgtctggactggaatctggcagaacgttcgctgtgcgtgacggatagcatggggcgtacgcgctgccactggtgggatgcgcagggcctggtgacggcgtaccgggacgaggccgggcagatgaccactttccgctggagcgatgaagagcggttactgctggggatgacggacgcgcagggtggcaaatggcgttatgtctatgaccgtctcggccacctgacggagacgcatgacccgctgggccgggttgagcagacgcagtggcacccggtgtggcaccagccggaaacggaggtggatgccgcgggggtggcgtggcgttatgagtatgatgagcggggcaacctgcaggcggtcagcgacccgctgcaccagcgcacggtatacgggtatgaccggcacggccaggtggtgcggataaccgacgcgcggggcggagataaatacctgcagtggaacgaagacggacagcttatgcgccacacggactgttctggctcgcagacggcatggttttatgatgaacgcacgcggctggaaagggtgacggacgcggagagtaacagtacgcgttacagctatgacggcaacggacatctgacggaggtcatgttcgcggacgggcgtacggagcgttaccagccggatgcggcgggacggctggtgaaatatacgagcccggcggggcaaataacacgctggcagcgggacggccaggggcgggtgcgcaggcagacggatgcgacgggtcgcaggacggcgtatgagtacgacgcttacgggcggctgaccacgctcacgaacgagaacggggaaagctaccggttccggtacgatgttctggaccgggtgacggaacagacggaccccggcggcagccgccgggcatacgggttaacgcgctga

SEQ ID NO: 377260 - DNA, 1497 bp, Salmonella enterica
gtgacggcagtgatatacggcggggagcgcgggggagaaatccgccacggtctggagcgtgatgcggcggggaggctgacggcgaaaatcacgccggagacgcgcacggaataccggtacgacgcggcggaccgtctgctggaaatccgccgcaggcggcatgatgcggcggaaggcggagagccggaagttatccggttcagctacgacagtgcgggtaacctgctgagcgaggagacggcgcagggcgtgctgcagcaccggtacgatgttcagggcaaccgcacagaaacgcagatgccggacgggcggacgctgcggtacctgtactacgggagcggacatctccagcaaatcaacctggggcgtgatgtcatcagcgagttcacgcgcgaccacctgcaccgtgaggtgcagcggagccaggggcggctggacatgcggcggatgtacgaccggacgggccggttaacgcggaaactgacctgtaaaggaatgcgcggtgtggtgccggagacgtttattgaccgggaatatgcgtacagcggccaggatgagctgctgaaaaagcggcacagccggcagggggtgacggattatttttacgacacgacggggcgcatcacggcgtgccggaatgaggcatacctggacagctggcagtacgacgcggcggcgaacctgctggacaggcggcagggagagaccgcgcaggcgggtgcaggcagcgtggtgccgttcaaccggataacgtcatatcgcgggctgcattaccgttacgatgaatatggccgggtggtggaaaagcggggccgcaacggcacgcagcactaccgctgggacgcggagcaccggctgacggaagtggcggtcacccgggggggcaccgtacggcgttacgggtacgtgtacgacgcgccgggcaggcgggtggagaagcacgagctggacgcggaaggaaagccgtataaccggacgacgtttttatgggacggaatgcggctggcacaggagtgcaggctgggaagaagcagcagcctgtatatctacagcgaccgggggagccacgagccgctggcgcgggtggacagggcggcgccgggcgaagcggatgaggtgctgtattaccatacggacgtaaacggcgcgccggaggagatgacggacggcgggggcaatattgtctgggaagcgggctatcaggtatgggggaacctgacgcatgaaaaagaaacccggcccgtacagcagaacctgcgtttccaggggcaatatctggacagggaaacggggctgcattacaatttgtacagattttatgatccggatatcgggaagtttatatcgggcgatccgatagggttagcgggtggaataaacctctaccaatatgcgcctaatccgctaagttatatagatccgctaggtttatgtaaaaaatttgctggtaaaggttctccggcagaaagggccaggaattatagaagcactggctag

SEQ ID NO: 377261 - DNA, 507 bp, Salmonella enterica
gtgggtattgccggcggcgcggaaaaatgccgtcatgcgacagacgttttgggatttgatctgtgccttgatcatcacgctgataatttcccacaacagcttgcgcaggcctgcccgcagggtatcgatatctattatgagaatgtcggtggtaaagtctttgacgccgtcttaccgctactgaatacgtcggcgcggattccgctctgcggtctggtcagcggctacaatgcgacaacgttgccggacggtccagacagactgccactgctgatggcgacattacttaaaaagcgtattcgcctgcaaggttttatcatcaaccaggactatggtcaccggatacatgagtttcagcaagaaatggggcgttggatcaaagaagggaaaatacattaccgggagcagattactgatgggctggaaaatgcgccagaagcgtttatagggctgctggcggggaagaactttggcaaagtcgtgatacgtttagcggacgatgcgtaa

SEQ ID NO: 377262 - DNA, 2166 bp, Salmonella enterica
atgtcacgttttccgttgatacgcttacatttatccggcattttcatgaaaattatttccgttagacagcgactttatcccgccctcttattgcctctgaccttctccccggtccttcaggccgccagcgcgcccaatgaacaaaccatgatagtcaccgcaacgccgcaaaccgtatccgagctggatacacctgccgccgttagcgtcattgagggagaagacatgcgtctggcgacgccgcgcgttaatttatctgagtctttaaccagcgtcccgggattgcaggtgcagaaccggcagaactacgcgcaggatctgcaaatctctatccgtggatttggctcgcgttccgcctttggcgtgcgcggcattcgtctgtatgttgatggcattcccgccaccatgccggatggacaaggccagatttcaaatattgatattaacagcatacaaaacgttgaagtgttacgcggccccttctcagcgctatacggcaatgcttccggcggcgtgataaatgtcaccaccgaaaccgggagacagccgcccacccttgaggccagcagctactacggcagttatggaagctggcgctatgggttaaaagccacgggcgcgatgggggacggcacacagcctggcgacgtggattacacggtatcgactacccgtttcaccacccacggctaccgcgatcacagcggcgcgcgaaaaaatctggctaatgccaaactgggcgtgcgccttgacgatgtcagtaaactttcgctgatttttaatagtgtggacattaaggcggacgatcccggcggacttaccgaatctgaatggaaagccgatccgcagcaggcgccgcgcgctgaacagtacaatacgcgtaaaaccatcaaacaaactcaggcaggattgcgttatgaacgtcagctcagcgcgcaggatgatatcagcgtgatggcctacgccggagagcgggaaaccacgcaataccagtctattcccctggtggcacagctaaaaccagcccaggctggcggcgtaattacactgcaacgccactatcagggaattgattcccgctggactcaccggggagaattaggtgtgccggtcaccttcactggcgggttaaactatgaaaacatgagcgaaaaccgcaagggttacaataatttccgtctcaacaacggcacccctgagttcgggcataaaggcgatttacggcgggatgagcgtaacctgatgtggaatgtcgatccttatctgcaaacccagtggcagcttacgcaaaaactctcgctggatgctggcgtgcgctacagttccgtgtggttcgattctaacgatcactatatcgcgcccggcaatggcgatgacagcggcgacgccagctatcaccactggctacccgccggatcgctaaaatatgcgttaactgacgcctggaatctttatcttgctgccggtcgcggatttgaaactcccactatcaatgaactttcttatcgcgctgacggccaaagcgggttcaactttgacctcaaaccgtcgaccaatgatacggtggaagtcggcagtaaaacgcggattggcaatggcttgttgaccgccgcgttatttcaaaccgataccgatgatgaaattgtcgtcgccagtagtatgggaggacgcactacctacaaaaacgcgggcaaaacgcgccgccagggcgcagagctcgcgttggaccagcgcttcgccggcgactggcgggtgaaagcatcatggacctggctggatgcgacctatcgcagtaacgtttgtcaggggcaaaactgtgatggaaaccggatgcccggcatcgcccgtaatatgggattcgcctcattaggttttatcccggatgaggggtggtacgccggaacagacgttcggtatatgggcgatatcatggccaatgatgaaaataccgccaaagcgccttcgtataccgttgttggactaaatacagggtataaatttaattacagtcagcttaccgtcgatatttttgggcgggtagataatctatttgatgaagaatatatcggttcggtgatcgttaatgaatctaatggccgatattatgagccagcgccagggcgtaactatggcgtggggattaatctggcatggcaatttgaataa

SEQ ID NO: 377263 - DNA, 465 bp, Salmonella enterica; identical to SEQ ID NO: 377162

SEQ ID NO: 377264 - DNA, 204 bp, Salmonella enterica
atgaaagtgcgtgcgcatcagtatgacacggtggacgcgctttgctggcgtcattacgggcgcacgcagggtgtcacggagcaggtactgaaggcaaatccggggcttgccgaatacggcccctttttacctcacgggctgcaggtggagctgccggacattccgaccaccaccaccgtgcagaccgtccagctatgggactga

SEQ ID NO: 377265 - DNA, 909 bp, Salmonella enterica
atggcagtgattgacctttcgcagttgcctgcgccgcagattgtggatgtgccggactttgatacgttgcttgccgaacgcaaggcagaatttgtggcgcttcatccgaaagatgagcaggaagcagtgagccgcacactggaactggaatctgaacccgtcaccaaattgttgcaggagaacgcttatcgtgagttgcttctgcgccagcgcattaacgaagccgcgcaggcggtgatggcggcttatgccatagggagcgatctggaccagctcgctgccaattacaacgtgaaacgcctgacggtgacgcctgctgataatgacgctgtgccgcccgtcgcggctgtgatggaaagtgatgaagcgttacgcctgcgtgtgcctgcggcttttgaagggctttcggttgcggggccaactgccgcttatgaatttcatgcccgaagcgccgacggtcgggtggcggatgccagtgcaaccagtccggcacctgcagaggtggtgctgactgtcctgagccgcgaaggcgatggaacagcagaaaaagacctgctggacgtggtggaaaaagctctgaacagtgagaacgtccgcccggtggctgaccgtcttacggttcgcagcgcagaaatcatcccgtaccgggtggaagccactatttttctctatccgggaccggaagcagagccggtaatggcagcggcaaaagccagcctgcagaagtacatcgccagtcagacgcgtcttggtcgggatattcgccgtagcgccatctttgccgccctgcatgttgagggtgtgcagcgtgtggagctggcttctcctctggcggatatggtcctgaacaaaacacaggcggcatcatgtacgcagtggagcgtaaccaacggaggaacggatgaatag

SEQ ID NO: 377266 - DNA, 1134 bp, Salmonella enterica
atgagaggtttgatagaggcagggaaaatcaacgatgtcaaacatgtcatatttatggatgacgacggctcatgtgaaattgaatcgatttgtcgaactcatgcttttttactgatggctaaagacaaaaatacagttgttactggctgtatgctttttgaagataacccggcaatcatacatgaatctggtgccatatggcatagagattttttacattacccggataaacattatctggatgctcgggaaatagattctttagatacttttgataatgaaagaaaaataggctacggtggatggtggttttttgcctttaatattaacgctattgaatattactcatttcctttctttgttcgtggtgatgacctgctatttggatatatgcataaaaaacataatattgtcacacttaatggtgtggcttcgtggcaaatggattttgaaagaaaaatatcggttctaaatagctatttgaacttcaggactgttgctgtacctgcattaattagtaaaagaaagtttgctgcactactgttaagtgttttctttgtgcgggaagtctttcttgcgagtttttcatgccgctatgaacttgccagagcaatgattatgtcatataacgattgtctttctggacgggagttttgggaagataatgtagatcttctggagataagaaaaagaattaatgcaataactcataatgaaaaattcaatgtagaaggtattgatattgttaatggttgtgttgattacccatgttctggtaaagaaaaagccatctacaaattttttagatgcataacccttaatggacacttaattccagctttctttttaattaaaaaaccaatcctggttgattatcgtcattatcaccctactaagttttcattccggagaattactatctatcatttaaatatagaaaatggcaaattattaaaacttacccactcaaaaatggagttttttaaagttattattaatggtttgtttacggcagtcaaaaatttttatcggtttaaatctgcaaaaaaagagatgaaaaatagtttgccctatcttacctcaaagctcttttggtataaaaaattcaataaaaaatctgaagataaatattaa

SEQ ID NO: 377267 - DNA, 237 bp, Salmonella enterica
atggctggattcattgcttttggcgcgattattgccagcgtcatctgcggcttttcgctgggcgtctggttttctgcgctaatggtactgctgtgcgccgggtttatactttacgacacttctaacattattcaccattaccctaccgatcgccctgctggcgcggcattacatctgtttgcttctatcgcgaccatgttctggtatattttgcggatttttatgtcgcgtaattaa

SEQ ID NO: 377268 - DNA, 186 bp, Salmonella enterica; identical to SEQ ID NO: 376959

SEQ ID NO: 377269 - DNA, 213 bp, Salmonella enterica
atgctctacgctgaccgtaacgcgaacggcatcatcatcaatatgctgcagggcaaatgtcggctgggtgcgattggtcatgttatcgccatggacaccactgtcgtccgcgctatccagtacgataaccggcgtcgacaacgtagtatcaatagtgaagtcgagcgtcctggtcaccgtattgcctgcgttatcagtcgctttcaccgttaa

SEQ ID NO: 377270 - DNA, 138 bp, Salmonella enterica
atgctctacgctgaccgtaacgcgaacggcatcatcatcaatatgctgcagggcaaatgtcggctgggtgcgattcgtcatgttatcgccctggacaccggtatcgtccgcgctattcagtacgatgaccggcactga

SEQ ID NO: 377271 - DNA, 324 bp, Salmonella enterica
atgaccggacacactactttcaggcgaaagttcaaatgttggcttatcggtaacggaatcgatagtaatgacaagtttggcgctaccgcttccatcagcagtcttggcctctgcctccagattgtatgttccatcagtcaatgtttcaggcgctgtgaaggtgaagttacccaaactatccgctacagcctgaccgacagcaataccattaattttaataataaccgtggcattgggagcagtgctacctacaaactgaggtttggtaaaattagttatactatcatctttgctaccgctgttactctcggccgcaagcgctaa

SEQ ID NO: 377272 - DNA, 774 bp, Salmonella enterica
ttgcttgccgaagaaataaatattctttctccactggtaaaaaaaggaattagcccatataccaattttcttaacaagaaacaggcgtatataaaagttaagtctgaaattaatgatattgaaagtagcatcactttaaaaaaagatgatattgagctggttgttaatgatattgaggcgcttaataatgaattgcgattatctttatctaaaataatatctaaaaatcttcaggaacttgaggttgttaactctacattaaaagtaatagagaagcagataaatgaggaggatatctattcaccggttgacggtgtaatttataaaatcaataaaagtgccactactcatggtggtgtgattcaggcggcggacttactttttgaaataaaaccaaaagtaaggactatgctggccgatgtgaaaatactaccaaaataccgtgaccaaatatatgtagatgaagccgttaagctagatgtccagtcaattattcaaccaaagataaaatcgtataatgcgactatcgataatattagccctgactcttatgaggaaaataccggaggaacaattcagcgttattataaagtaattattgcattcgatgttaatgaagatgatttacggtggttaaaaccaggtatgactgttgacgccagtgtaattaccggaaaacacagcattatggaatacctgttatctcctttgatgaaaggcgtggacaaagccttttcagaaccagttaatactaaacgattagatacaccttga

SEQ ID NO: 377273 - DNA, 450 bp, Salmonella enterica
atgaatagaagacaaagcgatcatctcatgatgataattatttctttgacgatcttaattattatccttacctactttatagaaattaattcagtggttcatggtcagggtgttatcactactaaagataatgctcagttaatatctctttctaaaggagggacgatacaagatatttatgtggccgagggggatactgtaaaaaaaggagaactccttgcaaaggtcgttaactttgatctgcaaaaagaatatcaaaggtatagaactcaaaaagggtatctggataaagatgttaacgaaatatctttcattcttgataaagaaaatgagagtggattgattaccctggatggcacccgttctttaagcaacaaagaggtaaaagcgaatattgaattagtgcatagtcagataagagctaaagagttaaaaaaaaacctctcttga

SEQ ID NO: 377274 - DNA, 1308 bp, Salmonella enterica
atgaagattaagatgttttttctgacgactgcttttattacacaaagcacatacgccagcgagcttccggtcattcctctaagagatttagttaatgccgcattaacgcatcagccctctgttgctgtttcatattatgagactgaaaagaaaaacagtgacttagatctttcacgggcagcactttatcctaccctggatctaacctctggccttaataataacagaaaggagtcgtcaggtaccgagagaaacgttgaaaataaggtatctttatcataccgaataacggattttggagtgaggggggctaatatcaggaaatctgaatacgaaagagataatagtaaaactgactatgaaaaaacaaagaatatagtgtctcaggaggttgtgacaacctattacaacatcagtaaatatcgtgaaatgattgatggcgtaaatctggagaaagagttttataaaaagatgctggaaactttttcgctactggtatcttccggtgtagctatgcaatctgatatgcgtaaagtacaagtatctatcgatgcattaaataccagaagtattatgtatcagtcgatgctggatgatgaaatgtataaaatgcagaatatgactggtctgaatttatcaccagatcagattcaaagcgatgaaaaattcaacctcttcaaaaaatatatctttgtcgaaagccctgaaaaacttatggacatggtgatgaaatacaacgatgactataagatgcttgtcaatacccgaaaagctgcgaccgaagatattaatgccgcaaaatcatcctattttccgactgtagatctcgtttccagctatgtacagaataatccgagcggtagtgccaaaaaaagtgattatgaagatgaatttaaaacgggcatcaatgtcagtttcaacatttttaatgggtttagaaatgcagcccaggaaagaaaaatggtggcaagttactcgcaggctaagctgcaaattgacgatttcttgattaaaactcgttataacattgattcacaactttcaaaatacaccgctgcaaaagagacttactcagtggcggaacgttcacatacaaacgcgttacagcttactgaattatatgagcaggagtttcagttagggcaaaaaagtttgcttgatttaatttcaagccgtaatgaagcatttcaggcatatgtaagcatgatcgacagcaaatatagcctgtatattttaaagctacagcaactctcattgatttttcatttaatggattatttaaaaagtgagttaaatgtaatgaaatga

SEQ ID NO: 377275 - DNA, 1389 bp, Salmonella enterica
gtgaaatatataaatcattatcgctatttgtttgtctgttttttccttgccatactcccttttttcgctttatcttttcccggtataagagagtatgtttttgataattttatggtttctgcaatttacaatggagtcattattgccatttatattacaggttctttgtgtgcattattcactattcttaaaaatatttcagcaaaagacatattaatagctcaggacgccagtagaaaaaatagcattctttctaacctcaatcaggttttgtttgccggggaacccaaacagtgtgatttcaatttactgatggaattagatgacaatgtgtctaccgcccgtaaccaacgattgtcatttattatgagctgtagcaatgtgtcgacgcttgttggcctgttggggacgtttgcgggtctgtctattacgattggttcaatcgggaacttattgagctcgccatcagatgttggcggtgataatgcaagtaatacactcaatatgattgtgacaatggtagcgtcgctttctgaaccattgaaagggatgaataccgcatttgtatcttctatctatggtgttgtttgcgccatactcctgacctcacaaagtgtttttgttcgcagctcctattcccttgtttctacagagatcaaaaaattaaaaatcataagtaacagatccaataataaacaacgaagcctgcgggttgaatcagagacgcttgtagaatttaaagagttgtttaaagcgttttttgataactacctgacagttgaaaacttacggacgcaggatgaagaaaagaaacgagtgatgctatcagatagctttgtcactttgcaaaaccgactattggataactcagcaaaactggaacaactttctacgctgattgatggttatctggtaagcaataacgaaaataccaaaaaattagttgacggtgtaataacaattacctctcgtttatctgaaggtaataccctgcttgctgataataatgcacgactggaggcaatgagtacaatacaaaatattatagacaaaaagaatgattcaataatggcatcagttgataaatgttatcaggaatctttttcacatggtaagaccataaacgatattgccgctggcagtgccgatatttctcatactctcgatgggctgagaaaagaaatggatgaggatatgaataatgttcatttagcgctatccgatctatcggctactgataaaaagattattgccaatactaaagagattagtgctgaaatggttagctatcgtgatacctatatgccattaatggaaaaaataacatctatgcatcaggaaatagtaaagcaacgtttgttaaacaaggaggaaaaaaatgaagattaa

SEQ ID NO: 377276 - DNA, 1221 bp, Salmonella enterica
atggtctctattaatgactctgctttaacgccgcgttcgcttcgcgacacacgacgtatgaatatgtttgtttcggtttctgcagcggtagcgggactgttatttggtctggatatcggcgttatcgctggggcgctgccttttattaccgaccatttcgtactgaccagccggctgcaggaatgggtcgtcagcagtatgatgcttggcgcggcaattggcgcattatttaacggctggctttcatttcggctggggcgtaagtatagcctgatggctggcgcgattttgttcgtgctcggctcgctggggtcggcgtttgcttccagcgtggaagtattgattggcgcccgcgtgatactgggcgtagcagtagggattgcgtcctataccgcgccgctttatctctctgaaatggctagcgaaaatgttcgcggtaaaatgatcagtatgtatcaactgatggtgacgttaggcattgtgctggcttttttatccgatacggcattcagctacagcggcaactggcgcgcgatgttgggcgtgctggcgctgcctgcggtgttgctcattattctggtggtattcctgccgaatagtccgcgctggctggcgcaaaaaggtcgccatatcgaagcggaagaggtgctgcgtatgctgcgcgatacctcggaaaaagcccgtgatgaactgaatgagattcgggaaagcctcaaactcaagcagggcggatgggcattatttaaagctaaccgtaatgttcgccgcgccgtgttcctcggtatgttgctacaggcaatgcagcagttcaccggcatgaacatcattatgtactatgcgccgcgcatttttaaaatggccggctttaccaccacggaacagcaaatgatcgctacgctggtggtcggactgacctttatgttcgcgacttttatcgccgtctttacggtcgataaggccgggcgtaaaccggcgttaaaaatcggtttcagcgtaatggcgttagggacattggtgttgggctactgcctgatgcagtttgataacggtacggcatcaagcggtctctcctggctttccgttgggatgacgatgatgtgtatcgccggttacgcgatgagcgccgctccggtggtgtggatactgtgttcggaaatccagccgctgaaatggattttggcattacctgttcaaccacgacaaactgggtatcgaacatga

SEQ ID NO: 377277 - DNA, 234 bp, Salmonella enterica
atgagagatctcttccagcaagccaaacattcagtctggctttttttgtctatggaaaacccccaactaggctgggggttccggaaagctttcagctttaagccagttattaaaaccccttttgatttgttaaaacatcttgcggtctggcaactgcaaaagttcaacaagaaatcaaaagggggtcccaatgagggacgaaaagagcttagcgcacacccgatggaactgtaa

SEQ ID NO: 377278 - DNA, 1125 bp, Salmonella enterica
atgctcaaacctatcttctacagtggaagtgtgaaggttccggaatgtctggaaacagataaggaaaaaaatgtcggacgtactcctctgtcttcagacattcagcaaattaaaaatgttgttgaagatattccgccatttccagaaagcagagcggtgggaggttctgtaagcgcagcgtacaggctttcttttgacgaagtgttttgcggtctcagcaatgaagagcgtaaaaaggtgtatggtcgcctttttggaaaacaagtacttgcgcatattcattccaggtgtcagcgcgacgctgacataataagagaaaaagcgctcaggcggataagccgtgagtgtggtaccgaaatagattgcgctctcttactaaataagatggtggatattttacaaaatgcccggctgacaataaattttaatgcagcaaaaattgactttgtctctctcttaaaaaataaagaatatctgaactcttatgcattaggttgcagaccaggagatttacctgcttataatgtcgggcgtgattcagttgaaactaaagcatttgaactggagaagcttgcagattcaccttatgccccatatggtcagacaggcggtttttccgtagcatatactcccaacagtaaaacttttagccctacaagcagaccaatttatgctgcactggactttctgaacggtgaaaatggaggtgccagcgcctatgggaaatcattttttgaattaaatgataatgtaaaaacaaattgtacattctcaccttttgatatctacggccacagatttggcctggatactagtaaattatctacattttgccatatggagaacctgattgcatcctgtcaaaatgatttttttggttataattgctttaagagtttggttaaaatggctaagggcgaaaaatttttagctcattctaattatggtacaggctatgaagggaattatatagaggctcatattcatggtgatgtatgtttattcagagatataaagcacgtttatttgtctttgcaagaaaactcttactcggaaagtcaactatatgattatgcaaaacaaataaaccaggcgcttaatagagactgcataatattatattga

SEQ ID NO: 377279 - DNA, 459 bp, Salmonella enterica
atgggggacgaaaagagcttagcgcacacccgatggaactgtaaatatcacatagttttcgcgccaaaataccgaagacaggcgttctacggagagaagcgtagagcggtaggcagcattttaaggaaactatgtgagtggaaaaatgtgaacattctggaagcggaatgctgtgcagatcatatccatatgcttctggagatcccgccgaagatgagcgtgtcagggtttatgggttatctgaagggaaaaagtagcctgatgctttatgagcagtttggcgatttgaaattcaaatacaggaacagggagttctggtgcagagggtactacgtcgatacggtgggtaagaacacggcgaagatacaggattacataaagcaccagcttgaagaggataaaatgggtgagcagttatcgatcccttatcctagcagcccgtttacgggccgtaagtaa

SEQ ID NO: 377280 - DNA, 594 bp, Salmonella enterica
atgaaacctgtttttgatgaaaatgggctggctacagtgccgggtgatatgcgttgttattattatgatgcagtaacgtctgaatatacgggctggtctgatgaatatattaatactggcgtaagtatgcccgcttgttccactggtattgacccgggcgaatacattccgggaagagtggcagtatttacgggtaagggatggagccatgaagaagaccatcgcaatgagaccgtttactcaactgaaaatggcgcagctgttacagtggattatatcggtgccatcaaagacggttatgtcacgctttcaccgttaacgccatacgataaatgggatggtgagaaatgggtgacggataccgaggcacagcatagcgccgcagtagaagctgcagaagcacagcgccagtcgctgattgatgctgcaatggcttccatcagtctgattcaactgaaattacaggccgggcggaagctgacgcagccagaaaacacccgacttaacgctgtgctggattatattgacgcggtaacggcaacagataccagcacagcgccggacgtcatctggcctgaactgccggaggcgtag

SEQ ID NO: 377281 - DNA, 369 bp, Salmonella enterica; identical to SEQ ID NO: 370640

SEQ ID NO: 377282 - DNA, 228 bp, Salmonella enterica; identical to SEQ ID NO: 370390

SEQ ID NO: 377283 - DNA, 2361 bp, Salmonella enterica; identical to SEQ ID NO: 370392

SEQ ID NO: 377284 - DNA, 486 bp, Salmonella enterica
atggagtttggaaatctgatcaatctttcacaatcatcgctgtgcaaagcattgaatatcgcttccggtaatatgtctaacatttttaaaaaactcagacagaaaggaatactcgtcgagcatcatggtcatctctatatcaactctaacattttcgctaaaggaatgagtcatcaactggatcagaaacgtaaagaacagttgagcaacgctcgcaatctttgcgcagaaatagaacagtatccagaaagttattcagctatgtcaaaaagtgaaagaagaaccctattcttagaaactgaaacaaaagaaatctatactgacgcatttgttttcagtaagaagaaaaagaataacgctgttcctaatcccaataacagcatacatgttgataaaccacgaaaagtatataaaagaacaaaggaaaatgaggaagcaagaagaaacgctgttgacgcagactctcatatgcagaaagtatcctga

SEQ ID NO: 377285 - DNA, 552 bp, Salmonella enterica
atgaaaaaactacccggttctcttgagattaagctccacgaaaaactatccaagagtgatatactaaatatattagctgagcagatgaccatgcttgaggaaacatttggcattcaggagtttaagattttctcttatcttgaatgctatattggagataagaaaaaagcattatattacagaagtcgcaacagtgccgtagccacattcaaattaaagggtcttgaatcccctgtgaacacggctaaactcatatcaaaagaaaacggacaacgtattgtttcctttgataaagatctggatataaacagaatatctgctacagtccgaaacatacaaaacaataatccttatcgtgggtggtctgaaggtatcagtgttgttcctgcctcaatcattagtaaaataattgaagtggatataatacgcgcgcaggaagaacaaggcagactttaccgtattgaagaacagcgcaagaaagaagaacaaatacgcaaagctaaagaaagagaggagtatgaacgacctttaaaggctttgatgggaaagtag

SEQ ID NO: 377286 - DNA, 1098 bp, Salmonella enterica
gtggacacggcgatttcgtccatgagcgccacctacggccacccggccaccgaagcgctggtggcgacgttggcaggtactgagcatgacaccgggctggatatcctgaagctggaaaatatcgccgcgtacttccgcgaggtgcgcaaaaagtaccacgcctttgaaggccagctgaaaggctacgacagccgcatcctggtggcgcaggtgccgggcggaatgctcactaacctcgaaagccagctgaagcagcagaacgcggcggacaaactcgaccaggtgctggcggaaatcccccgcgtgcgcgaggacctcggctttattccgctggtgacccccacctcacagattgtcggcacccaggcggtgctcaacgtgctgacgggcgaacgctacaagaccattgccaaagaaacggcgggcattctgaaaggcgaatacggccacaccccggtgccggtgaacgccgcgttacaggcccgcgtgctggaaggaggcgctccggtgacctgccgcccggcagacctgctgaagccggaactggctgaactggaagcggacgtcaggcgccaggcgcaggagaaggggattcagcttgcgggaaacgccatcgacgacgtgctcaccgtggcgctgttcccgcaaatcggcctcaaattcctcgaaaaccgccacaacccggcggcgtttgagccactgccgcaggcggaagccgcgcagccggtgacaaaagcagagaagcctgccgcttccggtatctacaccgtggaagtggaaggcaaagcctttgtggtgaaggtcagcgacggcggcgatatcagccagctcactgcggctgcacctgctgcctcttctgctcctgccaccgccccggcaggcgccggcaccccggtcaccgcgccgctggcgggcaacatctggaaggtgattgccaccgagggccagagcgtggccgaaggcgacgtgctgctgattctggaagccatgaagatggaaaccgaaatccgcgccgcgcaggccgggacggtacgcggtatcgcggtgaagtccggggacgcggtttccgtgggcgacaccctgatgacgctggcgtaa

SEQ ID NO: 377287 - DNA, 387 bp, Salmonella enterica
atggcggctaagatgattcaggcgggttataaggtcgcctactgcgctgaagcggtggtaagacactcccataattataccccgcgagaagagtttcaacgatattttgatactggtgtatttcatgcttgttctccgtggattcagcgtgactttggcggagccggtggtgagggtttccgcttcgtaaaatcagagattcaattcctgcttaaaaatgcaccgttctggattccaagagctttattaacaacctttgctaaattcttgggttacaaattaggcaagcattggcaatctttaccgttgtctacatgtcgctattttagcatgtacaagagttattggaataatatccaatattcttcgtcaaaagagataaaataa

SEQ ID NO: 377288 - DNA, 375 bp, Salmonella enterica
atggaaggtcagttaattttttgttccgattcaatactacggtttcagtccgattacgatgaaaccgctgccgttccattgctatccatccagaacgtcatagccgataccgatccgttctttcttctccgtttcttccaccataccgttctgattgaagaaggaacaacgctggcaagtatctttctggcaatagaaccgtggaaggctttgttagcggcttatctggacagagatgttggtgcttatatagatgaggtaagaaaaccgtccgggccaacgacatgggatattgaatggattgggattgatcgccgtagcatggtttaccgcgcttataaaacaaaagaaatcttaattaagctctcacaataa

SEQ ID NO: 377289 - DNA, 129 bp, Salmonella enterica; identical to SEQ ID NO: 372520

SEQ ID NO: 377290 - DNA, 1461 bp, Salmonella enterica
atggaaactataaccaagaaagcacgttccctttatatcccttacgctggccctgtattgctggaattccccctgttaaacaaaggtagcgcttttagcgtagaagagcgccgcaacttcaatttgtcagggctgctgccagaggtcgtcgagtcgattgaagaacaggccgaacgcgcctggctccagtatcaggggtttaaaacagaaatcgataagcatatttacctgcgtaacatccaggataccaacgaaacgctcttttatcgactggtgcaaaaccatcttgaagagatgatgccggttatctataccccgaccgtgggcgcggcctgtgagcgcttctctgagatttatcgccgggcgcgcggcgtatttatctcttatccgaaccgtcacaatatggacgacattttgcagaatgtgcctaaccacaacattaaagttattgtggtgacggatggcgagcggattctggggcttggcgatcagggcatcggcgggatggggatccctatcggtaagctgtcattatacaccgcctgcggcggcattagtccggcctatacccttcccgttgtgctggatgtcggcaccaacaatcaacagttactcaacgatccgctttacatgggctggcgtcatccgcgcattaccgacgatgagtattatgcgtttgtcgatgagtttattcaggccgttaagcagcgctggccagatatcctgctacagtttgaagatttcgcgcagaaaaacgcaatgccgctgttgacgcgctatcgtgatgagatttgctcctttaacgatgatattcagggcaccgcagccgtgaccgtcggtacgttgatcgccgccagccgcgctgccggcagtcagcttagcgagcagaaaatcgttttcctcggcgcgggttccgccggatgtgggattgctgaacaaatcatcgcgcagactcagcgtgaaggtttaagcgaagatgccgctcgacagaacgtttttatggtcgatcgcttcggcctgttgacggaccggatgcctaatttattgccgttccaggcaaaactggtgcagaaatgcgacaatctccagcactgggataccgaaaatgacgtgctgtcgctgctggatgtggtgcgtaacgtgaagccggatatcctgatcggggtttccggccagaccgggctctttactgaagagatcatccgcgagatgcataagcattgccctcgcccgatcgtcatgccgctctctaatcccacctctcgcgtggaggccacgccacaggacattatcgcctggacggaaggcaacgcgctggtggcaaccggcagtccattctcgccggtcatctggaaagataagatttatccgatcgcacaatgtaataacgcctatattttccccggcatcggtctggggttatcgcttccggcgcatcgcgcattactgatgaaatgctga

SEQ ID NO: 377291 - DNA, 432 bp, Salmonella enterica; identical to SEQ ID NO: 370185

SEQ ID NO: 377292 - DNA, 165 bp, Salmonella enterica; identical to SEQ ID NO: 371553

SEQ ID NO: 377293 - DNA, 279 bp, Salmonella enterica
  misc_feature (164)..(173): n is a, c, g, or t
atgagcaccgcaactgactttaagacactcctcgacaatataaaaatagataatgcaggccagattagtaaaaggtatggtcgtataactaaggctttgaaccaatacttttataacttagattctaagacagccaattcactacaggttggttcctatgggcnnnnnnnnnnttcacagggattcgagggatctctgatcttgatatgctttactttctacctgcaactgcatggccaagattccgagatcgacaatcgtatttattacaggttgtga

SEQ ID NO: 377294 - DNA, 681 bp, Salmonella enterica; identical to SEQ ID NO: 368610

SEQ ID NO: 377295 - DNA, 171 bp, Salmonella enterica
atgaaatacaccagtatcaaaatatcgttgaaactcttctcgcggggtataattatgggagtgtcttaccaccgcttcagcgcagtaggcgaccttataacccgcctgaatcatcttagccgccataaacatatcctcggcaagaattgtatgttcaggaaacccacttaa

SEQ ID NO: 377296 - DNA, 1320 bp, Salmonella enterica
atgaacatgacctctcgctctacacaaacagatataccgcgtcagcgctggctacgaattattccaccgatcctgatcgcctgtattatttcttatatggaccgcgtcaatatcgcctttgcaatgccgggcggaatggatgccgaactgggtatttccgccaccatggcggggctggcaggcggtattttctttatcggttatctgtttttacaggttcccggcggcaaaattgccgtccacggtagcggtaagaaatttatcggctggtcgctggtcgcatgggcgataatttccgtcctgacgggcataattactaaccagtaccaactgcttatcctgcgctttttactgggcgtggcggaaggcggtatgttgcccgtcgtactgacgatgatcagcaactggttccctgatgccgaacgtggccgcgccaacgcgattgtgattatgtttgtccccattgccggcattgttaccgcgccgctctccggctggatcattaccgtactcgactggcgctggctatttattatcgaaggtctgctctccgtcgtggttctggtgctatggtcctacaccgtttatgaccgtccgcaggaagcgcgctggatctcggccgccgaaaaaaattacctggttgagacgctggccgccgagcaaaaagcgattgccggcaccgaagttaaaaacgcctctctcggcgcggtgctttccgacaaaacgatgtggcagcttatcgcgctgaacttcttctatcagaccggcatttacggttataccctgtggttgccgaccattctgaaagagttgactcacagcagcatgggccaggtcggaatgctcgccattctgccttacgtcggcgcgattgccgggatgttcctgttctcctccctctctgaccgtaccggtaaacgcaaactgttcgtctgcctgccgctgattggcttcgccctgtgcatgttcctgtcggtagccttgaaaagccacatctggctggcgtatgcggcgctggttggctgcggattcttcctgcaatcggcggcgggcgtgttctggactatcccggcgcgtctgttcagcgcggaaatggcaggcggcgcgcgcggggtgatcaacgcgctcggcaacctcggcggcttctgcggtccttacgcggtaggtgtcttaatcaccctctacaacaaagacgctggcgtctattgcctggcgatcgccctcgccttagctgcactgatggccctgctgctacccgcgaaatgcgatgcgggcacaacgccagcaaaaacgatgaccccacgcaaacacgcggcctga

SEQ ID NO: 377297 - DNA, 999 bp, Salmonella enterica
atgaaagtgacttttgagcagttgaaagcggcgtttaaccgggtactgctttcacgcggcgtggcggctgatactgctgacgcctgcgcggaaatgttcgctcgcaccaccgagtccggcgtttattcacacggcgtgaaccgctttccccgcttcattcagcaactggacaatggcgacatcattcctgaggcaaagccgcagcgcgtgaccagcctgggggcgattgagcagtgggatgcacagcgcgctattggcaacctgacggcgaaaaagatgatggatcgggccattgaactggcctccgaccacggcatcggtctggtagcgctacgcaatgccaaccactggatgcgcggcggcagctacggctggcaggcggcggaaaaaggctacatcggcatctgctggaccaactcgattgccgtcatgccgccgtggggcgcgaaagagtgtcgtatcggtactaacccgctgatcgtcgcgatcccttccacgccgatcacgatggtggatatgtcaatgtccatgttctcctacgggatgttagaagttaaccgtctggcgggccgcgaactgccggtggacggcggtttcgacgataacggtcagttgaccaaagcaccgggcgtgatcgagaaaaatcgccgcatcctgccgatgggttactggaaaggttctggtctgtcaatcgtgctggatatgattgccacgctactttccaacggctcttccgttgccgaagtgacgcaggaaaacagcgacgaatacggcgtatcgcagattttcatcgccattgaagtcgataagctgatcgatggcgctacgcgtgacgccaaactgcaacgaatcatggattttattactaccgccgaacgcgccgacgacaacgtcgcgattcggctgcccggccacgaatttaccaaactgctcgatgaaaaccgccgtcacggtatcaccgttgatgacagcgtctgggccaaaattcaggcgctgtaa

SEQ ID NO: 377298 - DNA, 249 bp, Salmonella enterica
atgctaagtacggcaggcagtaacgcagaaagcgatttacgcaaacggcggcgaaagcaatggaatatgtcagcaatgagtaagcaggcgccaggagaggatgactcgccactgcgtggctcgccctgcgggccgttgctgacgcaacgttctctcgcttcgctcgagtcgaacctcttgcccccggaggttctcatcctcttcaggcttcagatacaaaaaaccctgctcgttgagcagggtttttga

SEQ ID NO: 377299 - DNA, 735 bp, Salmonella enterica
atgagtaaaaggacggttgctgatgttgttttatcgccttctttgatgtgtacagatttgctgagtttaagcgactcggtgagggaactggaggaaataggtgtagacgcgctacatattgatcttattgatagcacgtttagtcccagtatgccgttgggcttagaggtaatcaggcaattacgtgaaaaaacgaatctcgattttgatatccatattatgtcgatgaataatgagtggtttattaaacaggcgctcgatattggtgtacggcgggtttcattccattatgaaacgtcactgcatcccgacaggctggtaaatctaattaagaaacaaaaagttgaagcgggaatcgcactcaaccccgccaccagtttacgttcacttgactatcttcttccttcgttagattacgttttacttatgctgattaatccggggtttgccagtaataaagatgaacagcaggttccttatgcggaagataaagtccgccatctgcatgcccggattgcggaggcaggaactcatactgcaatacaggttgatggtagagtctcatttgccaccattcctgggttggtcgcggcgggggcgagtaatctggtactcggcagcactgggctttttttccgtggggccacgcttatggagaacaagtcacaattaaatgaaaaaatcgctgcgggactggcgcaacgggcgaaggggggagtggcctgtgagttataa

SEQ ID NO: 377300 - DNA, 558 bp, Salmonella enterica
gtgagttataaagcgaatcagaaacgtgtattacatgagttaaacgccactttggaaaacattgcatctaaggatgttgagcggttactggagatgattgaagctgctgatagtgtctttttcgtgggggttggaagagtcttattgtctttggaagccatagctaaacggttagcgcatctgggaatcaaaacgtatgtggtcgggcaaataacagaaccggcaattaccaaaaatgatcttctgattgttggatcgggtagtggtgaaagtatgtttcccgtgggtatagccagaaaagcgaaaagttttaatgcccaaattgtacatattggtgctaatgctgaaagtagcatgaaagaattgtgcgaccattttgttcgtattccggtaaaatcaaaacttaatctggcgtctgaaatcccttcggttcaaccgatgacatcgctttttgaacaatcacttctgttacttggcgatattattgcgctccagttcattgataatcataaaattaatatggaattgctctggcaatatcatgccaaccttgaatga

SEQ ID NO: 377301 - DNA, 651 bp, Salmonella enterica
atgtcaaagatcattatttttgatatggatggcgtacttattgattctgaacctgtatggcaacaggttgaatgcgaattttatcttagacattacaatatctctctcggcccaaaggattttgatttattcacagggatgccggtgggtattttcctgcggaagttgcatgaaaatcatggtcttccgtctaataatctgccgcaaattcaggacactatagttgcccaggttgcagaaaaaatacgtcaacaaccgaaacctatcgcgggtatctttgagttacttaattatctacagcggcggggatcgttaatggctgtagcctcttcttcaccgcaatatcaaatagataatgttcttaatacacttaacatcaggcactatttttctgccgtagtttccgcagacgggctttcgtacggcaaaccgcacccggaaatatttttgactgctgccgcaatgttgaaggcagaaccggaaacatgcctggtgattgaagattcattaaatggtgttattgcagcgagggctgccgggatgcgcgttattgcattacctgctgaacaccaacaaaatgacccgcgttttactattgccgacacagtaattttgaaccattgccaggtgttagagtggttgactgcataa

SEQ ID NO: 377302 - DNA, 1092 bp, Salmonella enterica
atgattaccaccgcaatatttcccggaagatatattcagggcgctaatgctattgagaaatgtctgggaaatgaattagcccgttttggtaaaaatgcgatgattcttgaggatcccattgttcacaaaaatattggaggaaaaattaccgaagccttgaatcccaacgttacgtttgaacttgaaatatttaattgcgaatgctgtgatgaagagatcgagagaatttctacctcagcacaggcatgttcggcagaaatgattgtgggtatcggaggcggtaagacactggatacggccaaagccgttggcgccaaattgaatattccgattatcgttattcctactcttgcctccaccgatgcgccatgcagttccctcgttgtgatttataccgctgaaggtcagttcaagcgctatatgatgattccccataacccttcgctggtttttgtcgattctcaagtgatcgccgacgcacctgtgcgttttctgctttctgggataggcgatgccgtagcgacatggttcgaagcggaagattgtcgcattaaaggtgcaggaaacatgaccggaaggcctgggccaatgtccgcctacgctctggcaaaattatgcttcgatacgttgctaacctatggtgaacaggcagtttctgcatgtcgcatgcaccaggtcactccggctcttgaacacgtcatcgaagccaatacattactttcaggactaggttttgaaagcgggggtctcgctgctgctcacgcaattcacaacggactgacggtgttaccagaaacgcataaattctggcatggagaaaaagtcgcctttggcacgcttgctatgttactgatgacagacagagagcctgacctaatcaggcgagtctatcagttttaccggcaaatcggactgcctgttacgctcgcggagattggcataaccgatcgttctgttcaacatttgatggaaatcgcactagcagcctgtcaacagggtgagaccatgcataatgaaccctttgaaattagacctgaaaatatcgttgcagcattgattgccgcggatgaatacggtagacgttattattaa

SEQ ID NO: 377303 - DNA, 288 bp, Salmonella enterica
atgacaacagaacttaatttaagtgctcgtttcgttattaaaaatgagcatggaattcacgcacgcccaggcgcacattttgttgctgcattaaaaccatacagatgtactgtaaaaatcgctaatcttgctcgaagcaataactatgttaacgctaaaagtctgatggcattaatgtctttaggtattaaaaaaggacatgaggtcaacatcctttttcatggcgaagatgcacaaagtgcattacaaaagatacgctgcgaaattgagaatggattaggagaataa

SEQ ID NO: 377304 - DNA, 1173 bp, Salmonella enterica
atgaaacgtgtattaattgtgggtgctggccgccttggcaaagggttcgttggcgaaacgtttgataatgcaggctggaatattacattccttgataaagatcagagagttattgatgctctaaacaaacaaaataaatataccgtccaggttttccgaactgatgatatcattatgcatgaagtcactaattttaatgcttttactacagacgatcagtactctgtgatgagcgacttccttgagtcatcggttattatgtgtccactttatcctgaagactttgaagagtcagcacattatctgggtaaatgctttgaacgtcaattccagaccgctcctgaaaaaaaaatgacgttaatttgcctgaccaacaaaaatcatataatcaaagatattgaatcgtggtatcgcaatgccatcccctcttcagaagcacaaaactggttcgatactcacgtagccgttcgcgattctattgtccgccgttccacggatgcgcagacgcactatgcaacccagattgatagcacagccgttgcctctctattaatacagtcaccactctacaacgacattagtgatgttgaatggttagagccccgtgaacatctggaaatgctcaaagacattaaagtttttactattaacggtccccacgccaccaccgctttctatggccacctgaaaggttacaaaacgattcctgatgcctccgcggatccgtctgttgcaaaactggcgaacgccgtgcacgatgttactattactgccgtaatgaaggaatatccgcaaatcactcgcgacgcattgaaagatcttgaatatcttccgaaagcaaaaaatgagcttccagactccatccaccgtgtcgcttacgatcccatccgaaaactagcgtatcaggaccgtttgatgggggtagtacagctttgcctgaaatatgatctcgactattcaccgttaaccaaagcaattgcctgtggtctggcatattatgctgaggacgataaggcatcagtgaaattacagcggtttattcagcaaaatggtttgctgacgagtgcagcaaaagtaatagggttaccgaaagaccacccggttacacttgatgtggcatatcaatacttagcactggatgccgaaaacttaattccaaccatacagctttaa

SEQ ID NO: 377305 - DNA, 699 bp, Salmonella enterica
atgaaagctgccagacaagacatcattctacagatacttgaaaaggaaaaaaagattgtagccagtaaattaagtgagcgcctaaaagtttctgaagatacgattaggcgcgacttaaatgaattggcaagccagggtttaatcagacgcgtgcacagtggtgctatacgcgtagggcctgcggttactgagtttaatgtccgccaggacttaaatattagtgaaaaagtgaaaattgccaaaaaggcgatacatttaatcaaagaaaatagtgttattttaattgatggagggacaacgaattacgaattggtaaaattaattccgaaagatttaaaatgcaccgtaatttctaacaatattcctattctacacttactcagtgattatcagaatatagaagttatgggattaggtggcagactctacaaaaattctttggtattaattggtgccgagacaattcgtgaactggaatcaatccgcccagacatttattttatgggcgttgcacatgttgatagtgaagtcggtgtaacgcttcctggtctggatgaatgttatacaaaacaaaaaatggccgaggtctcaaatgaggttgccattcttgttacggaagaaaaactcgagaccaggtctaatttcgtcgtgtcctctctcaaggatataaattatatattcacgagcaaggacgcataa

SEQ ID NO: 377306 - DNA, 429 bp, Salmonella enterica
atgaataatattttcacgcctgataacatcattctcaatgcacaagccaaagataagtttgacgctatacgaatcaccggaaacatccttaaggaaaatgggtatgtcacggatgaatacattaaaagaatgatagtgagagaagaaattgtttcaacttatctgggcaatggtttagccatcccgcatggaacagatggttctgattgtgaaatcattaaaactggcatctcactagtccagtttcccgatggggtagactttggcgatggcaatactgcatatataaccattggtattgcaggaaaagaagccgagcatatggacttacttaacaaaatcgccttaatttgcattgaagaagataatgtccagacactgcgtaatgccacatctatagaacaggttttacaagtgctaaacatgtaa

SEQ ID NO: 377307 - DNA, 1464 bp, Salmonella enterica
atggggaacaatcaaattgccaatagccctacgttagcgaaaataagaaagtttggtggagttatgagcggcatggtcatgccgaatctgggtgtttttgtaggatggggactgatggccgccatctttatacccaatggctggttccctaatgaaaaattaggtgagatggtcggcccaattctgaattatcttttcccattactcattggttatacagcaggctataacattcatggccaacgtggaggtgttatcgccgcatttgcaactatgggcgtcatcgtcggttcaaatattacgatgattagcggggcgatggttatgggtcccctttcttcatggttgctaaagagattcgaccaaaaagtacaacataaaattaaaccgggatttgaaatgttcgtaaacaatttcagtctcggtattatcgggttgctttgcgccatttttgcctatatgaccgttgggccggtaatccgcttacttatcgtcatcatcacctcgggcgtgaactggtgtacaagccataatctgctgcctttgctttccgtttttatggcccctgctcaagtactcttcctgaataatgttgtcaatcacggtattcttgcgccgattggctttgctcaggttcctgaactgggtaaatcgatcatgttcctcgttgataccaataatggcccattacttggaacattaatggctatcgcactttttggtcgtggtcgggcgaaaaaaacggcaccaatggccatgtttattgccggtatagcagggattggtgaggtctactttccctttgtgctggccaaccctttactggtattcgccactatgggcgggcttgctgtctctttattcttacaggtgattatgggcggcgggctgatcggcgtggcatcaccaggcagcttaattgccattgcgatgatgacgccgaaaagcgcgattattgcgaatctggtgtccatcagcgccggtttcctcgtctcatgcacattaggctggctattgcttaaagtcagtccaggaacagaaaacgatgaagatgaaaaccctgtcatagttggaggacgtcaggttaagtccgtcactgactttgttccaggagtcacaagtatggcgacagcaaccagaggaaaaacggttcaaagcatccttgtcgcatgtgactccggaatgggttccagtgcaatgggcgcgtcagtcctgcgtaaacggttgaaagaagaaggactggactatattaccgtcatcaacgattccgcaaaccgagtaggtaaagattatgacattgtcattaccttatctggtcttatcgaacgggcaaaattaagctgtgaaaatgacgacaccgtcttcatgactgtgaagaactttattaaattaagtgattatgatgaaactgtaacattcataaaatcacagaataatatgaatcagcaagaggtgacagcatga

SEQ ID NO: 377308 - DNA, 810 bp, Salmonella enterica
atggatcaagcaacgaagtggttagatctgtcagggaaagttgtgatcgtaaccggaggaagcatggggttgggagaaaaaatggttgaaaatttgcatgctaacggcgcgaccgtcgtgtatgccgacttatcaccaaatcaaactttcagccaatgtgatgatattacctttatcaagtgtgacgtaaccgacaaaaaagaagttgaaaacttaacccagtccgttgttgcgaaatttggtcatattgatgggctggtcaataacgctggcgttagtcgtccacgtttactggtcgatgtttttaaagaaaagcctgagtacgagttgagtgaggatgacttcgactttatggtgaatgtaaaccagaaagcggtattcctgatgtcacagtctgtcgcacgtcagatggttgaacaacagtccggcgtgattatcaatatgacatccgaggcgggtgttcagggttcccgtggtcaaagctgttactctgcaaccaaagccgctgtcaatgcgtttacattttcgtggtcgaaagaattgggtccttacaatgttcgcgtggtcagcgttgagccagcaatcaatgtacccacgccaatgaacagcgaggccaatttccgtgcgcttgcttacacgcgaggtacagatcctaaccatgttcataaagactacaaaggcataattcctctcggccgaccgggtaaacttgaagagattgcagacttaatttctttccttgtctccgagcattcctcctatatcaccggttcagttattaatatcaccggcggtaagtcacatcattaa

SEQ ID NO: 377309 - DNA, 1203 bp, Salmonella enterica
atgcataaaaatattctgatcgtaggggcgggattttccgggatgtgggcagcgctcagtgcggctcgtctggtagacaaatatcaaagcgaggatattaaaatcaccgttatcgcacctcagcctgaactacgcgtgcgtcctcgtttttatgaaaacgcggtgacaacgttggtcgcgccgcttcagccgctgtttgatatcaccggcgtgaacttcctgcgcggaacggtgcggcaaatcttcccgggctcaaaagaggtgagctggacggatgccagcggcgaaacgcgagtaagccgctacgatcgcctggtacttgccagcggcagccacgtagatcgctcacaggtggccggcgctcagacacatgctttcgatctggatcagctggaaagcgcggcagttctggaacaacatctgaaagacctggcttaccaggctgaaagtgaagcgcgtaataccgtggtcgtttgcggcggtggttttacgggcatcgagatggcgcttgaactgcctggtcgcctgtgcgatatcctcggcgccgatgctaagaccagagtagtcgtagttgaacgtagcccagagccgggcgcacgctatagcgaagcattgcgtaatgttatcattgaagcctctgcggaactgggcgtggagtggctcgttaacgcagaagtcgaaagcgtggatgccgcaggcgtgacgctgaaagacgggcggacgattgcatcgcaaacggtgatctggacagttggcgtacaggccaatggcctgacggcgcagattggcgctccgcgcgatcgccaggggcgtctgcatgtgaataccgcacttcagataccaggtcacgaagatatctacgccaccggcgacgtggcctatgccgcgaccgacgacaaaggccatcatgcgctaatgacctgccagcacgcgattctgttaggcaagttcgccggtaataacgctgcggccagcttgctggaggtgactcctctgccatatcgtcaggaaaactatgttacctgtctggatcttggcgcctggggcgcagtctataccgaagggtgggatcagcaggtaaaactgacgcgcgccgaggcgaagaaactcaagatgtcaatcaccagcaagctgatctacccgccgaaagcagaccgcgcagcggcgtttgcgattgccgatccgctggcgccgtttgtttaa

SEQ ID NO: 377310 - DNA, 138 bp, Salmonella enterica
atgatgacaacattactccctctttttcgggtacctacatcattcactccctttgacggcgagcgcttcatcggcgactattcgtcgtttggcccctttttctttttcattcatatcccggatgaaaacctccgctga

SEQ ID NO: 377311 - DNA, 2742 bp, Salmonella enterica
atgacgtcgctgacgctggtgcctgttcctcccgtggcgcagcttgagggggtgagccagcattacggaaaaacggtcgcgctgaacaatatcacgctggacattcccgcccgtcgtatggtcgggctgattggtccggacggggtgggtaagtcgagtctactgtcgctgatttctggcgcgcgggtgattgaacaagggaacgttatcgtcctgggcggtgatatgcgcaatgcgaaacatcgccgcgacgtctgtccgcgcatcgcctggatgccgcagggactggggaaaaacctttatcacacgctatcggtctatgagaacgtcgattttttcgcccgtctctttggccatgacaaagctgaacgcgaagcgcgtattaccgagctgctgaacagtaccggcctggcgccgtttcgtgaccgtcctgccgggaagctgtccggtgggatgaaacaaaagctggggctgtgctgtgcgctgattcatgacccggaattactgattcttgatgagcctaccaccggcgtggacccgctttcccgcgcccagttctgggacttaatcgacagtatccgccaacggcagaccaatatgagcgtgttggtcgcaacggcctatatggaagaggcggagcgttttgactggctggtggcgatgaatgcgggcgagatactggcaactggcagcgcgcagcaactgcgggaaaaaacccatagcgcgacgctggaacaggcgtttatcgccctgttgccagaagcgcagcgccaggcgcataagccggtggtaattccgccttaccgcgctgagcaacaagagattgcgattgaagcgcgggatctgaccatgcgtttcggtcatttcgtcgcggttgaccatgttaatttccgcattccgcgcggcgagatttttggcttcctcggttcgaacggttgcggcaaatctaccaccatgaaaatgctgaccggtctgcttcccgccagcgaaggccaggcctggctatttggtcagccggtggacccgaatgacatcgacacccgtcgccgggtcggatatatgtcgcaggctttttcgctctataacgaactcaccgtgcggcagaatctggaacttcatgcccgcctgtttcatattccgccagcggagatcccggcgcgcgtcgcgcagatgagcgaacgctttatgctaacggaggtggaagatacgctccccgcgtcgttgccgctcggtatccgccagcgtttatcgctggcggtagcggtgatccatcgcccggaaatgctgattcttgatgagccaacgtccggcgttgatccggtcgccagggatatgttctggcagcttatggtcgatctttcgcgtcaggataaggtgacgatttttatctcgacccattttatgaacgaagcggaacgttgcgaccgaatgtcattgatgcacgccggtaaagtgctcgccagcgggacgccgcaagaactggtgcaacagcgaggcgcggccaatctggaagcggcgtttatttcctggctacaggaagccgcgggagcgacacctgaaaccacaataccgccatcccagatgcccgccgcgtcagataaaccgtcgcggcagggattgagcttccggcgtttgttcagctacagtcgccgcgaagcgctggagctacgccgtgatccggtacgctcgacgctggcgctgctgggaacggtaattctgatgctgattatgggctatggcatcagtatggacgtggaaaacctgcgttttgccgtactcgatcgcgatcaaaccgtcagtagccaggcgtggtcgctcaatctggcagggtcccgctactttatcgaacagccgccgctcgccagctatgacgagcttgaccggcggatgcgtgcgggagagctggcggttgccattgagatcccgcctaattttggccgcgatattgctcgcggtacgccagcgcagattggcgtctgggtggatggcgccatgcccagccgcgccgagacggtgaaggggtatgttcaggcgatgcaccaaagctggctgcaggaggcggcgagtcgtcagccgaacccggttaaacaggccgggctgctcaacattgaaacgcgctatcgctataatccggatgtgaaaagtctgcccgctatcgttccggcggtcattccgctgctgctcatgatgatcccgtcaatgcttagcgccctgagcgtggtgcgggagaaagagctggggtcgatgattaatctgtacgtaacgccgacgacgcgcagcgaatttttgctgggtaaacaactgccgtatatcgcgctgggtatgctgaacttcttgttactgtgcgcgctgtcggtctttgtattcggcgtgccgctgaaaggcagctttctcacgcttaccctggcggcgctgctttacgtcatcatcgccaccggtctggggctgctgatctccacttttatgaagagccaaattgccgctatttttgggacgtcgattattaccctcattccggcaacacaattttccggcatgatcgatccggtagcctcgctggaggggccgggaagatggatcggcgagatctacccgaccagccattttctgacgatcgcgcgtgggacgttttccaaagcactggatctgtccgatctttggcccttatttatgccgctactgattgctgtcccggtggtaatgggtctgagcattctgctgctgaaaaaacaggaggggtaa

SEQ ID NO: 377312 - DNA, 1035 bp, Salmonella enterica
atgaaaggttatctgcaaaccgtaacaggcccgattgcgcaggccgacatgggacttacgctcccgcatgagcatctgtttaacgatctctcttccgtcgtggataaaccctgttatgccttctcagaacaattagtcggcaaaaaagtgagcgcggaattacagtggggacttaaacatgacccctactgttgcgccgataatatggataaaaagcctattcaagatgtgatttttgaagtgaacaattttatggcgctgggcggcaggacgattgttgacgccacgggttccgaatctatcggacgcgatgcgcaagcgctgcgggacgtggcgctgcaaactggccttaacattgtggcctcatccgggccttatctggaaaaattcgaaagtagccgcattcaccaaccgattgataaactggcggcgcgcatcgacaaagaactgaatcagggaattggcgataccgatatccgtgccggaatgattggcgaaatcggcgtctcgccagcctttaccgacgcagagcgtaatagcctgcgcgcggcgtcgctggcgcaaaacaatagcccgcaggtggcgatgaatattcatatgccgggttggctcagacgaggcgaggaggtgctggcgattgtccttgatgagatgaaagtcgcccctggcaaagtgtctcttgcccatcccgatccttccggtaaggacgtgtcctatcagcggagcctgttggatcggggcgtgtggctggagttcgatatgattgggctcgatatcaccttccccaaagagggcgttgcgcctggcgtgcaggagaccgcggatgccgtcgcccatcttattgagcttggttacgccgaccagctcgtgctcagtcacgatgtgttcctgaaacagatgtgggcaaaaaatggcggtaacggctggggctttgtgcccaatgttttcctggcctatctggccgagcgtggcattgacggcgccacattacgtaaactgtgtatcgataatccggcgcgcctgcttaccgcctga

SEQ ID NO: 377313 - DNA, 762 bp, Salmonella enterica
atgaataatgccaacacaacgttaaaggtgctctttattggagaatcctggcatatccatatgatccattcaaaaggatatgacagctttacctcaagtaaatatgaagaaggagccacctggctactggcgtgtttaaaaaaaggaggtgtttctgtcgactatatgcccgcacatacggtacaaatcgcttttccagaaagcgtggacgatttaaatcgttatgacgttatcgtgatcagcgacatcggcagtaacacttttttattacaaaacgacactttctatcagctaagaataaaaccaaatgcccttgagttaatcaaagagtatgttcgtaacggcggcggattattgatgattggcggctacctttcctttatggggattgaagcaaaagcaaattataaaaatacgatactggccgaggtactgccggtagtgatgcctgatggcgacgatcgcgttgaaaaaccggagggcgtctatgctcaggttgaaaaccctgaacacccggttattaaaggcttttctgattatcctccttttctgggatataaccaggctgtcgcgaaagaaaataccgccgtggtgttaaccatcaataacgaccccttactggtcttcggcgaatatcaccacgggaaaaccgcttgctttatgagcgactgcgcgccgcactggggaacacagcaatttatggcatggccgttttacaccgacctgtgggtcaacacgcttaaatttatcgccaaacgataa

SEQ ID NO: 377314 - DNA, 1215 bp, Salmonella enterica
atgaaatttgaacgccaccatgaaatattgaaaaaaattggcacgtccgggatcgtaaaagtctctgttctggcgaaaagtctgaacgtcacaaaagagacaattcgttcagatcttaatgaattggccagactcggttacctgacccgctgtcatggcggcgcgtttataactctcgactcgctggataacgtagcgaaaaacgaaattgcttacgcacttgaacattacgaaaaaacacagggcataaaaaagggtcgctccgatatgaaaagtcatgtatgtgtaattggatcatttaatgtcgacataatcagctatttgcccaggcttcccgcggtcggcgagtcgctgcttgccaataaatttattttttctcccggcggaaaaggctgcaaccaggcgttggcggcaagctacgcagactcagacgtacattttattactaaagtcggtgcggatcattttagcgaatatgctatcaattttatgaacgcctcaaaaatacataaaagcattatttaccagactcagggaacgcaaaccggtactgcaacgatcctggttaatgaggacaccggagataacgttatcgctatctatcctggcgccaatatgactattacaccagatgaggtcgtgatccaacaagaagcgattattaacgctaatattgttcttctgcagcttgaaactaattatagcgcattgcgccaggccatcgctctggcgcaaaaaaacagtatcccggtaattattaatccagcgccgtataacgacggggttaattctattattgaaaatattgattacattacgcccaacgaaacagaggccggactcctggcagggattgaggttacagatattgcctccgccagagaggcggcaaaaattatccaccagaaaggtgtaaaaaccaccattatcactttaggcagcaaaggttcgttggcctatgacgggagaaaatttatctattccccagcgttcccggcggtagtcaaaaataccgcgggcgcaggcgatgcgtttaacggcgcgctcgcttcaggcctcgccaaaggcaaaccgctggagtctgcgctgtgctacgccagcgcctttgcctccctggcagtagagaccgctaacgcctctgatatgccggaacatgaatccgtcattcaccgtattcagagcacatcatatcagcaatctatctctagccattaa

SEQ ID NO: 377315 - DNA, 621 bp, Salmonella enterica
atgagcacaacattacgcccacacgaccttatctggctgaacgcgcgcgacgcgctcgaagatgtcacggaatcctgggtggataccgtctggcatagcggtctgccggtggtagtgcggcgtgatgttgatgcgcaggggcgtgtgcccgttggtgtgcgcggcatgaagcgcgaccaacgggcggcgggctgggtgcagccggcggccgtcgttcgtatctgctcgccgcaatcgctggtcgactcgcagacgttgttgcgctcgccctttatctctcagccgccggttcaggtagctttattattggctcagcaaacgtggccttggacgtggggcattaccggcagtaccggctatgcgctggcgaccggtattccggttatccatgcggcaagcgatctggatctgctgatccgcgcgccgcagccgctggcgcgtgaggagcttaaaacgtggcagcagcagttagcgggcggactctgccgggcagacacccaggtggaaacgccgcacggcgcgtttgcgctcaatgagtggctgcgcgatggcaaagcattgttaaaaacctcgcaggggccgcggctggtgagcgacccgtggagcagggaggagtcatga

SEQ ID NO: 377316 - DNA, 141 bp, Salmonella enterica
atgcattcgccgttagtgattgcgcccgggggcagcgcggcgatgaaggttaaagcggacaacgtgataagcgctccagtgctgacttacgtcaacgagtatggcgcgcctctgccgttagtttcagcgcctgcacgttaa

SEQ ID NO: 377317 - DNA, 1572 bp, Salmonella enterica
atggccaatatcgaaattcgccaggaatcgtcatcggcgttttatataaaagtacacgaaaccgataatgtcgcaattattgttaatcaccacggtcttaaagccggaacacgttttccggatggactggaactgactgaacatattccgcaaggccataaagtcgctctgacggatatcctcgctcacgacgaaatcgtccgttacggcgaagtcatcgggtatgcggtacgtgacatcccacgcggaagctggatcgacgagtcgctggttgaactgccaaaagcgccgtcgctgaatacgctgccgctggcgaccaaagtgccagaaccactgccgctgctggaaggctacacgtttgagggctatcgtaacgccgatggcagcgtcggcaccaaaaatctgcttggcattaccaccagcgtgcactgtgtggcgggcgtggtcgagtatgtggtgaaaatgattgagcgcgatctcctgcccaaatacccgaatgtcgatggcgttgtagggctaaaccatctgtacggctgcggcgtggcaatcaacgcgccggcggcggtcgtgccgattcgcacgattcataatatcgcgctcaaccccaattttggcggcgaagtgatgctgattggcctcggttgcgaaaaactgcaaccggaacgactgctggaaggcaccgaggatgtccccgccatcgccgtcgaaagcgccagtattgtgcgtttacaggacgaacagcatgtcggctttaaagcaatggtcgatgatattttgcaggtcgccgaacgccatctgacgagactgaaccaacgccagcgcgaaacctgcccggcttccgagctggtcgtcggaatgcagtgcggcggcagcgatgcgttttccggcgtcacggcaaacccggcggtgggttacgcttccgatctgctggtacgctgcggcgcgaccgtcatgttctcagaggttaccgaagtgcgcgatgccattcatcttctgacgccgcgcgtcatcaacgaagccgtgggtaaacgtctgctggatgagatggtctggtacgataattaccttgatatggggaaaaccgatcgcagcgctaacccgtcccctggcaacaaaaaaggtggcctggcgaatgtggtggaaaaagcgctgggctctatcgctaaatccggtcagagcgccattgtggaggtattgtcgccaggccagcgccccaccaaacgcggcctgatttacgccgcgacgcccgccagcgatttcgtctgcggcacgcagcaggtcgcttccggcattaccgtacaggtctttaccaccggacgcggcacgccgtacgggctgatggcagtgccggtgattaaaatggcgacgcgtaccgagctggcgaaccgctggtatgacttaatggatatcaatgcaggcaccatcgccacgggtgaagagacaatcgaagatgtgggctggaagctgtttcactttattctcgatgtcgccagtggtcggaaaaagactttttcggatcaatggggcttacataaccaactggcggtatttaacccggcgccagtgacctga

SEQ ID NO: 377318 - DNA, 189 bp, Salmonella enterica
atgattatccgccatatgctgtttatactgaatagcgaattcagtgtatctgacgagttatttgaaaatgccatgataataataaaaaacgataaagatattggggcggtatattgtgctacaggatgtgttaccacactagaaatagaatctggagactcattcttattttcagataagcatttttag

SEQ ID NO: 377319 - DNA, 990 bp, Salmonella enterica
atgcacattacatacgatctcccggttgcaattgaagatatcctcgaagcgaaaaaaagactagcggggaagatatataaaacgggaatgcctcgctctaactattttagtgaacactgcaaaggcgaaatatttctcaagtttgaaaatatgcagcgtacgggttcatttaaaattcgtggcgcttttaacaaacttagctcgttaacggaggctgaaaaacgtaaaggcgtcgtggcctgttccgcaggtaatcatgcacagggcgtttctctttcttgtgcaatgcttggtattgacggcaaagtcgtgatgccgaagggcgcgccaaagtctaaagtggcggccacctgtgattattcggcggaagtggtgctccacggcgacaacttcaatgacaccattgctaaggtgagtgaaattgtcgaaaccgaaggccgcatttttattccgccttacgacgatccaaaagtcattgccggacagggcactattggtctggaaattatggaagatctgtacgatgtcgataatgtcatcgtgcctattggcggtggcggtttaattgcaggtattgccattgcgattaaatcgattaaccccaccattaaagttatcggcgtgcaggccgaaaatgttcacggtatggcggcgtcttattacgctggcgaaataaccacgcaccgaacgaccggcaccctggcggatggttgtgatgtctcccgcccgggtaatttaacctatgaaatcgtacgtgaattagtcgatgacattgtcctggttagcgaagatgaaattcgtaacagtatgatcgctttaattcagcgcaataaggttattactgaaggcgctggcgctctggcttgcgcagcattattaagcggaaagttagatagccatattcagaacagaaaaacggtcagtattatttctggcggtaatatcgatctttctcgtgtatcacaaattacgggtttagttgacgcttaa

SEQ ID NO: 377320 - DNA, 777 bp, Salmonella enterica
atggaaatcaccgaaccacgacgtttatatcaacagcttgccgccgatctgaaggcgcgtattgaacagggtctttaccaccctggcgataaactgcccgcagaacgatttattgccgaggaaaaaaacgtcagccgtaccgtggttcgtgaagcgatcatcatgctggaggtggaaggatatgtcgaagtccgtaaaggttccggcattcatgttatttccaaccagcccagacactatatcgttccggatgaaaagctggaattcgccaattatggccctttcgaactgcttcaggcacgacaattgatagagagcaatatcgccgagttcgccgcgacgcaagtcacaaagcaagacatcatgaagctgatggaaatccaggaaaaagcgcgtaatgaaaaatgttttcgcgactccgaatgggatttgcaattccatgttcaggtagcgttagccacgcaaaactccgcgttggctgccattgtcgataagatgtggacacaacgcgtacacaacccttactggaaaaaattgcatgatcacattgacttgcgcacggttgacaactggtgcgacgatcacgaccagatcctgcgcgcgctgattcgtaaagatcctcacgccgccaaagtggcgatgtggcagcatctggagaacacgaaacagatgttatttaatgaaaccagcgatgatttcgaatttaatgccgatcgctatctgtttgccgaaaatccggttgtacaccttgataccgtctctggcggcgcaaaataa

SEQ ID NO: 377321 - DNA, 489 bp, Salmonella enterica
atgccgatgctgtttgccgatcttggctgcgttattggcggttatctgccgccgttattccagcgttggttcggcgtaaacctgattgtttcccgtaagatggtcgtcacgcttggcgctctgctgatgataggcccagggatgattggcctgttcaccagtccgtacattgccattatgttactgtgtatcggcggttttgcgcaccaggcgctctccggcgcgctgattacgctctcctctgacgttttcgggcgtaatgaagtcgcgacagcgaacggcctgaccgggatgtccgcctggctggcaagtaccctgttcgccctggtcgtcggcgctctggcggatactatcggctttagcccgctgtttgctgtactggcggtgttcgatctgctcggcgcgttagttatctggacggttttgcaaaataaacccgccagtgaaactaccgccagtcagatacatgttcctgcaacacaaagctga

SEQ ID NO: 377322 - DNA, 810 bp, Salmonella enterica
atgcgtaaaattaaagggttacgttggtatatgatagcactggtgacggtgggtaccgtgctgggctacctgacgcgaaacacggtggcggcagcagcgccgacgctgatggaagagttacacatctccacccaacagtattcttatatcatcgctgcttattctgctgcctataccgttatgcagcctgtcgcaggctatgtattagatattctggggacaaaaatcggttacgctttcttcgctatcgcatgggccgtattctgcggcgccaccgcgctggcgggaagctggggtggcctggcgttggcgcgcggggcggtaggcgcggcggaagcggcgatgatccctgcgggcctgaaagccagctccgagtggtttccggcgaaagaacgttctatcgccgtgggctattttaacgtcggttcctctattggcgcgatgattgcgccaccgctggtggtctgggcaattgtcatgcacagttggcagatggcgttcattatctccggcgtattgagtttcatctgggcgatgtcatggctgctcttttataagcatcctcgcaaccagaaaaagctgaccgatgaagagcgcgattacattattactggtcaggaagcgcaacatcagaccgacaatgcgaaaaaaatgtctgccttacaaattctgcgtaaccgccagttctggggcatcgctctgccgcgttttctggctgaaccggcatggggaacctttaacgcgtggattccgttattcatgtttaaagtctatggctttaacctgaaagaaattgcgatgttcgcctag

SEQ ID NO: 377323 - DNA, 1413 bp, Salmonella enterica
atgacgccgtttatgaccgaagattttttactggatactgagtttgcccgccgtctgtaccatgattatgcgaaagaccagccgattttcgactaccattgccacttaccgccgcaacaggttgccgaaaattaccgttttaagaatctgtatgacatctggctgaaaggcgatcattacaaatggcgcgcaatgcgtaccaacggcgtgccggagcggttgtgtaccggcgatgcgtccgatcgtgagaaattcaacgcctgggccgctaccgttccgcataccattggcaacccgttataccactggacgcatctggagctacgccgtccgtttggcatcactggtacattgctgtctccggctactgcggatgagatctgggagcagtgtaacgcgctgttggcgcaggaggctttctccgcgcgcggtatcatgcggcagatgaatgtgaaaatggcaggtacgaccgacgatcctgtcgattcgctggaacaccacgccgcgatcgcgaaagatgacacttttgacattaaagtgttgccgagctggcgtccggataaggcgttcaacattgaactggcaacctttagtgattacatgaccaaactgggcgaggcggcggataccgacatttgtcgctttagcgatctgcaaaccgcgctgactaaacgtctggattactttgctgcgcatggctgtaaagtctctgatcatgcgctggacgtggtgctgttcgctgaagccagcgaggctgaactggacggtattctggcgcgtcgtctggcgggagaaacccttagcgagcacgacgtggcgcagtttaaaacggcagtgctggtgttccttggcgctgaatatgcgcgtcgcggctgggttcagcagtaccacattggcgcgctgcgtaataacaacctgcgtcagttcacattgctggggccggacgtgggctttgactccattaatgaccgtccgatagcggaagcgttatctaaattgctcagcaagcagaacgaacagaatctgctgccgaaaactattctctactgcctgaacccgcgcgacaacgaagtgatcggcaccatgatcggcaatttccagggcgaagggatgcccggcaaaatgcagtttggttccggctggtggttcaacgatcagaaagatggcatggagcgtcagatgacacaactggcgcaactgggcttgctgagccgcttcgtcggtatgctgaccgatagccgcagcttcctgtcttacacccgtcatgagtatttccgccgcatactctgccagatgattggtcgctgggtcgccgcgggcgaagcgccggctgatatccagttactgggtgagatggtgaaaaatatttgctttaacaatgcgcgtgattatttcgccattgaactgaactaa

SEQ ID NO: 377324 - DNA, 1488 bp, Salmonella enterica
atgcaatacatcaggatccactcgctggataacgtcgcggtagcgctggtcgatttagcgcaaggtacgccagtaagcgtcgatagccaaactgtgacattacgccaggatgttgcgcgtggacataaatttgctttacgtgacatagcgatgggtgaaaatgtcattaaatatggtctgccgatcggccatacgctggcggatgtcgcagtgggagaacatattcatgcgcacaatacccgcaccaatctaagcgatgtggatgcgtaccgctatcaacctgatttccagacgtctccgtcacagcctgcggatcgggaggttcagatctatcgtcgcgctagcggtgacgttggcgtgcgtaatgagctgtggattttgccaaccgtaggctgcgtaaacggtattgcgcgccagatccagaagcgctttttacaagagagtgacaacgcagaaggcactgacggcgtatttctttttagccacacttacggctgctcccagttgggcgatgaccacattaatacccgcaccatgctgcaaaatatggttcgccatccgaatgcgggcgcggtgttagtgattggcctgggctgtgagaataatcaggtcgacgtgttccgcgacacgttaggcgagtttgactctgagcgcgtgcattttatggtttgccagcatcaggatgatgaagtcgaggcgggcgttgaacatcttcatcagctttatagcgtaatgcgccacgatagacgcgtacctggcaaactgagcgagctgaaatttggcctcgagtgtggcggatcggatgggctgtcagggatcaccgccaacccaatgctgggacgattttccgattatgtgattgccaacggcggcaccacagtactgacggaagtgccggagatgttcggcgcagaacggttgctgatgagccactgccgtgatgaagagacatttagcaaattggtgacgatggtgaatgactttaagcgatacttcatcgcccataaccaaccaatctatgaaaacccgtcgccgggcaacaaagcaggcggtattaccacgctggaagataagtcgttgggctgcactcaaaaagcgggctccagcccggtggtggatgtgctgcgttacggagaacgtctgaaaaaagcgggtctgaatctgttaagcgcgccgggtaacgacgccgtggcaaccagcgcgctggcaggagcgggatgccatatggtgctattcagtaccgggcgaggaacaccatacggcggatttgtccccacggtaaaaatcgccaccaacagcgaactggcgagcagaaaaaaacactggattgattttaacgccggacaactcatccagggcaaagcgatgccgcagctcttaaatgagtttgtcgataccatcgttaagattgctaacggcaagcagacctgcaacgagcgtaatgacttccgtgagctggcgatctttaagagtggtgtcaccttataa

SEQ ID NO: 377325 - DNA, 999 bp, Salmonella enterica
atgatacgtttcgctgtaattggtactaactggatcacgcgtcagtttgtcgacgccgcccatgaaaccggcaaattcaggctcgccgccgtttactcccgtagtcttgaacaggcgcagtctttcgcaaatgattatcccgtcgagcatctgtttacctcgctggaagcgatggcgcaaagcgacgcgatagaggcagtttatatcgccagcccgaattccctgcatttctcccagacgcagcgctttttgcagcataaaaaacatgtcatgtgcgaaaagccgctggcctctaacctggcggaggttgatgccgctatcgcctgcgcgcgcgataaccagcgggtactgtttgaagcctttaaaaccgcctgcctgcccaatttcctgctgctgcgggaatcgttgccgaaaatcggcagaatgcataaagcattcctaaattactgccagtactcttcacgttatcagcgctatctgaacggtgaaaatccgaatacgtttaatccggccttcgccaatggttcgattatggatatcgggtattactgtctggcgtcggcgatcgcgctatggggcgagccgcgcagcgttcaggcgtcggcgagtttattggaaagcggggtagatgcgcacggtgtcgtggtcatggattacggcgattttagcgtcacgctacagcattccaaagtcagcgactcggtactggccagtgaaattcagggcgaggcgggatcgctggtgattgaaaagctgtcggaatgccagaaagtgtgttttgcgccgcgcggcgcgctgatgcaggatctgacccagcctcagcatattaatactatgctgtatgaggccgaggcgtttgcccatcttattgagaaccacgccgtggaacattcggggttgtcgctaagtcgcgccacggcaaaatggctgacagaaatacgccgtcaaaccggggttatcttcccggcggacggtctgacccatcccctttccgcgtaa

SEQ ID NO: 377326 - DNA, 210 bp, Salmonella enterica
atggccattgaatttgtcgataacgaaacgggctaccgttttgccagtgagatgttccgtcaacgcgtgctggtcgccggtacgctgaataatgcgaaaacaattcgtatcgaaccaccgctcacgctaactattgaactgtgcgaacaggtattgaaatcagcgcgtaatgcgctggcggcgatgcaggtgagcgttgaagaggtttaa

SEQ ID NO: 377327 - DNA, 768 bp, Salmonella enterica
atgacgacatcatctgtacgctatccacagcgtgttcgtaatgaattgcgttttcgcgagctgaccgttctgcgggtagaacgtattagcgcaggatttcagcggatcgtacttggcggcgaggcgctggagggttttacatcccagggctttgacgatcacacgaaagtcttttttcctgagccaggcagccactttacgcccccgacagtcactgaggaaggcattatctggggggagggtgttcgtccgacctccagggattacacgccgctgtatgatgaggcacgtcgcgagctggcgctggatttctttatccacgatggcggcgtagccagccgttgggcaatggaagcgcgtgaaggcgatatactgacgattggcgggccgcgcgggtcgctggtggtgccggaagactatggctgtcaggtttatgtctgcgatgagtccggtatgcccgcgctgcgtcgtcgtctggaatcgcttagccgtctgcctgcacgtcccgcagtaaccgcgctggtgagcattcaggatgcggcatatcgcgattatctcgcccatttggcggacatgactgtggagtatgttgttggcggcgatgaacaggcaatacaaacgcgcctgtcgcagctgataataccagaatcagactatttcatctggattactggcgaaggcaagacggtgaaacgtttaagtcagcgctttgaaattgggtttgatccacacctggtacgtgcggcagcctattggcatcgtaagtaa

SEQ ID NO: 377328 - DNA, 123 bp, Salmonella enterica
atgcacattggacaggcttttgatctggtatcacgttacgactccctgcgcaaacgtcgcctgtcgctggaaatgatggtctggtgcattgtcggtatggcgcttccccccttcatcagatag

SEQ ID NO: 377329 - DNA, 1464 bp, Salmonella enterica
atggcacctttaactgcctggtggcgatatctggcgccgctgctggtcatcgcgattattgcggttctgcccgttcccaccggtcttgaaagccatacctggcgctatttcgcggtctttgccggcgtgattgtgggattaattctggaaccagtacccggcgcggtggtggcgatgatagggatttcgatcatcgccatcctttcgccgtggctgctgttcagcccggagcaactcgcgcaggacgggtttaaatttaccgctaaagcgctatcatgggcggtatcaggcttttcaaactcggttatctggctgattttcgcggcttttatgtttggcacgggctatgagaaaaccggtctcggtcggcgtattgcgctaatcctggtaaaaaaaatggggcaccgcacactgtttctcggctacgcggtaatgctgtccgaacttattctcgccccggtgacgccatccaactccgcgcgcggcgcaggcattgtctacccgattattcgcaatctgccgccgctctatcattcccagcctaacgacgccagctcccgttccatcggttcctatattatgtggatggggatcaccgccgactgcgtcaccagcgccgttttcctgaccgccatggcgcctaacctactgctgatgggactgatgaaaagcgcatcgcatgcggcattaggctggggcgactggttcttagggatgctgccgctcagtatcctgctggtacttctggtgccgtggctggcctacatgttctacccgccggtgttgaaatcgggcgatcaggtgccacgctgggccgagacggaactgaaaacgatgggcccgctttgctcacgcgaaaaaagaatgctggcgctgatggtgggtgcgctggcgctgtggatttttggcggcgactatattgatgccgcgatggtgggttacagcgtggtagcgctgatgctggtattacgcattatctcctgggacgatattgtcagcaataaagcggcgtggaacgtcttcttttggctggcgtcgctgattgccctcgccaccggacttaacaacactggctttatcgcctggtttggcaagctgctggcgaacggcctcagcggctactcgccgacgatggtgatggtcgcgcttatcgtagccttttatctactgcgctacttttttgccagcgccaccgcctatacctcggcgctggcgccaatgatgattgccgccgcgctggcgatgccggaaatcccgttaccggtattctgcctgatggtcggcgcagccattggtctgggcagtattcttaccccctatgcgaccggccccagcccgatttactacggcagcggctacttacctacggtggattactggcgattaggcgcgatcttcggcctgatcttcctggtgctactgatcgtcaccgggctgttgtggatgcccgtcgttttgctgtaa

SEQ ID NO: 377330 - DNA, 606 bp, Salmonella enterica
atgaaaaagatcctgacaaccccgatcaaagctgaagatctggaagatattcatgttggcgatgtgatctacctgaccggcacgctggtcacctgccgtgacgtctgccaccgccgtctgatcgaacttaagcgccctattccttacgacctcaacggcaaagcgattttccacgccgggccgatcgtgcgtaagaacggtgaaaaatgggaaatgatctccgtcggcccaaccaccagtatgcgtatggaaacctttgaaaaagagtttattgaacagaccggcgtgaagctggtggtgggaaaaggcggcatgggaccgctcactgaagaaggttgccaaaaattcaaagcgttacacgtgatcttcccggcaggctgcgcggtactggcggccacccaggttgaggagattgaagaggtgcactggacagaactggggatgccggaatccctgtgggtctgtcgtgtgaaagagttcgggccgctgattgtctctatcgatacccacggcaataacctgatcgccgaaaacaaaaaacagttcgccgaacgtcgcggcccgatcgtcgatgagatttgcgagcacgtccactacatcaaataa

SEQ ID NO: 377331 - DNA, 909 bp, Salmonella enterica
atgagcaatgaaaataagcaaaaagcgataaatacgctgacagaaattgtcgctcagtttaccgccatgatatccacccggatgcccgatgacgtggtagataaattaaagcagctacgcgacgctgaaacgtcatcgatggggaaaatcatctaccacacgatgttcgacaacatgcaaaaagcgatcgatctgaatcgaccggcgtgtcaggacaccggtgaaatcatgttcttcgtgaaggtcggttcccgtttcccgttgctgggcgagctgcaagatattctgaagcaggcggtggaagatgccaccgtcaaagcaccgttgcgccataacgcggtagaaattttcgacgaagtaaacaccggcaaaaataccggtagcggcgtaccgtgggtcacctgggacattattccggacggcgacgacgcggaaatcgaagtctacatggcgggcggcggctgcacattgccggggcgctccaaagtgctgatgccctctgaaggctacgaaggcgtggtgaaattcgtttttgaaaatatctctacgctggcggttaacgcctgcccgccggtgctggtcggcgtcgggatcgcgacttccgttgaaactgccgccgtgctgtcacgtaaagcgatattacgcccgatcggcactcgccatcctaatccgaaggcggctgagctggagctgcgtctggaagagggactcaaccgtctggggatcggcccacaagggttgaccggcaatagctcggtgatgggcgtacatatcgaatccgctgcgcgtcacccttccaccattggcgtggcggtctccaccggctgctgggcgcaccgtcgcggtacgctgctggtccactctgacctctccttcgaaaacctgtcccacacccggagcgcgttatga

SEQ ID NO: 377332 - DNA, 942 bp, Salmonella enterica
atgcttaatacatttcccttagccaaagatttacaggtactggttgaaattgttcatgccggaagttttagcgccgccgccgccgcgttagggcagacgccggcatttgtgactaaacgtatccagattctggagacgactctcgccagtacgctactgaaccgctcggcaagaggcgtagcgctgacggaaagcgggcagcgttgttatgagcatgcgatggcgatcctcacgcaatatcagcggctggtggacgaggtgacgcaaataaaaacgcgccctgccgggatgatccgtattggctgtagcttcggctttggccgcagccatattgcgccggcgattaccgaattaatgcgcagctatccggaattacaggtacatttcgaacttttcgatcggcaaattgatctggtgcaggataatatcgatttggatattcgtattaatgatgatatccctgactattatattgcccatttgttaacgaaaaataaaagaatactctgtgctgcgccggcttatttacaaaaatatgccgcgccggaaacgttgcaggaattaagccgtcacgactgcctggtgacgaaagaacgggatatgacccacggtatatgggaattgggtaacggtcaggaaaaaaggtcggtaaaggtcacagggcatctttcttccaacagcggtgaaattgtgttgcagtgggcgctggaaggcaaaggcatcatgctgcgttctgagtgggatgtgcagccgtttttacagagtggggagttagtccgcgtattacctgactatgcgcaaagcgctaatatctgggcggtctaccaggaaccgctttatcgcagcgtgaaactccgggtctgcgtcgagtttttagccgcatggtgccagcagcggctcggcaagcccgatgagggatatcaggtctttcaggccggataa

SEQ ID NO: 377333 - DNA, 273 bp, Salmonella enterica
atggcagagaggaagacgtgttcctgttactataccgttgaaaaagagtctttagaaacatatgatggtattcctatttttggcctttaccagaaatttgccaacagcgtcacggtagaatataaaggaaacggcaaaactatgaaggataactatgtggtgcagacgtccaccatcgtcaaccattatatggataaccgttttatttcagatagccagcaaacgaaagttattacgatggctggtacctgctcccgccctggcactttatga

SEQ ID NO: 377334 - DNA, 177 bp, Salmonella enterica
atgtttattgcctggtactggataatattaattgctcttgtggtgataggggatgtttgccatatgaagcgttattgcagagcgtttcggcaggacagagatgcattacttgaagcgcgaacgaaacgttttcaccagacgaacgaaggcggcagcgtgatgaatgagcagaaatag

SEQ ID NO: 377335 - DNA, 1050 bp, Salmonella enterica
atgatccgcttttcgatcaatatcatgcgtggctgctttggtggctgctctttctgctcgatcaccgaacatgaaggacgcattattcagagccgctcggaagactctatcatcaacgagatcgaagcgatccgcgacacggtgccggggtttaccggcgtgatctccgatctgggtggtcctaccgcgaacatgtatatgctgcgctgtaagtcgccgcgtgcggagcagacctgtcgtcgcctgtcgtgcgtgtatccggatatctgtccgcatatggatactgaccatacgccgacgatcaatctttatcgccgcgcccgcgagctgaaaggcattaagaaaatcttaattgcctccggcgtgcgctacgacatcgccgtggaagatcctcgctacattaaagagctggcgagccatcatgtgggcggctatctgaagattgcgccggagcatactgaagaaggtccgctgtcgaaaatgatgaaaccgggtatgggcagctacgatcgctttaaagagttgtttgacctttactctaaacaggccggaaaagaacagtatctgatcccgtattttatctccgcgcatccgggcacgcgggacgaagatatggtgaatctggcgctgtggctgaagcgccaccgcttccgtctggatcaggtgcagaacttctacccgtcaccgttggcgaattcgaccaccatgtattacaccggcaaaaacccgctgggtaagattggttataagagtgaagatgtggtggtgccgaagggagataagcaacgtcgcctgcataaggcgctgctgcgttatcacgatccggcgaactggccgctgattcgccaggcgctggaagcgatggggaaaaagcatttgattggcggtcgccgtgagtgtctggtgcctgcgccgaccgttgaagagatgcgcgaagcgcgtcgccagaaccgcaacacccgcccggcgttgaccaaacatacgccagtggcgcatcagcgacaggggcttgctgctaataagaagcgcgggaaaggcgcggggcgttaa

SEQ ID NO: 377336 - DNA, 123 bp, Salmonella enterica
atgatgccggatcagattttgatgtcgccatccggcattgtattgcctgatagccttcgcttatcaaccctgcgcgtttgtgatattcggcgtttaactaaacccatgttgcatgagaattaa

SEQ ID NO: 377337 - DNA, 489 bp, Salmonella enterica
atgcatttccataaaagaacgttattaagcttggcgacgcttggtatgctggctgtttcagtcgtgctgatggtggttttggtacgaaatgataactatcgatttattaatactgatgagtttttatgtacgacaagaacggtaacaacgatacagcctaaaaatattcatgccgatggtagccttgttcttgattttaagatgaaaagaattacgcttcaatatgaaataaaaacaaaagataacgctgtaaaaatattataccgggacgtatatatgaaaaatttacatcgaacagcgcctggtgtctatacgtttgaagtatccttgataaaagtctttgccacagacacggctggcgatctgttatcatatttacgggttctgcatccgcaagcggctaatgagattcgaatatctaaggttggtgagaaaacatttttctactctcttaatcggcagctttataacgtttgtaccgcacagtag

SEQ ID NO: 377338 - DNA, 234 bp, Salmonella enterica
gtgaacaagatgaaaaagttaacgatgagagagtgtgaaagcatgagccctactttattgcttgccattaagatacttatctcgtcgcttgacgaacaaacgaaaataaggctcagagagcatattgaaaaaactgaacaagaaatagcctcaagcatacatgatagcatcatgacagagacttttcttcagcaaatgaaagacattcgttacatcttaaatatggctccttga

SEQ ID NO: 377339 - DNA, 624 bp, Salmonella enterica
atgttatctttaagcaagccactccaggaattcaggaaactcgataaatgcctttctaagcatggtacacgtttcgaatttgttaacgataaagagattatttgttcacctgatgaaagtaacacccatacctttgttattttagagggggttgtttcgttgatccggggtgataaagttcttattggtattgtgcaggccccctttattttcggcttagccgatggtgtggtgaaaaaagagcctcaatataaattaattgcggagagcggttgcatcggttatcgcctctcatcatcacaaactctcgctatcattgagcagaaccaactgtggcgtgaagcattctgctggttagcatggaaaagtcaggtactggaacttcgtgacaggcagctcattggtaataattcttacgaccagattcgggcgacgttaataacaatgattgagtgggatgaagaacttcgctcacgtattggtgttatgaattatattcatcaacgaacgcgcgtatcgcgatcggtggtggcggaagtactcgcggccctgcgtaagggtaattatattgaaatgaataaaggcaaactgatcagtattaaccgtttgcccttcgaatattaa

SEQ ID NO: 377340 - DNA, 129 bp, Salmonella enterica
atggagaatgtttactttagtgatatcgcgcttgtgataacgctgatagcgttagccggcatgctcatgtatgaaactcgtcgaaacaattctattgagcagaagtgcgaactaagcgtcacaacgtag

SEQ ID NO: 377341 - DNA, 249 bp, Salmonella enterica
atgagttttaccgatgttgaggcgcaagacgaagcacgagcagagccgattaaccaggcgagaatggagggttatgcggttcgctaccctccaacgcaagggatctctggcgcgcagtttattgcctgcccgcttctggataataaagagaagttaattgcgattgcggtgacaatgggattttttagcgcagaagccattccacacatcgccagccagttactacacgcgctcgccccgctacattaa

SEQ ID NO: 377342 - DNA, 1059 bp, Salmonella enterica
atgagcgagcaagatgtctatttaattaaaaacgaatccggtgccgataaatgcccatcaggcaaactggcactttataccaatgtcgattttaacgggggggaaatgggtgacatcttaattatctcaccgaatgttgctcttactaaacaagacctggaaggttatggttttatcgtgggtgaacatgatggtgtttcttccgttgttaataatatggatcaagacgccacgctggtttccggtttgtaccttgacggagctactttgaccgtttcgccggggctccgcatatcctctcttattgattttcctttggcgacaggaaactggaacgatgaggtgaactccgttgtttccgcaggcacccgcaacgttgatttaagcatgagtatcgaaagtgaaattgttctggaggagggagaagaatattctgcactactgcaaatccataacaataccagtgaagctgtggaaggggtgactgtctcagcatcttccagtaactccgccgttttttctgccgaattttattcacaaactctgaatattccgggcaatgaaacggtcaatgtacgtattcctgtagagggtaaaggtcagggaaaagcaacgctaacctgccagcttacaatgcctttgggtattattaacagtggcaacaatatgacacaaaccactgttaccgtaagcgaaactcgcgcattacaagtgactcaatccttcgccggggattgggccgatacctggcccagcacaaattatatttatagttataaacttattctcagctctgctgatactgaagttgataaatgggagctgtctttcttattgcctgaggggactgaagtatcccctgaatggttagaaactgaaagcagttgggttcagttaaataccgaaaaatcagtcaatggcaacgtctatctggatagtgaaccaggccacgttatcgctccagagaaagatattgaactggatattcaaattatctatccaaaccaatctactgattatcagacgctgaaaaatctgcgactgatgcagaaaggttaa

SEQ ID NO: 377343 - DNA, 306 bp, Salmonella enterica
atgcgtcagcgccatcaggagctggtggtgtggcgcacgttgggggctggaaagaaactgctgcgtaccacactctggtgcgaattcgccatgctggggttagtttccgggctggtcgccgcgattggcgcggaaacggcgctggcggtcttacaaatcaacgtttttgatttcccctgggaaccggactggcgtttatggatagcgctgccgttttgcggcgcgctactgctttccgtatgcggcggctggcttggcgtccgtttgctgaaaggtaaagcgctatttcgccagtttagcggatga

SEQ ID NO: 377344 - DNA, 936 bp, Salmonella enterica
atggccaaatcgaccacttcaacgccccatgatgcgatttttaaaaaaatgatgtcttatcctgaggtagcacgggattttcttgatagccaccttccagccccattacgcgcaatttgcgatttaaccacgcttaatctggagtcaacctcctttattgaagacgaccttcgcgcctattattccgatatagtgtggtcgctgaaaaccaataaaggtgaaggatatatttattgtgttatagagcatcagagcacggcagtacagcatatggcattccggctgatgcgttatgccactgccgcaatgcaatatcaccttgatgccggaaataaaacattgcctttagtcatcccgatactcttttatcatggcgaacaaagtccttatccattttcgcttaactggctggatgaatttgactctccacagctcgcgcggcaactttattcgcaaacctttcctctggtggatattacggtaacgccagacgatgaaatcatgcaacaccgacgcgtcgcgttgctggaactgatgcaaaaacatatccgcgatcgtgactggatgagtatggttgacaaactcacctcacttttaattgccgatatcgctaatgacagccagttgcaaacgctgtttaattacctggtacaatacggcgatacttcccgggcaagcgattttatccgtgaagttgctaaacgttccccccatcacaaggagagattgatgacgattgcagagaggctgcggcaggagggccaccacaatgggctacaggaaggattgcagcaaggactacagcaaggtcgacaacaaggaacgcgagaagaagcgctgcgtatcgcgcgcatgatgcaggaaaaaggtatcgatcgcgatgcgattttggccattaccgggctttccgtcgaggaagcggctaacaaccattga

SEQ ID NO: 377345 - DNA, 519 bp, Salmonella enterica
atgaaaacgttctcccttgttgcgctaattctcttgctttgcagttgctctacgcctcatcgcgacagcaagcagaccgtgaagcagttctacacctcatggatgacgacatttacgaacgatctggataccggtgacgactcgaacgccttaatgcaacactacgttgctaaagaagttattcatcgcctggcgctgattcagtctctttatgagcaggagattgtggaggcagattattttatgtatgcgcaggactatgcgcctgagtggattccacagttacgggttgggcagccgcaccctttcctcggcggcgaaaaagtggatgttcagttgggtacagagtcaacccccatccatctggaagtttatacccgttgggaggagggacgctggaaaatttaccgcgttcgggatgcagacaatggctatgagcaaccgatttatgacgcaggcgtcattacccgggcagaagcctggtcagcaaaaatcgcgccggcatataagaagcattaa

SEQ ID NO: 377346 - DNA, 1905 bp, Salmonella enterica
atgactaacatcacgccaaatattgttgtatcacaaccaagccagttatttactttagcgcgttcttttaaagcaaatgctaatggcaaaatctatattggtaagattgacactgacccggtaaaccaagaaaaccagatccctgtatatctggaacgagaagatggtactcatgttcaggtggcacagccaattgttatcaattctgcaggctatccggtatacaacggacagattgcaaagttcgtgactgtgcagggacacagcatggctgtgtatgataggtgtggggtgcaacagttctatttcccgaatgtactgaagtatgatccagaccaatttgagaagagactgagcgggaatgatggatttaaattcattggtcgagttcctgatattgatactctgcgtactattcatggtaaagatggtgatgctgttattctggaagcgtaccgggtgggtgatggtcttggcgagagcgtcgtttattgggatgctacatcaactaaaaatgacaatggcggaacagtatttgcggtatctggtgttgcaactggaagatggattcgtaagtataaaactctagaagcaaaaatgtttggtcttccaaaagaaggggactgttacgacgagatggcggctatcgaggccattatgtttgaggaaggcgtggattgtattttctatgacggaatctatgcgattactggatccagaaatatgccgtggcgcggtagcgacctgaataatttcaaatcgtacaagggggccagcattcgctgcattggtaatgtagttttttcaacaaaatctcctgatggtgctgatatattccagatgaactgtgtttccgatttaaatattatcggattcccagttcttaagggtacgctcactagaggtgattcctccggaacaaatggcgtatcaataaccaacggagggaaaaatatattcattgaggttgaggctgattcattacctttcaccgtgacaagttcaggactagatggtggaaaagctgtaactatacagaacgggccttcagcggtactcccttatcaaaatataaaaattaattgtcggagagcgcacaactgcccatatggctttgagatgtcgatagtaggagattcactgataaataatccaaattctggcatagaggtagatatttatgctgagaactgttacagaggcgttgcaatcggctctagcgagaacaccaaagagataccgacaaatggattaaaccatggtgtaaaagttagagctattcttaaagattgtcagcaggatatcgttgttataagggattggggtttagacattgaggcgacggtaatccagattaaagacccttttatgtacaatccacatgactcaaaaagggaagttttggagtctgctggctctaagtactcacgcataaaaatatccggaataaaattggctgtcgattcactgtatacaataggggggattcattatagcccatccgtcagtgggagaaccggtcacgccgagtggtgcgtatatgaccttaatgttacgacgcaagtcgctacaacaacacttactgtcatggattcaggtggtgttaccgcaaaaaataacacgctcaggtcatctacactatcagcagtagatgtgattgcattcatatccaatggtaataccgtaactataggcgcttccgtgatggcggaagatttatcttcatataactcattttcagtttttgataactcaaacaccaaaaagttcggagttaataaattaggggaattaaccatagtaagaacatcatcatcagctccaagtagtaatttgtctggttttatccaattcacagatccaaataatggccagatgttccaaattcatacttacattccttaa

SEQ ID NO: 377347 - DNA, 687 bp, Salmonella enterica
atgttagcggaatacctttcagggttaggattcgtcaggcagaaccttataacggctcgtgatgtgcttaatgctgagggtaaaaagaaatatgaggcatacataaaaaacgccgtagaaatgctaccagcgcgattttacgggcttaagccttactacctgaatatccttaccaatctgatggctacccccttcaggagaagcgtagagaaggacgggagagagatttctgattctctttgcctgattgctggctttattgaaaaatacagataccgcggcactgacgagcgctacagagaatacgcacagacaatcatcgcgggtatagatacagaacgattaccaccgatgatcgccgggcttatcattcaggagataacggcactggtagataccgcttgcgctaccaatgtgatgaccttcgctaactcaggaataacccacgaagaatactggcggtttacagacccggacgactacgccgaagcctatccttatagcgagataccggaacatgcttcgccccttgaggctcttgatatttatccgttgcatgaggggatagcacagcaaagcctgtggtacgggcttgatgattatgttgatgatttcattgtgtcgatagctggtggccttatctatacgcaatatccctctatgtatcccacccacacaaacaactaa

SEQ ID NO: 377348 - DNA, 1392 bp, Salmonella enterica
atgttaacaatattaaaaacaggacaatcggcgcataaagtcccaccggaaaaagtccaggctacgtatggtcgatatcgtatgcaggcattgttaagcgtatttctgggatatcttgcttactatatagtcagaaacaatttcacattatcgacgccttatttaaaagagcaactggatcttagcgctacgcaaattggcctgctaagtagctgtatgcttattgcttacggaatcagtaaaggcgtgatgagcagtctggcggataaagccagcccgaaagtcttcatggcgtgcggtctggtactctgcgcgattgttaacgtcggactggggttcagtagcgcattctggatatttgccgctctggtggtcttcaatggcctttttcagggcatgggcgtcggcccctcttttattaccattgcaaactggttccctcgtcgggagcgcggacgcgtaggcgccttctggaatatctcgcataacgttggcggcgggatcgtcgcgcctatcgtcggtgcggcttttgcgatattgggcaacgaacactggcaaagcgccagttatatcgttccggcctgcgtcgccgtcgtttttgccttaattgttctggtattgggaaaaggttcgccgcgcgaagaaggtcttccctcactggaacagatgatgccggaagaaaaagtcgtactgaaaacgaagaatacgacgaaagcgccggaaaatatgagcgcatggcaaatcttctgtacttatgtgctgcgcaataaaaatgcctggtatatttcgctagtggatgtcttcgtctatatggtgcggtttggcatgattagctggctgcctatctatctgttaacggtaaaacatttttcgaaagaacagatgagcgtcgcgtttctctttttcgagtgggcggcgattccctccacgctactggcgggttggctgtcagataaactgtttaaaggccgcagaatgccattagccatgatttgcatggcgctgatttttgtctgtctgatcggatactggaaaagtgaatctttgctgatggtaacgattttcgccgccattgtaggttgcctgatttacgtcccgcagttcctcgcgtccgtacagacgatggagatagtccccagctttgccgtaggttccgccgtcggattacgtgggttcatgagctatattttcggcgcctcgttgggcaccagcctgtttggcgtgatggtggacaggcttggctggtacggcggattttaccttctgatgggcggtatcgtatgctgcattctattctgttatctttcccatcgcggtgcgctggaactggaacggcagcgccagaatgcgttacataatcaggactcgctgcagcttgcggacgcacaataa

SEQ ID NO: 377349 - DNA, 1041 bp, Salmonella enterica
atggatttatcgctactgaaagcgctgtgcgaggcggatgcgatcgccgcgtcagaacaggaggttcgccagatcttactcgacgaagcggatcgcctgcataaagaggtgcgcttcgatggcttgggatcggtactgatccggcttaatgcctcggatggcccgaaagtcatgatctgcgcgcacatggatgaagtgggatttatggtgcgcagtatctccggcgagggggcgattgatgtgttgccggtgggcaatgtgcggatggcggcgcgtcagctccagccggtccgcatcaccacgcgggaggaatgcaaaattcccggcctgcttgatggcgagcgcagcggtaatgaggtgagcggactgcgggtcgatattggcgcgcgttcttatgacgaggtgatacaggcggggattcgtcccggcgatcgtgtgacctttgatagtgcgtttcaggtgttgccgcatcagcgggtgatgggtaaagcctttgatgatcggctcggttgctatctgttgatagcgttgctgcgtgaatggcacgatgtggaattaccgacggaaatctggctggcggccagctccagcgaagaggtgggattacgcggaggtcaaacggcggcccgcgtcgttgcgccggatttagccatcgtactggataccgcctgttgggcgaaaaattttgattatggcgcggcaaatcatcggcaaatcggtaagggaccgatgctggtgctgagcgataaatcgctgattgcgccgtcaaaactaactgcctggattgagagcatcgcagcgcaagcgggaataccgctacagttggatatgttcagcaacggcggaacggacggcggggcggtgcatcttagcggaacgggcatcccgacggtggtgcttggtccggcaacccgccacggacattgcgccgcctcgattgccgactgtcgcgacattctgcaaacgcagcagttgctgtcggcgctgattaccggttttacgcgcgatactgtggctcacctgatggatttcaggtgctga

SEQ ID NO: 377350 - DNA, 429 bp, Salmonella enterica
atggacagcgtcctgaaaactgctgaaaaaaccacctatattcttcagttatttctgacgctggtggccgtcatttcgctggttgtcggcggcatcggcgttatgaatattatgctggtttccgtcaccgagcgaacgcgtgaaatcggcatccgtatggcggtaggcgcacgcgccagcgatgtgctacagcagtttcttattgaagcggtgctggtctgtctggttggcggggcgctggggattagcgtgtcgatgttaatcgcatttatgctacagtttttcctgcccggctgggagatcggtttttcactgactgcgctggcgagcgcgtttttatgttcgacgtttactgggatactgtttggctggctaccggcgagaaacgcggcgcgactggacccggtggatgcgctggcaagggagtaa

SEQ ID NO: 377351 - DNA, 516 bp, Salmonella enterica
gtggtcgccgtgtatctgaccggccagccggcggcgtatgtagggccgcaggatgttgcgttggcgatgatcgcgctgcctttccaccccagcaacgtctatgaaagcgatactttaaatgaaaatctggcggatattcttcgccagacggaaatagaatcggcgcgcatgacgcagcagacgcttatttatggacccaacattaaagactggctggcgtcaggcacgctgacagagaatactctattcagggtctgctcgaaaattctcgataaggtgactaccatcgacgagtcgctcccttccggcgagacttcctcttaccgctcaaatccggtggggctggcggaatttaccctctcgcaccgcgtccgggctatatcggcagaagtaaagccgtcgccgcgctggaaaaacggcgacaggacggcgaggccgccgaactggccccgatgttcgcgtgtattcagcagattgctggtcaggaaaatgtacgccccgaggataccgggatag

SEQ ID NO: 377352 - DNA, 777 bp, Salmonella enterica
atgcgtgggttaatgctccggtcatttagcgccggctattccactcagccggttattgcagatctcaacgttcccttactgccgcgcgggaaaattaccgttttgctggggccgaacggctgtggtaaatcgacgttactacgttcgctggccgggctgaataacgccgacggcgaggcgcgacttgatggcgaggatcttatgtcgttatcgtttgccgagcgggcgcagaaggtcgtgtttttgccgcagtccttaccgcagggtgtgcatctgcatgtactggagtcgattatcgtggcgcagcgggcatcaggcggcagaggcgatgcgcaggacagggcgcagatactggctatccttgagcaattaggcataacgcacctggcgttgcagtatctcgaccagctttccggcggtcagcggcagttagttggtctggcacaatcgctgattcgttgccctgaactgctgttactggatgagccgctcagcgcgctggatttaaactatcagtttcacgtaatggatctcgtgcgtcgggatacccaggcgcaaaatagggtgacgatagtcgtggtgcatgacattaatattgcactgcgtcatggtgaacatgtactgatgctaaaagacggcaggcttgtcgccagcggcgcgccggagacggtgattaccgcggaacgtctggctgaagtgtaccgggtacgaggacgcgtggagcgctgttcgcagggcagattacaggtggtgcttgacggagtgatcgatgtttaa

SEQ ID NO: 377353 - DNA, 984 bp, Salmonella enterica
atgttagctattgcgctggcgatgatgacttcactgatggtagatgtaacctgcgggtcttctggtttaccgttcagtgcgctgtggcaggcgcttttccagccggaaaaggtgaatgcaggcgtacacgttattgtctgggatattcgcttaccctacgccctgatggcgctgctggtgggcatggcgctagggctggcgggtgccgaaatgcaaaccattttaaataatccgctggcaacgccgtttaccctcggcgtatcgtccgccgcggcttttggcgctgcgctggcgattgtgctggggctcggtattcccggtattcctgccgcctggtttatcccggccaatgcgttcatctttgcgcttttgtccgcgttactcctggacggtattacccgttggacaggcgtcgccgcatccggggtagtattgttcggtattgcgctggtattcacctttaacgcattggtcgccattatgcagtttgtggctgatgaagatacgctgcaggggctggtattctggacgatggggagcctggtccgtgcgtcgtgggaaaaattgggcgtactggccgttgtgtttattgctgtgctttttgggtcgttacgaagcgcctggcaactaacggcattacgtctgggcgaagagagggcgctgagctttgggattcatgtccgtcgtttacgtctgctgtcattgttgcgtatcagcttgttatcagcgctggcggtagctttcgtcgggccgattggttttattggtctcgttgcgccgcatatcgcgcgaatacttttgggggaagatcaccgtttctaccttccgggcagcgcgctgatcggcgggctggtgttatcgctggcctctattgtggcgaaaaatagtgttccgggcgtaatggtgccggtggggattgtcacctcgctggtcggggttccgttctttttaagcattgtattgcgacatcgggggagtctctga

SEQ ID NO: 377354 - DNA, 633 bp, Salmonella enterica
ttgagtaagccgcttattattattggtggcggggggcacgccagtgtactagtagccattcttaagaagcagcatcgagatattctggcgattatcagtccggacgacatatcagggcgagcgagtatagctgatctccctcacctttgtgacgatgaagaaattgtacgttttgcaacggaggacgttgaattagtcaatgccatcggcgtagttccgggatcttcgctgcgccgtaaggtcagtgaatatttcctcagcaaaggatatcgtttcgcgactgtcatttccgaagatgcgactgtgtcagattttgccgttattcataacggagcacagattctgacgcgagcaattattcagccaggcgtaattatcggttctcattcaattataaacacagcggccgttattgaacatgattgtcgtattggctcatacaacttcatcgcacctggagcaactttgtgtggtgatgttctaaccagagataatgtctttattggcgcaggagctacaattattcctggtatacaccttgataagagcgcttttgttgctgcaggtgctgtcctggtgaattcgttgggggcaggggaaaaatgctatccagtgaaaactataattaaatag

SEQ ID NO: 377355 - DNA, 1074 bp, Salmonella enterica
atgacactgattattgctgaagcaggggttaaccataacggcgatgaaaaattggcgtttaagctggttgaagcagcgtacaaagctggcgctgatattgttaaatttcagactttcaaggcgaagaatttagtgactgctgatgcagagcaggcaaaataccaacaggtaaataccaaaaaacaagaatcacagttagcaatgcttagtaggctagagctctcatgggaaactcaccacggactggtaaaatattgtgaagagctcgggatcgaattcttgtctaccgcatttgattcagagagccttaattttctggttaatgatctgggtattaagcgtttaaagttaccttccggtgagttgacaaatgcgccattagtacttgaacatgccagaactggctgcgatatgattatatcaacaggtatggcaacattggccgaaattgaagccgcacttggtgttattgcctttggctatactgcggcggatgacgctgtacccggtcgtgaagcctttgaggaggcttatgcctcaaacgcaggccaacaagcattaaaagaaaaagtgattattctgcattgtacaactgaatatcccgcgcctattaatgaaattaatcttcgagtgatggatacactacgttctgcgttcggtttacccgtaggttattctgatcatagtgaaggtattattattcctgttgctgcagttgcccgcggcgcggtagtgattgaaaaacactttacgcttgataagaatatggacggtccggaccataaagcctcgctagaacccgatgaactgaatgcgatgatacgtgctgtgcgacaggttgatatggcattaggaggcagcatcaagtcaccaacagtatcagaggtgaaaaataaagttattgcgcgtaaaagtctggttgctgcaaaagcgattgctaaaggtgaggcattcaataatattaatctaacaataaaacgtccggggaaaggaatgtcaccttatcaatattggaatttgctaggtaaaacatccagtaaaagctatgcagctggagatttaattcttgagtaa

SEQ ID NO: 377356 - DNA, 1167 bp, Salmonella enterica
atgagaccgcaagttataaaaaaggtcgctgtctttaccggtacgagagcagaatatggtttgctgtattggttgttgaaagatatacaaagcgatagtgagcttaaattgcaactacttgttagtggtatgcatctctcccctgagttcggtcttacttggcagcagattgccgatgatggtttcgttattgatgaaaaaatagaaattctgctgtcatccgatactcctgtaggtactgcaaaaagtataggattgggtattcttgggtttgcagatgcgttatcgcgacttaaacctgatgtgttagtgcttttaggcgatcgtttcgaagcgttggccgctgcacaaacagcgatgatccttcgtattcctatattgcatttacatggaggagaaattaccgaaggggcctatgatgatgcgattcgtcatgctatcactaaacttagttacctccattgtacttcaactgaagagtatcgcctgcgagtaattcaactcggtgaagcgccgtgtagggtagaaaatgttggggctattgggctcgattacataagacgtggcacttttatgacaatttctgaattggcatcgtcacttaattttccccttcgaaaaccatatgttgtcgtgacctaccatccggtgactttgggaaatgagccgcctgaagccagtttccaggcgttgcttgatgccttggattcgttccctaagtatcaggtcattctcacttggcccaatgcggacgatggtgggcggaagattattcctatgttagaaaactatgctaggcagcgagcctctagggttctggccatcccctctctaggacaggttcggtatttaagtgccattaagcatgccgcagctgttattggtaattcatccagcggcattattgaggccccggcttttgacgttccgacggtcaatattggagaacggcagaaaggaagattggctgcaaaaagtgtgcttaattgtccagcacagagtaaggcaatagtgactactattcagaaggcctttgctcgtgagtacaaatctgtgggggaagttgtttacaacccatacggtcagggcgacgcgagtgcacgaatcattaagatgattaagtcccttgagtttgttcctgtaaaaacattttacgatattgagtga

SEQ ID NO: 377357 - DNA, 1152 bp, Salmonella enterica
atgaaaatggattcaattgtagattttgtccgcagcatatataacactcatgaatttattccacttcatgcgccagtttttgatggaaatgaaaaagcctatattcttgatactatcgaaagtacgttcgtttcaagtgtaggtaagtttgttggcgactttgaacgtaaagtagaaaaatttactggttctccgcaggccgtagcgacagtaaatggaaccgcagcgctaagtgctgcattatatctcgcaggtgtaaagcgcaatgatctggtaattactcaggcgctaacctttgtagcaacttgtaatgcactgtttcatttaggcgcggagcctgtttttgtagatatttctcctgtcagtttaggtttatgtccagtggcactagatgcttggttgacggaatatgcagaccctattgaaggtgggtgtgtacataaagttacgcgtcaaccaatccgcgcaattgtcccgatgcatacttttggtcatccggtagaattggatgaaataatcgccgtttctcaaaaatggcagattgcgctgattgaggatgctgctgaaagccttggttcttggtataaaaaccagcatacaggtacgcttggcgaatacggcgcgctgagcttcaatggtaataaaattatcactactggtggcggtggcatggtgctatgtaaaactcctgaggcgggtgttcgtgcgaaacatgtcacgactacagcgaaaattcctcatccttatgagttttatcatgatgagcctggcttcaattatcgtatgccgaatttaaatgcggcgttaggttgcgcacagatcgagcgccttgagttgttccttgaacaaaaacgccgtctcgctatgcgttacgaaacattttttgccggatcggagttccagtttgttaaggagcccgcttacggtaaatctaactactggttaaatgctgttatttgtgaaaatcctgaagccagacaggaactgctgtcacatatgaatgcagctaaagttatggccaggcctatctggaaacttatgcaccgcttgccaatgtttagtggagcaatgcgggatgatttacatcattcggaatatattgaaagccgactggttaatttgccaagttctccgagtgcttttttgtcatga

SEQ ID NO: 377358 - DNA, 1191 bp, Salmonella enterica
atgaacaatattttatctctcattggtcgcaacaaggcattgtttactggagatcttgccaaacatgaaaataaattgaccgacatcgtttctgaatcatcttttttagtattagggggggctggatcaattggccaagccgtcactaaagaaatttttaaacgtaatcccaagaaattacatgttgtagatattagcgaaaataacatggtcgagctagtgcgagatattcgcagccagtttggttatattttgggtgattttcagacgttcgcacttgatattggctcattagaatacgatgcctttattaaagctgatggacagtatgattatgtgcttaatttatctgcattgaaacatgtacgcagtgaaaaagatccctttacgttgatgcgaatgattgaagttaatatccttaatactaataaaactattgagcaatcgttcgcgttgggtacaaaaaagtatttttgtgtttcgactgataaagcagctaacccagtaaatatgatgggagcatcaaaacgcataatggaaatgtttttaatgagaaatagtgaaaaaataaacatttctacggctcgctttgctaatgttgctttttctgatggctccttactgcatggtttcgaacaacgtctgaataaacagcaacctcttgttgcgcctaatgatatcaagcgttatttcgttactcctcaggagtcgggtgagctttgtctgatgtcctgcatattcggtgagaatcgtgacatattcttccctaaacttagtgaaagcttgcatttaataagctttgctgatattgctgaacgctacctcagacagcatggttatcagtcatatttatgccaaactgaagatgaagcccgcgaactggcaaaaacgcttcctgcacggggacaatggccttgtctgtttacatccagtgacacgaccggtgaaaaagatttcgaggaattttatacttcgacagaaattctcgatatggatcgctttgataatttaggtattatacaaaatgaacttgattatgatgagtcactactggctcactttgagcaagagattattcgcatgacgactgcgcttgagtggactaaaaatgatattgttaaattattctttgagatgattcctgatttttgtcacaaagaaaccgggaagtatctggacagcaaaatgtga

SEQ ID NO: 377359 - DNA, 336 bp, Salmonella enterica
atgaatgttaatccagcggtgaatgcgcaaacgccattgttccatccttctgaacggtgtaatgaagaaaaaccagtagctgaaatcgttgaatttcacgcttacggcaataaacccagatgtttaatgtgcctgggaacctcggcattgtttacaggtattttcagtggggtatgctcaggggctgtcgccagtgtcagtagcggtgctacatatactaccgccctgacggttttaggcgcatcgtttggcatggggtgtattggtctaatgggaatatgctccggactataccttagcgaaaatgccgttagaacccgaccggccgggccataa

SEQ ID NO: 377360 - DNA, 1014 bp, Salmonella enterica
atgaaaaaatatgggtttttgtttttactattaatcccgctgttgggacaagcaaaatgtacgccgaaaggaactacgagcgcaacgcaacctattacattggatttaacaacgggatcaacaacggtaaattttaatcccaatttacaaggatcatttgactgcaatacgacaggcgataaaatgtactatgcgacaagtttacaagactatatcgttgaaataaaagatagtgccagtagtcagtcaatttttatcaaactgacacttgaaagttcagattttcctgttaatacaggcagtgatagaattgcctcagttaaaaattattcggtagatgatactctgaataataaacaaatgacccttaaagcatcgtacgtagccgcaatgtcatatagttcagataatggcgagaaagtatacggtaattcgttcagcttatctaagcctgcggttaattttttatctaataattcatgtaactcaaatattttggcgtggatagtgtgttctgccctgcggttgtttagcaatgataatgcctactcccaatatttgacgtttaccgtcaaacacaagcccaccacctgtcgtttttcacagcctacatatgaaataaaaatgccggatacgacgttaagtgagattttgtccggcaataacagtaaaacgggatcgacaaatctggtactcaattgcgacggggtttataatgttaccaccaacccggtcagttttaacgtggcgcgcggcgactggaacgacaacggaacgatactgaaaaacacgataatcaatggcgcccaaggcgttggtttccagatttataacggcaccgccgccacgccgttaaaacggggtgatgctctgatgagcaggttaacgaaaatggcgacaatcaatgatcagtatactttccccattaccgcgagatacgtgcgtataacaggggaagcactacagcctggcgaagtccaaagcaaagttatatttgccgtatcctatgactaa

SEQ ID NO: 377361 - DNA, 2487 bp, Salmonella enterica
atgtcaaagataaactccattacgctggccatattgtcagtgttggtaacttcatccgtatgggcggaagaagaaacgtttgatacccactttatgattggtggattaaatggcgaaaagatttcccgttatcagattgatggcgataagcccatgcccggcatgtatgaaatggatgtttatctgaataatcagtggcgcggtcattacgaaatcaatattaaagccgatccggacgcgacatgcttaacctgggcgcagttacagcaaattggtattcgtaccgacaatattaaagcagataaaaatgtggattgcgtaccgctgcgtgcggcggtacagggcggcagcattgactatgatatcgggcagtttatgctgaatttacgcgtaccgcaggcatatgtgaatgaatatgagccaggttatatgccgcctgaaacctgggatcgtgggattaacgctttttatacctcttattatgccagccagtattacagtaactataaacatggcggcgatgataaaagcagctatgtgagcctgaatagcggattaaacctgctgagttggcaactgcattccaatgccaactatacaaaaagcaacgagggtagcggccagtggaaaagtaacaccctgtatttggaacgcggcattccgcagattctcggcacgctgcgcgccggagatatgtataccgggtcggacatctttgacgccgtgcgttttcgcggcgtgcgtatctggcgcgatatgcaaatgctaccaaactcgaaacagagctttacgccggtagtgcgtgggattgctcagagcaacgcgctggtatctattgaacaaaatggttttattatttatcagaaagaggtccctcccggtccattcgctattgatgatttgcagcttgctggcggcggcgcggatttggatgttagcgtaaaagaagctgacggttcagtatcacattatctggtaccttattcatcggtaccgaatatgttgcaagcgggcgtgtcgaaatatgattttgctgcgggacgtagtcatatcgaaggcgcgagtaatcagtctgattttatacaaggtagctaccagtacggtctgaataatttgctgacgatatatggcgggacaatgttgtcggataattactctgcatttgtactcggtactggctggaatacgctgattggcgcggtatcggtagacgccacgcgctcgcatagcgaacaggataatggtgatgtttttgatgggcagagttttcaggtagagtggaataaatatgttgcgcagaccggaacgcagtttgctttggcagcctggcgttattcgtcacgggattatcgaacctttaacgatcacgtatgggcgaataataaaaataattaccagcgcgatgaaaatgatgtgtatgacattgccgactattatcagaacgattttggtcggaagaacagtttttcacttaatatcaatcaggcattacctgccaactggggatttctggcggtcagcggcctgtggcgcgattattggggacgcagcggaaccggtaaagattatcaattaagttattcaaactcctggcaacgtattagctataccttatccgttagccagacatatgatgaggatcaccatgaggataagcgttttaacctgtatatctcgattccgttctcatggggcgacggtatttctaccccgcggcgcgatctgttcgtttctaactcaacaacgttcgatgatgacggttatcaatcgaataacaccagtttaagcggcgtggcggggaaccgcgatcagtttagctatggcgctaatctgagccaccagcgacagggtagtgagacaacagcgggcggcagtctggtctggcgtgcgccgatagcgacggtgggcggcagttacagccagtcgaataaataccagcaggccagcggcaatattcagggcggtatcgtggcgtggtccgacggcgtggcgctggctccccggttgtcggatacttttgccattgttaacgcgccgggactgcagggtgcagcggtgcagggccatcggtacttaaccacggacagcaaaggctacgctatttatgacagcttaacgccgtatcgcgaaaatatgctgatgctggatctttccaacagtgatagcgatgttgcgttattgggcaaccgcaagggtgcagtgccttatcgtggcgcggtggtactggcggaatttgagaccgatcgacgtaaaccctggtacttcctcgcccggcgtccggatggttctcctttatcgttcggctatgaggtagaagataacgcgggtaataacgtcggcctcgtaggtcagggtagtcggttatttattcgcaccaatgatattcccgcgtcggtacgtgtcgcggtgaataaacagcagaggcagttctgtaccatcacctttgagaaggtgattaatgagaataaagtctatatttgccgataa

SEQ ID NO: 377362 - DNA, 681 bp, Salmonella enterica
atgaaaaaactagtcgcattattgctggccggttcggtcatgcccgcgtggggaggtatctatatttatggcactcgtattatttatccggcgcagaaaaaagagattactgtacaattaatgaatgaaggcagccgcagttcgctggtgcagtcgtggatagatgacggcgacaccagcctaccgccggaaaaaattcaggtgcctttcgtcataacgccgccggttgcgagggttggtggtgggtccggtcaacagttgaaaattaaacagttggcgaatagcctgccgaaagatcgtgaaagcctgttttttcttaacgtcctggatattccgcctaacccagcggagtctgaaagtcagaacatcattaaattcgctatgcagaatcgcattaaatttatttatcgcccacaaggtatcactggtgtaggtaaaaatagtttttcgtatctgcatatcaggtataccagcggtagtattactatcaaaaacaattcagccaactggataactattcctgacgtaacaggtaattcaaaaattaataaagaaacactattactggcaccctggtcggataaaacggttactaccgccactgttgttaattattataaagtcacccttattgatgatcatggtaactatttgagtgaaaaaataaaaactggaaaatag

SEQ ID NO: 377363 - DNA, 537 bp, Salmonella enterica
atgaaacgtttacttattgctgcttctgtattgtctgctatatttatgagcgctggggttttcgctgctgattctgaccagggtgaattaattattaccggtaaggttgtgggaactacctgtaaatttaccggggagactaccgccactattggtatgaaccagattggtgttgatcgcttaaatggactaaatgctggtgatgtttatgaaggatattcaaataaaaccaccgcgccgctgacggttgaatgtaccggggataaagcaccacgtattactttttccagctcacaatttgatagtacgcgtaactttattacccgtaatacggcatcggctaacggcgctggttttgtagtctactatggtgagggctttactcagcgggttaatcctgatgatggcattgagttaacaaagacagcagataataaatatacattgaattttagcgcgcgttatgcaaaacaaggcaccactgttaccgctggcgatgtcgcctcctcgctgaccatgaccgttgttactgattaa

SEQ ID NO: 377364 - DNA, 138 bp, Salmonella enterica
gtggatatggaaaaagtgaactttaaggcgttacagggaatttcagggacgatggcgtccggcgatgccagtaagggtatcggcatgaaaccgccccagacgctgctggaagccgctggttttaaagaagcgaaataa

SEQ ID NO: 377365 - DNA, 645 bp, Salmonella enterica
atgaagctgtacagtttctttaatagtttggcgtcttatcgcgtacgtattgcgctggcgttaaaggggatcgattaccagacggtgggcgtcaatattcgtatcggtcagcagaatgcgctggcctaccgacggatgaacccggtaggcctggtgccgacgctggtcactgatgacggcgaatcgttggggcaatcgctggccatcgtcgactggctggaccgacattttccgcaaacgccgctgctgccgacgagcgatccggcgcgcagccacgcgctggaaattgtctacaccatcgcctgcgatattcatccgattaataacttgcgcgtgttgcgctacctggccgatgagatgaaggttagcgaagagcagaaaaaacgctggtatgcccactggatacagcaagggttaagcgcggtggagcagctattgcgtaaaagtcagcccggaacattctgcgtgggcgacgcgccgggtcttgcggactgctgcctgattcctcagtgggcgaatgcgctcaggatgggctgtgatttgtcagcctattcgcgctgcaaagccgtttatgacgcctgcgtgcagctaccggcgtttattgccgccgcgccggaaaatcaacaagataaaatcccggcctga

SEQ ID NO: 377366 - DNA, 243 bp, Salmonella enterica
atgccgaccctgcatctgaatattgaagagaaagtaatgacgccgctgctgcacgatctgcttgtcggccaggtggatgtggtggtaggccgtgtaggcggacgcgccctgcaactgccgcttaattatcaggtactttataccgagccggtctgctttgtggcgcgtccgcaccatccgctggtcgcgcgagcacagatcgcctggagcgcactggcgcactggcgcactggcggtggatag

SEQ ID NO: 377367 - DNA, 243 bp, Salmonella enterica
atgctcccggaaaacaccattgaatcggcgtcaatgaacgtcagcaccaatttgctgcaaagcagcgatatgatctctattctttctttacggctggcgcaacgctatgccagccaggggcaactggcgattttaaacttgccaaaaattgagcaaaaaggcagcgtagggatgttctggcgtaagaatgagacgccctctttggccctgagtcgctttttatattttttagcccaggtttaa

SEQ ID NO: 377368 - DNA, 684 bp, Salmonella enterica
atgcagggtgaaaatagtgaaattgatttagtcgatgtttctttttttcttataagaaaatggttaagtattgtaatgactacccttatttttgttgccattggttatgtttttgtgaacttgcaacacgataccagggttgtgagtattaaaattaaacccaatctggatacgcctgctacctatgcgttatgcggctatatcaatgatattcaatgtaaagtaacggttattcttaatcggtttagccgctttttgcctgcggagtataaaaacaaaataagcttcgaggcgaaaaatcaacttatcctttttaaggcgcaggggagagaggaaagcatcaataatattatttccacactgagaaatagcgttgataaaatggcggcatggtatatcgatgatggtgatattaaacgctatagtttgcataaaaatatgttacaaacggaaacatatgcaaaactatcattgctgtcggaggcagttaaaaataatgccaacattgaagtgatagatgttgctattacgccacaatataagatgcgcctagtgttggccctttgcgggctgatgggcttcattttttcaatagctactcttttatgtaaaagggcgctaacagaatatcgtgttgagaaaaagacagtgaaggacagcgtagggaacatcgcgcagagataa

SEQ ID NO: 377369 - DNA, 630 bp, Salmonella enterica
atgcggcatagtcctcttacctcacggcgcgcggcgatatatcagtggttttcgcaactgctgtttcaggagctgagtgaggcgcagttggccgcgcttggcagtcaggagagccgagtctggattgcttcgctctccgccattcctggcctggcttccgacatcaaaggatttgaacgtagcctgacgcgcgttttgcagcgcgcagcgcgggcgcaagaattggcggcagacttcgcctcgctgtttttgttggcgccgccagtgggcgtctcgccgtatgccggacattatcctcatactacgccagcgcaagagcggcggcagatgaatgcgctactggtggaacaagaactggcgccacgagaaaatgaagcctccgatcatattgcgattcagttggcgttaatggcggaacaggtcagcagggaagcgccagtggcgacgcaatactattttttgcaacaccatattctgtgttgggcgccgctttttatggcgagctgccagcaacgggacgccaggggattttatgttctcgccgtagtgatgatggtgcattttatgcgcgaggatgcgcagtatctgcaatcactgttaatggatgacgttgactgtcgaaaccactaa

SEQ ID NO: 377370 - DNA, 2499 bp, Salmonella enterica
atggatagccaagagattaacgcgtcgcgtcgacgttttctgaccgctatgctggcggtgggcgccgccagcgcgcttgcgccgtccccgctgatcaaaaaagcgtgggctgccggtgaaaatcctgaacactggattcagtccggctcgcattttggtgcttttgaagcaaaagtgatgaatggcgagtgggttgcgacccggccattcaaacaggataaatatccctgcgatatgctcaacgccgttcgcgaggtggtgtataacccttcacgcgttcgctatccgatggtccggcttgactggctgcgtcagcgtgaaaaatccgatcgtcgccagcggggcgataatcgttttgtgcgtgtaagttgggatcgggcgttagatcttttttatgaggagctggagcgggtacaaaaaacctacggatcttccggcgtgtttaccggccttgccgactggcaaatggtggggaaatatcataaggctggcggagcgatggatagagggctggggctacatgggagctatgtgaccactgttggcgactattctgcggccgcagcgcaggtgattctgccgcatgtcattggctcactggaagtttatgagcaacaaacctcgctgccgctggtgattgaacatagccagactattgtgctgtggggctgtgatccgatcaaaaatttgcagatcgaatttctggtgcccgatcacgatgcgttcggctactgggcgcagataaaagaggcggtggcgcaaggaaaaatacgcgtgattagcgtcgatccggtgcgaagcaagacgcaaaactatcttaattgtgaacagttaccgctgcgtccgcaaacggatgtcgccctgatgctgggggtagcgcacaccctgtatgtcgagaaacgttacgatgtgaattttattaatgattacaccgtcggttttgagcagttcctgccttatttattgggaacgacggataagcaaccgaaagatgcgcagtgggcggcggaaatttgcggcctgagcgcggaaaacatccgggatttcgcccgcatattggtcagtgggcgtacgcagtttatgggcggctggtgcgtacagcggatgcatcacggcgaacagtatccgtggatgctggtggtgcttgccagtatggtcggacaaatcggtctgcccggcggcggcgttggatttggctggcactataacggcggcgggaccgtgacttccgcggggccggtgctgtccgggcttggcagtattgctaatccgccagcggcaaaatataagccggattttcgcggcgcgtcagaacatattcccacttcgcgaattgtcgattgtctgctgacgccgggtaaaaaaatcgcctttaacggagagacattaacctacccggatatcaaaatggcgatttatagcgcggcgaatccgtttcatgcgcagcaggatcgcaaccgtatgattgaggcctgggagaagctggaaacggtggtggtgctggaccatcagtggaccgcctcctgccgtttcgccgacatcgtattgcctgtcactacgcgctttgaacgtaatgatattgaacagttcggcacgcattcgaataaaggtctgatggcgttgcatcaggtggtcaaaccgcaattcgaggcgcggcatgattttgatattttcgccgggttgtgcaaacgcttcgatcgcgaggcggcgtaccgcgaaaatcgcgatgaaatgcagtggattaatgctatttatgatgaaggggtgaaaaccggggcggcgctgggcgttactctgccggatttcgacagcttctggcagggcgaaggctacattgaatatccggcggggcagccgtgggtgcgccatagcgagtttcgcgagcagcctgacctgaacccgctcggaacgccttcgggattaatcgaaattttcagtaagacgatagccggatttggctatgcggattgtcccgggcatcccgtctggatggagccgttcgaacgcagccacagcaaagcgaaaacaaaatatccgctacatctgcaatcctgccatccggataaacggcttcattctcaactttgttccagcgacgcgtttcgcaaaacgtacgccgtcgcagggcgggagccgctttatatgtgtgagcaggatgcccgggcgcgcgggctgaaagccggcgatatcgcgcgcgtttttaatgaccgcggccaggtgctggcgggcgtggtgattagcgccgattatgtccccggcgtcattcgtattcacgagggtgcctggtattctccgcagaaaggcggcaaggcgggaacgctgtgtacttacggcgatcccaatgttctgagcgcggacgtcgccacgtcgcaactggcgcaggggccatctgcccacacggttttggtggaggtggaacgctatcagccgcaggcgcctgacgtgacgggattcggcggtccggatacggtaaaagaggagggcgaaaatgcggcatag

SEQ ID NO: 377371 - DNA, 1134 bp, Salmonella enterica
atgtcgtggataaaaaagagcgcgctatggtggggatttggcggcgcggcggcgatggtgcttgttattgcgggaacctggcagggggtgcattacaccagtacgacggagttttgtttatcgtgccatgcaatgcgcaccgtcggcgaggaatatcgcagcagtacgcattttcgtaacgcctctggcgtgcgcgctgagtgcaaagattgccatattccccccggcattgtgccgacactggtgcgtaaaaccgaagcgttaaacgatctttaccacacctttatctccccttcgatcgatacgcctgaaaaatttgccgggaaacgcgcggagctggcgcagcgcgaatggcaacggatgagcgccaacaattcggcgacctgcaaatcctgtcatcgctatgaggcaatggatcacgcgaagcaatccgctaacgccgcggcgcaaatgtccgctgccgcggcgaaaaacagcaattgtatcgattgtcacaaaggaatagcgcaccacaaaccggatatgagcagcggttttcgcgagcgttatcaacaattgctacgccagggtgaagcccaggcggataccgacacgctgtacacgctaagtgaaaacgcgcttaccgccgcgcccggagcgccagtcgggaaagctctgcttttcccggcaacgccggtgaaagtactgaaaagagagaaaggtaactttctggtggaagtgaccggctggcgggaaagtaaaggccgcgggcgagtgatcacccaattcaggggcaagcgcgtgttttccgccgtactggatgccacgctgatggacaacgtcaaagtgctgcaaacgcagatcgatcctgaatctcatcagcagtggcagcaggtgagcgtcaccgcctggagtcccgcaacgggatttatcaataacgtcgatccgctttggcagtatgccgatcaaatgctgcaatccacctgtagcgcctgccatagcacgccgccgccgacccgttataccgccaacggctggatagccggattgaaagccatgtccacctattaccggcttaacccggtggaagagcgcacgttgctgaaatacctccagacccatgccagcgatgtgaccacatccgagaaaaaatga

SEQ ID NO: 377372 - DNA, 1479 bp, Salmonella enterica
atgctgtcattatctctgaacagggaaagcaccacgccgctgcaattacaaatatttcaatattattttcaggccattcagcacggcgatttactttgcggcgataagcttccctccattcgcgaactggcgctgcggttaaatgtggcgaaaataacggtggtgatggcttatgaaaaattaacggcggcagggtatatcaaaagccgacgaggaattggctatgaagttatctttaccgccccgttacgcagcatccagcctgctatgctttctgtgacgggctcccctccgcctaccccagggccgccaggcgtagccagcgacgtgtatagcgagcaagggcgggagatctattgccgtataggcattcccgatcctaacgcgtttccctggtcaagctggcgcaagtggaataatgtgccggcactgcaaaaagaacaattaatgaccagatatcattcaccaagtggattattttcactccgtgaacaagtggttcgctatcttaatttgtccagaggtattaatacctcgccggacaatatcattattaccaatggtattcaggaaggactctcccttctcagccaaatatttattctacaccaggcgcagcagcggcaagaaaaatgtcatattgtgacggaatccccttgttattccggcgcctggcatctttttaattattacggcgccgccgttacgcctgtcgcagtcgatcgacaaggcatttgtaccgataaattacctgaatgtaacacccaactttgttacgtcacgccagcgcatcagtatccgctgggctatacgctttcgttggcgcggcgagaggccttgttaagctgggcgctgcgcgtcggcacttatattattgaagacgattatgatgcggtcttcacatacagcgataatcccttgcctgcgctgaaagcgatggattatcacgatcgggtcatttataccggcaccttttctaaaacgctggggccaggggtgcgtcttggctacctcatctgcccggacgcgctgcttcccgccctgcaaaatatgaaagcgctgagcaataatggcagtcagtggctgctacaacagtttttagcggagctgatgcaaaaccaggttttttatactcacatcagtaaactggcctgccagtatgccgcccgccaggcgctattacgtacgggcctgacaacgctttttagcgaaggggaaattggcggcgcatccgcagggctgcatctgtcgttgcgcatcccgtggcccgcggcggtcgtcgcgcagctacgccagcgctgtctgcgcgctggtatttgcttcgatacgttgatggagatagaaaacggctccgaaatcgcctggcgaaaagagaatcacgaaacagtgatgctttttggctttggcggtctgccaatacagcaaatccgcagggtactggctgtcctgcaacaggaaagagaagcgttaaaaagttaa

SEQ ID NO: 377373 - DNA, 720 bp, Salmonella enterica
atgacgatgaaaacccgctatcccttgataattctacttaatgtcgccggtctggcgctgtttttgtcatggtatcttcccgtcaatcacggtttctggttccccattgattctggcatattccacttctttaaccagaaactggtggaaagccacgcgttcctctggtgggtcgccattaccaataagcgagcgtttgacggctgttcgctgctggcgatgggggggctgatgctcagtttctggctgaaagaaagcgcgtcgggtcggcggcgcattgtgataatcgggttggtcatgctgttaacagcggtgctgcttaaccagctcggtcaggcgttgatccccgtcaagcgtgccagcccaacgctctcttttgagcatatttatcgcgtcagcgagttgctgcacatcccgacaaaagacgcgtcaaaagatagtttcccgggcgatcacggtatgatgctgctgatattttccgcctttatgctgcgttatttcggcaaaatggcggggattatcgcccttattatatttgtggttttcgcgtttccgcgcgttatgattggcgctcactggttcaccgatattgcggtcggttcgctcacggttattttgattggcctcccctggtggctgatgaccccgctcagcgaccgggcgatagcgctttttgagaactatcttccgggcggaaataaacaaattttaaacaaatag

SEQ ID NO: 377374 - DNA, 804 bp, Salmonella enterica
atgaaaacactacccgtttcagccacgtttcttctctcccttatggctttcagcgtgcgggcgcacgatgtctgggtgacgtctcattctgaacagagggaggttgtggcagtgattggttacggtcaccattttccagacaggggaacgctgcctggcagaaaacattacttctcccttccccgactgacggatggaaaacagatcatcacactgcagcccacacgggaggcctatatctatcgggctgaaaatatcccggtaccagaaagctatattattaccgccagtatgaaaccgacgttctggtcccgtacctcagcaggctggagggctgccgataaaaagcagcggccggatgtgacctactgtgaatttgccacaaaatatgcccggaccatcacaggcaccggaggtccggctgatatggctgtcatagcccaaccgacaggccaggagctggagatcattcctgtgacgaatccgctgaaagccagcgagcatcctgcaaaattcaggataatgtataaaaacgtccccctggagaatgcggaagtggagatcaactctgcggagtatgtttctcagcatcaccacgatcaccgttctcacagaaacacagttgaacatcatgagcatgcctcgcaaatgatattaaaaagtgatgcaacagggattatcaccgtaaatcaactgcctgccggagaatggctgttgttaacaaagcagaaatcggcttacagcgatatttcccgttgcgacgaaacgatgactgccgcgacactgtcctttacccgtaggtaa

SEQ ID NO: 377375 - DNA, 1884 bp, Salmonella enterica
atgaccattaccgcaaccgggaccgaaatctcagcttttgaggcaccttctgtcgtcaacgtgattgataatcatgcggcttatacccggacagcctttaccgccggcgactttcttcggggcattgccggtatcacccccgtgggggtcggcagaaccaacggacaaacatttaacctgcggggttatgacaaaagcggtgtgcttgttatggtggacggtgtcagacaggacagtgggatggataaaagcagcgccactttcctggagccggcattaatcaaaaaagcggaagtcgtcaggggaccaatgtccagtctctatggcagcggaggccttggtggggtcatcagctaccagaccgtcagtgccgcagatttactggaaaatggccggcatgcgggctggcgcattttttcctccggagcaacgggcgatcgcagtctgggaggcggtatttccgccttcggtcgtaccgacaactttgacgggctcctgtccgtaattaaacgccagcggggaaatattcgacaaagtgacggcggaaccgcccctgatgacgagaagcctggggctctgctcgcaaagggcctctatcagttcgatcatgctcagtctttaggcggcagtatccgactctatgataatacatcagaagaacccggtaaccccacactgagtcgcccgggcaacggcaatccggcggcgtatttacggcatatcatacaacgcgatgcgcagttgaactataacctgcatcctgccgatcagagctggctggatctggaaacccgtctgtatacctcagacgtccggattaaggccaggcctgatggccgggaaagtcagaaccgccagagcgtaacctacggcatgaaggtccttaaccgtagtgagattcagacacagacaacagcccatcatttctcctggggagtcgagtattaccagcagcgccacacgccttccggagccgaaacgcgttatccggagggcaaaattaatttttattccggcctgttgcaggatgaaatcactctgcggaattttcctgtctcactggtggcgggtatccgttacgatcattaccagagtatcaatccccagtacggggaactgacggccggggaattatcgcccagaatggcactgaccctcagtccaactgaatggctcaccatatatgggtccgtttcttccgcattcagggcaccgacaatggaggaaatgtaccgggatggcctgcatttttatgcccgcggccggcctaattactgggttccaaatcccgatttgaaaccggagaccaatacttctcaggaaataggggccggactgcgttttgtttcattgtttgcggaagatgatgagcttcggctgaaaggcagctatttcagtacgcatgccagaaattacattgccacacgagtcgatatgccgggaaaacgaacctactcctataacgttccgcgcgccagaatctggggctgggacgttcaggcggcttacgccacccggtggtttaactgggatttgtcatataaccgaacggaagggatggatgatgccagccgggagtggctgggaacgctgaacccggacacggttgtcagcactctggcattcccccttcccggtcagggactcgcggcgggatggcgcagtacctttgttgctcccgcccgtcacgtaaaagcagatgcagaaacacagcccggatatgccctgcatgcattctcgcttgattatcatcttcctgacactaaagcggggatgacagcgtctctggtgctggataacgcttttaatcagcaggcttatagcgtacaggggctaccgtctcccgggcgttcactgaatttctttctgagttaccaatggtaa

SEQ ID NO: 377376 - DNA, 1149 bp, Salmonella enterica
atgactgtagaaaaatccgtggtttttaaagctgaaggtgagcattttactgatcagaaaggcaacactattgtcggtagcggctctgggggaacaaccaaatattttcgaattccagcaatgtgtacaacctcaaaaggtaccattgttgtatttgctgatgcgcgccataacactgccagcgatcagtcctttattgacacagcagtggcccgtagcatagatggtgggaaaacatggagtaaaaaaattgcgatttataatgaccgtgtcaacagtaaactttcccgcgtcatggatcccacgtgcatcgtggcgaatattcagggaagcgaaacaatcttcgtcatggtcggcaaatggaataataatgataaaacatggggcgcatacagagataaagctccagatactgactgggatttggttttatataaatcaactgatgatggcgttaccttttcaaaggtggaaacgaacatccatgatatagtaactaaaaatggaacgatatctgcaatgcttggcggtgttggatctggtattcagctaaatgacggtaaactggttttcccggtacaaatggttcgtactaaaaatatcaccacagttctaaatacatcattcatatactccactgatggcataacatggtcattgccatcaggatactgtgagggttttggttcagaaaataacatcatagaatttaatgcttctttggttaataacatcagaaactctggcctccgccgttcttttgaaacaaaagattttggaaaaacatgggctgaatttcctccgatggacaagaaggttgacaacaggaatcatggagtacaaggttcaacaattactattccatcaggcaataaacttgtcgcggctcactcatccgcgcagaacaagaataatgactataccagaagtgatatctctctctacgttcacaatttatactccggggaagtaaagttaattgatgatttttatccgaaagtcggtaatgccagtggggcgggttactcttgtctttcatatcgtaaaaatacagataaagaaacactgtatgttgtctatgaagccaatggaagtattgagttccaggacctcagccgtcatttacccgtaataaaattatacaattaa

SEQ ID NO: 377377 - DNA, 699 bp, Salmonella enterica
gtggtatttcaggacattgcaagaaagctaaaagataatattaatggatacacatataatgtaggggatctgctaccaaccgaaatccagctttctcagacttataacgtatcacgtaacacattacgaaaggcattagatattttagaaaaagaaggtatgatcgaacgtaagcatggggctggaacttatgtgagaagaaagagcttcattgcacatgtagagcatatgaattgtctgagtgaaatagctaaaaatagtggtaaagaaattgttagccagattatgagatttgaagtgcagggagctacacatcttatttcaagggaactgaatataacagaaaatgaaccagtgtattatataaaacgattgcgtattattgataataaactcgcgcagttagaagaaacctggctatctgtagggcgtttcccggaactaacagtctcacatatgaaaaaatctaaattctcatatattgaaaatgaatgtaatgttaaaattattggtacttttgaaacattttctccaatatttccaacacctgaaattgcaagtgttcttcatataagtactaaagatcctattttaaaaattcagacgcaagcaattgatgagaaacatcaaccaattgattattcaattctgtattctaatatattagaatttcaggttaaatatttcttaccgcgatga

SEQ ID NO: 377378 - DNA, 324 bp, Salmonella enterica
atgaaaaatatattattggtttgtgcggctggtatgtctaccagtatgctggttaaacgcatgtgtgagtacgctgcaactataaatgctgaggtcaatatcaatgcactggcaattgcagaggctaaaaacaagattaaaaacaatgaagcggatattgttttgttaggcccacaagtccgcttccagaaatctgaaattgaaggcgttgctcagggaagaatccctgtagcagtgattgacatgaaagattatggggcgatgaatggtaaatcagttcttgaatttgcctttaagcttcttgaacaacaatacaaccaataa

SEQ ID NO: 377379 - DNA, 1320 bp, Salmonella enterica
atgggattaatgaattcctttgaacgtgggatggagcgctttcttgttccaatagcaataaaactgaattcacagaagcatgtagcagctgtcagggatggatttgtttatacattccctattattatggcgagttcattaattatcttaatcaactttgcaatattgtcgcctgacggatttatagcaggactattacatcttggtagtgttttccctcatctggaaaaagcacaggccatatttacacctgtaatgaatggttctgtaaacataatgtctataatgattgcgtttcttgtagcccgcaacatggctatcagttacgaacaagacgatctcttgtgcggactgaccgctataggtgcattttttattgtctacacgccatatcaactgattgataatcaggcatttttgacaacaaaatatttaggcgcacaggggctttttgtcgcagtaattgtggcattattaacaagtgaaattttttgtcgaatggcaagaaatcccaaaattgcgataactatgccagcggctgttccacccgctgttgctcgctcattcaaggtgttattgcctatcttttttgtgatggtgttcttctctgcactgaattatttattatcattaatttcacctaatgggcttaatgatcttatttatacattaattcaggcaccactaaaacatatgggaacaaacatatttgcagtgattattcttggcgcggtcggcaattttttgtgggtacttgggatacatggtcctaacacgacatctgcaattcgtgaaacggtattctccgaagctaatcttgaaaatctctcatgggctgcacaacacggatcaacatggggggctccttatccaataacctggacgtcaattaatgatgcgtttgcaaattgcggcggttcaggtatgacattaggactactaatagccattctgatagcttctcgtcgtgctgagtatagggatttggcaaagatgtcatttatccctggtatttttaatatcaatgagcctgtcatgtttggattacctattgttctgaacccgattatgatggttccatttattcttgtgccaatcgttaactgtacaattggttatttctttgtctcaatgaagatcattcctccagttgcttatgctgttccctggacaacacccggaccattgattgcatttctcggaacgggggggaactggttagctttgcttgtcggattcctgtgtctgggagttgctacgttaatttatttaccgtttgtcattgcgtcaaataaagtcaataccgcgatgactgattaa

SEQ ID NO: 377380 - DNA, 312 bp, Salmonella enterica
atgtttgctgatgaagaaactgtcatggaattattaattcatgctggtcaagcacgctctgatgcaatggaagctatcaaatatgcacgattgaaagactgggattctgttaccagactaatgaaaagctcggaagaagcatgtctgaatgctcacaaaattcagactgctttaatcggtcaggatgaaggatgcgggaaaattagtgtcaatttaattcttatacatgctcaggatcatttaatgactgccatattgtgccaggatttggcaaaagaaattatttccctcagaagggatttaaccagttaa

SEQ ID NO: 377381 - DNA, 1674 bp, Salmonella enterica
atgaaagcaaaaaatgtaaaactcagcctgttgtgcatatttattggcatggcgttatatcctgctgatgttcttgccagtaaattaacggttgagcaacggctcgaacttctggaatctgaattatctgcaaataaaaaagaattgcagaaaacaaaatatgaacttagcacatataaaaataaaattgcgaccttacagaaaagtgttgctgaaaatagctatcgtaatactgccattccagatattacggccacatcacctgtttctgaaaacattaacaatgaaaacggtgaaatcaaccaatctggttcccatgttccagtcaaaggcacacaacaagtagcagtaatagacagcaatggcaaaaatacaactattgaaagcgttactctaaaagatatcagtaaatatgtaaaagatgatattggctttagttatcagggctacttccgttctggctgggcgacgggtaatcatggttccccggaaacctatgccgccggatcactaggacgctttggtaacgaaacaagcggatggttcgatttaacgctaaaccagcgtgtttataaccaggacggtaaaacagctactgctgttgtcacgtatgatggtaacgttggtgaacaatacaatgatgcatggtttggcgatagtgataatgaaaatatcatgcagttcagcgatatttttctgaccactcgaggatttttaccatttgctcctgatgctgatttttgggttggtaaacataaattaccacaatatgaaattcagatgcttgactggaaaactctcacagcagatgtggctgcgggggttggtattgaaaattggctcttagggccggggatgcttgatgtttcgttaagtcgtgatgatgttgatgtatattctcgtaattttgagcatactactcaaatgaacacaaactctattgacttacgttatcgaaatattcctttatggaaagatggcacattatcattaatggctaaatattctcccccgaataaaaccgatcagcaaaaagacaatgaaaataatgatagttattttgaaatgaaagatagttggatgttaacttcaattattcatcaaaatcttgaccgggatgcctttaacgaattcacattacaaattgctaataattcatttgccagcagtttttctagtttctctgatgcaagcaatactatgtctcatggtcgttattattatggtgatcatacaaatggtattgcctggcgtttaatttcgcagggggaaatgtatcttggtaataagatcattattgcaaatgcccttgtttattctcacggggaagatatttatagctatgagagtggcgcacatagcgattttgatagcatacgtaccgttattcgtccagcatggatctggaatacctggaaccagacggggatagaattaggctggtttaaacaaaaaaataaaactcagcaaggtattagtctggatgagtcagcctataaaactacgctctatcatgcttttaaagttggcaccagtattttaggttcaagaccggaaatccgtttctatggaacatacattaacattctggataatgaattatctaatttcaattttaacgataatagcaaagacgaatttatggctggtgttcaggctgaagtttggtggtaa

SEQ ID NO: 377382 - DNA, 1440 bp, Salmonella enterica
atgtcaggatttaaaagtgattttctatgggggggagctgttgctgcacatcaactggaaggaggctggaacgaagggggaaaagggattagtattgcagatgttatgacggctggagcttatggtgtttcgcgtgaaatcaccccaggaataatagagggtcgtaattatcccaatcatgaagcaattgatttttatcatcgctataaagatgacattaaacttttcgcggaaatgggttttaaatgttttcgcacatcaatagcctggaccagaatttttcctaatggggatgagattgaacctaatgaagaggggttacaattttacgatgcggtatttgatgaatgtttcaaatacaatatcgaacctgtaatcacattgtctcattttgaaatgccatatcatctggtgactgaatatggtggttggcgtaatcgcaaaatgattgaatttttcacacgctttgcgaaagtagtttttaaccgttatcagtcgaaagtaaaatactggatgacttttaatgaaataaataaccaggtcaatttccgtgaaagtctctgcccgtttactaattctggaattctgtattctgatgatgaaggggaacatgaccgagaaagaattatgtatcaggctgtacattacgaactggtcgccagtgccattgccgttagtgtcgggcatgaaatcaatccagattttaaaattggttgcatgattgctatgtgccccatctatcctcttacttgcactcctgaagatatgatgatgtctgtaagtgcgatgcatcgccgttattggttcactgatgtgcatgtacgtggctattacccacaatacatgctcaactatttcgataaacagaggtttcatcttgatattaccgaaaatgatcttaatattctccaatatggctgtgtggattatatcggatttagttactatatgtcatttgtaactaaatctacggaagataaccctgatttcaactatgttgaaccgcatcatttggttaaaaatccatatattcaaacttcagactgggggtggcaagtagatgcttgtggcatacgttattccctcaattggttctgggatcgtttccagttaccaatgtttattgtggagaatggtttcggagccgttgattttgttcaacatgatggaacaatagacgatcaatatcgcatcgattatctcgctgcgcatgttcgtgagatgaaaaaagccgttgttgaagatggtgttgatttaataggatataccccatggggatgtatagacttaatatctgctggtactggagaaatgaaaaaacgttatgggatgatttatgtggacaaagataatgatgggaatggtactctcgaacggcgtcgtaaaaattctttttactggtataaagaattgatttctcagaatggtaataatatttaa

SEQ ID NO: 377383 - DNA, 573 bp, Salmonella enterica
atgcaaaataccaatatcatcacgacagagcagacaccaaataccatttctgccagtaacactatttttaacgttcaggcgttgacgcaacttcaggcagtagccgggttgatgtcacaggccaccgtcacagttcccgatcaccttcgcggaaatcctgccgactgcatggcaatcatcatgcaagccatgcaatggggcatgaacccctacgctgtggctcagaaaacacacctggtaaacggagttctgggttatgaagcacaactggttaacgctgtgatctctagctcaagtgcaattgtaggccgcttccattacaagtacgagggagactgggagaaatgctctcgcacccgagtggagaccgttaagaaaacggccaaaggaggcggaatctatgagaaaaaagaaacgatcccatgttggaccagtgaagatgagtatggtctctcagttcgagttggtgcagttcttcgcggtgaaagtgagattacctggggagaaccggtgtttctttccagcgtgattacgcgtaattctcctttatggtgtcaacgccacgatgtttga

SEQ ID NO: 377384 - DNA, 153 bp, Salmonella enterica
atgcaaaaaatcgacctcggcaataacgaatccctggtgtgcggcgtgttccccaaccaggatggaacgttcaccgccatgacttataccaaaagcaagacattcaaaactgaaacgggcgcacgtcgctggcttgccagaaatacttgctaa

SEQ ID NO: 377385 - DNA, 135 bp, Salmonella enterica
atggtgcattacgaagtagttcagtatttgatggattgttgtggtatcacttacaaccaggctgtgcaggctttacgcagcaacgactgggatctctggcaggcagaagcctctatccgcaacaacaaaatgtga

SEQ ID NO: 377386 - DNA, 462 bp, Salmonella enterica
atgaaaaaaacacgcgaagtgattgcaactccagaagcgagcaagaatttaaaagccgcatggaatgcaagaaaaaaagagctgaagctgactcaagagttggcggctgagttgttgggattcgaatctcaaggcaccgttagccagtatctgaacggcaagataccggtaaataccgacgctgcgctaaaatttgcggctctgttaaaggtaaaaccagaggacattcgagaagaccttaaagacttaatgaattatgtaagatcatcagataattatgatgatagcttttcaggcaaaggatggaggctggtcaatgaagaacaggcagagttacttaacctcttcgagattctacctgcgtcagaaaaagccaaactccttaaccagctacgtggactaaacaagctctacgaggaagccttcgagaacatgctggcactaaagaaacgtaaccagtag

SEQ ID NO: 377387 - DNA, 276 bp, Salmonella enterica
atgaacttaagagactatttaaaagagaaacatatcacccagctacagtttgggaagctaacgggtttatctcaggtgcatgtaagtcgagtgctggggggctatgaaagattcagccctgaaaaagcattacgtgttgctgaagtaacgaatttcgaggttacacctcatgaactccggcctgatatctacccgaatccaaccgacggtttacctgttggatgtaaggctaacacacaaaatacacaggagttgattcatgaaaatcaggcatga

SEQ ID NO: 377388 - DNA, 456 bp, Salmonella enterica
atgtctttaatggctgtttgccaaaaaattaaaaatcacatgcgcactgtgtacaaaattaaccaacacgaccacgacatggttaacctggtaacatgcagggctatagttctcacccgcttccacctgattcttacaaatcactcacgggattctctcctgagccccagtagctatgattcgctggcgagattgctataccaggcaagtgaaaaacgtattactgatcccttatctgtttcccctgtccttgctcttcacattctggaagacgctctctatgacccccgtcaggaatgcgactatcaatttcttgaagctgagaaatcaatgagagaatggttcgttgaatatcgcgaacggcagcaaaagttatcctcagagtattcagaacttccgcaacttcgctggagtgatcttccgaacgaattatttgctctgaccccagaaaattaa

SEQ ID NO: 377389 - DNA, 1125 bp, Salmonella enterica
atggttaaggctaaaaacatgccaaatcccatgccaaaaactaaggcaaacaatgagccttatcgcaaggtaaaaataacgatatgggatgatcccaaatttagggcgttatctcctctgcctccaagtggacagagtttgtttatttatctgctgaccagtccatttaccgggattattcctgggttgtttaaagccgggcgggcagcaatggctgaagagttggggtgggatatcgaagcctttgacttagccttaggcgaagccatgaatcttggcatggtgaaagcagatatcaaagccagagttttttggctcccgaatgctgcgaaacacaatccgccaaactcgataaatgtcattaaatcctgggcaaaggcattcgctttaattcctgattgccctctcaaatgggaggccagggaatcgctgagagccgcgtcctacggggtttctgaggctttggggatggcattcgataaggcaatccctttgcctgaggataagcctaaggataaggctaacgctttgtcatgcggtatccagataacagataacagatatataaaccccacacataacgcgcgcgtgcgcgagagtgctccggccagtgaggcaaatggcgtgccgttgcagacagcggaacctgattacctggaaggcctgagcgaacccatcgggaaatttccgatgaccgatggctggcatccgtcgccggattttcgacgacgggctgcgctgtggggcgtggctcttcctgagccggaatttacaccagctgaacttgccgccttccgggactactgggcagcggagggcaaagtgttcacgcaggttcagtgggagcagaaattcgcccgtcacgtaaatcacgtcagggcgcaggttaaaccagtcagcaagggggtgagccatgcagccgcaccaggtggcaccgcatcacgggcagttcaggaaattcgggcagcacgtgagcagtgggaacgtgaaaacggatttatcagcgacggaaacggcgtggaagctgtgggaactcatgggggaggtttattcgaaccgctggacccagaagaacggggccgcaccttcgaagctctggattgcacagattggcgcgatgactga

SEQ ID NO: 377390 - DNA, 357 bp, Salmonella enterica
gtggaaataaccccagaagatgagtccgggaatattgttttatttccggtaaaagatgatgacccacgtaatcaggttaattttctttatgagccatcggagaaaccatattgccatcacgcttctgtcagggttgatgaaaaagagcgtcaggtccgctgcaaaatatgtggcgcagttgtggagccatttgactggatgctctctgtggcgaaaagagaaaccagactggcagatgatgtaaaacaattgcgtcaggaggagcgggaaagacgtaaaaatatagaaaagctaattcagattgagcgtaatgtgaaagcgcggatacgcagggcgacaaaacttggccccgaataa

SEQ ID NO: 377391 - DNA, 183 bp, Salmonella enterica
atgcgaaagttcaaaataattattgaaacgggaatagctggtggagattttgaggatgtattcgaagtggacgatgacgcaacacctgatgaaattcatgacgaagcaaaagaaattttctttaactactgcaattattcatatcacgaaataaaagacgaagaggaagaacaaaatggctga

SEQ ID NO: 377392 - DNA, 177 bp, Salmonella enterica
atggctgattttggttcaactaaatacaacgtcagttttgaagaatggcatgaactgttaatgaactatgcagagttacgtggtggaagtgctgctgatgctgaagcctggagtgatgactacgaagcaggaaaaactccggtagaagcatattgtgatgagtggggcgatgaatga

SEQ ID NO: 377393 - DNA, 516 bp, Salmonella enterica
atgagcgagattaattatcaggaagggcatgaaacggcagggcaggcaaaaccagttgcatggcgatatcgctacgtgaaaaaagacgttacagactttcaggggaagcagtgggctggtgactggaaatatgtcccgacaaaagaagattgtaacgacagaccaaactatgaaattcaggcgttattcacggccccgccagccccggtgacatcagaaggactggttaaagctgtgcgcttttatgaacaggtacggcgtgagaatccgccagttgaaaccggagcatggaaagacgccattgactgggtgctcaaagaggcctgctgtgctgccattctgggtaaagccgacaatccatcagcatccggcaatcaggttagcgaattaacaatgtgggttaaacgactggccagccaactggaaaaagctaagccggactgcaaattaccggagaaggcgatggactacctgaagcggaacgaactgataagcgcggaggatgttttgcgatga

SEQ ID NO: 377394 - DNA, 174 bp, Salmonella enterica
atgaaaattgaagaattacgtgaaatttttagtgaaaatggcctctttgctgtgcgcgttgagaatggggaagttatctacgcaacgttaatccctgataatcatgtaattttatctatcgaggcattcattgaatatcttgaaaggctcggtttcaaggtgattcgggaatga

SEQ ID NO: 377395 - DNA, 543 bp, Salmonella enterica
atgatttacccaacgaatacaggaaaaagcggagaacaccttcgtctcactacgctggaaagtgtctggattcagggaaaactacgtatgtgggggcgctggtcatatattggtggtggcaggtcaggaaatatgttcaatcagttgttggcatccaaaaaattgacgaaaacagccatcaatgaagccctgcgcagaatgaaaaaagcgggaatagagaaacctgagctggaagcgtttttgcgagagatgatcaatggtaagcaaaagagctggctggcgcattgtactgatgcagaggcgttatgtattgatcgggttataagtgaggtgctggcagaacatccgggattgattagcatcctccgacaacggtatgaggggcgaggaatgagtaagagaaggatggccgggttactaaacgaacagtatccagagtggtgttttagcacatgcgaaaagcgaattgctaattggttggctgttgctgagtgtgcgctatacattcccatgcgagaatcatttgctcaaaaaatggcttga

SEQ ID NO: 377396 - DNA, 714 bp, Salmonella enterica
atgagtgacagtactctgctcaggaattcttcactttttgttgcttacatggggtgtcttgggtggggaagcgcttatttctatggatggggtacttcattttactatggctttccatggtgggttgtcggggccggtgttgatgatgtggccagaagcctgttttatgctgtcacagttatcgttatattcttggctggatgggggatcggtattgtcttctttctggggatcaaacaaaaaaataatatgaaggatttgagtgctgtcaggctttttcttgcgatattgttgctttttgttcctccggctctggagttttcggtaattcatcagcactttgtgccagatgcattggttttatgcgctattgtggcattaataattaccatgttcgtcagaacgggcaggaagtttatttacgttaaatgtatttctgaagtgtcttttattcggcatcacaagattgagtgtgttatggccggattcatgatctatttctggttgttttcgcttattgctggatggtacaaacctcagtttaagaaggagtatcagacacttcactatgagagcgtttggtattacgttcttgctcgctatggtgatcgcttggttttatcaaaatcgtacaggcacagtagtacgaatttcgtcatacttaatagcgcacatacagatgaatttgaaattaatatagtcaaagtgcgctaa

SEQ ID NO: 377397 - DNA, 393 bp, Salmonella enterica
atgtctgaacccttatccggttccggtacggctgcggcgctcggtggggcgacggtatttggactgtttaccggaacggatttcgggattgtgtttggtgcattcgccggggcgttgtttgtggcgacgataccccagcagatttctgtctggcgtgtggcggcgcattttctggtgtcgtttatcattggcgtgctgggggcggatgtcatggcgtcttatctggtcgaaaaactggggctacacagcacatctctcgacgcgctttgcgcggtactggtatcggtgatttcggtgaagattctgtcgttcatccaccagcaggatattgcatcactggtatccggcctgttctcccgcctgcgggatggaggaggcggcaatgtcaggtaa

SEQ ID NO: 377398 - DNA, 276 bp, Salmonella enterica
atgtcaggtaaccttcccggattgctgaatgtggcgttatgcacggttatcgtactgacgctctttttttaccgtcgtcgtgattccagacataaaccgctgatgtcatggctggcctggctgttgatgctgctttatgcctttgcgccactcagctatctgtgtggtcgtccgttagcaatgggctggctggaagtgttttttaatctgttgttctgcgtgctggtaatacgcgcacgcgggaacgtcacaaaaatctttccattgttgaggtga

SEQ ID NO: 377399 - DNA, 378 bp, Salmonella enterica
atgtcgggtaaattcagattcagccgtcgcagtgaaaaaaatctggagggcgtcaaaccacagctggttgctgtcgttcgccgtgcgctggagctgacggaggttgatttcggtattacggaaggcctgcgcagtaagtatcgccagaaacagctggttgcagaaggcaagagccagaccatgaacagccgccacctgacaggtgatgcggtggatgttgttgcctacattggtagccaggtgtcatgggactggcctctgtacgagaaaatcgcgcaggcatttaagcaggctgccgcagagctgggaactgccatcgaatggggcggggactggaaaacactgaaagacggacctcactttcagttgaaacgctga

SEQ ID NO: 377400 - DNA, 183 bp, Salmonella enterica
atgagcagaaaacactggacacacagaacgccgcgaacagcggcgaaatgggcactggtagcgatactggtgccttttttattggtgggatgcgttagcctggataaggcgcgccagcttttcgataccgcgtctcaggtctgtcagcttattgatggtgttcggcagtgtatgcagaactga

SEQ ID NO: 377401 - DNA, 789 bp, Salmonella enterica
atgagcgagaaattgaagatcgtctatcgcccgttacaagaactatctccgtatgcacacaatgccaggacacacagccctgagcaggtggcacaactggtagaaagcattaagcaattcggctggactaacccagtgctgattgatgaaaagggcgaaattattgcgggtcatggtcgtgttatggcggctgaagtgctcaaaatggattcggttccggtcattgttctgtctggtctgacggatgaccaaaaaaaggcgtaccgcctggcagataatcgcctgccgatgaatgctggctgggatgaagatctgttacggatggagctgtcggacctaatcaatgctgattttgatgtcttcctgacaggattcagcccaacagaaattgatgaattgttgacggatgttttgccaggtacaggaattgaggaggggccgtacacgacgaaaattgatacgcctgtttatgagccgttgggcgataaaccagatatcagtgaactgtacgacgatacgaaaactcaggagttgatcagccggatacgttcggcgtcccttgatcctgatattgagaaattcctcctgtgtgcggcagaacgtcatacggtgtttaatttcagcagaattgcggactattacgctcacgcccccgctgaaattcagtgctttttcgaggaatcggcgctggtgatcattgattatcagcaggctattgaaaatggatttgtccggatgacgcagcgtatggtggagatcatgcatggcggggaggaggaatatgcgtga

SEQ ID NO: 377402 - DNA, 933 bp, Salmonella enterica
atgcgtgatgatttttgcgcctttattctgactcacgggcgaccggacaaagttctgacttaccggacgttgcgtcgtgctggctataccgggaaaatttttatcgttgttgatgatgaagataatacacggcatcagtacatagctgaatttagtgaacaggtgctggtgttttccaaagccgaaatcgccagtcgttttgacgaagccgataatttcggtgaccgccgatcaattttttacgcccgtaatgcctgtttcgacctggcaaaactggtcgggtgtaaatacttcattcagctcgatgatgattatcacgagttccagtttcgggtggatcgtaactatgatcaggcctattttccgataagaaaactggatgcgatcctttctgaaatgctggcgtactacgaatcaatacctgcgctttccatcgctatgtcgcagggcggggattttcttggtgacaatggcggccatgcttcgtgggtgaaacgcaaggcaatgaacagctttatctgttcggttgatcgaccgttctcattcatggggcgcattaacgaggatgtgaatacgtacacgaatctcggtcgctgtggtgaattgtttatgacgatcggtgctgtccagttagggcagaaacagacgcagaaaaacagcggcggaatgaccgagctgtatctggattccggaacctacgttaaaagtttttactccgtcatgtatgcgccgtcgtgcgtaaaaatctcactgatgggtgccagccataaacgcattcaccatcaggtcacctggaacaacgctgcagtaaaaatccttcacgaaaaatacaggaagaagacaccctgcatatcaatgggggtgacaaatgattccgtattcgaaagtcgagtctctggcagcgtgccggatgactgcacaacaaatcgctga

SEQ ID NO: 377403 - DNA, 1080 bp, Salmonella enterica
atgagcagaccggactggggggcgttgcagcaggagtatattgctgaatacacccgctccggtatatctccggtggcatggtgtgaagcaaggggactgaattacgcaacagcccgtcgttacatcaaaaaacctccgaaaaatgcgcagacagaagtgcgcaaaactgcgcagaaaaaatttgcgcagactgcgcaaaagcggaacggaaaatctcagaaaaaaaagtcagtatccgatgcgtgcctgaatgagggcgacgcggaggaaatttcattctgtcccgatgaattcggcatttctgaccagcaggcaaaattcgccatgctggttgcgcagggtaaaaacctcatcgaggcataccgcctagcgggttacgagggaacgggaaacgtagcaagtgccgcagcctcacgtctgttaagaaatgttaaggtttatcgggctatctcatggttccgcaatcagtaccagaaacgctataccgcagacctggatttactggtgagtcagttgatggccattgtccaggccgaccccaatcagttggcacaatttcgccgtgttaactgccgttattgctggggcgagaatcatctctaccagtggcgcgatatagcagaatttgataaggcagcggcgcaggcttccagagatggcaaacctgaaccggaatatggaggccttggctttgttgataacgccatacccaatccggactgcccgaagtgctgcggtgagggaacggggcagctttatatggctgataccactctgcttgatggggatgcgcggcaattatatgcaggggcaaagctcgggaaatttggtgttgagatcctgctggaggataaggctgccgcccggcgcgaacttatcaagctgataatggcgacgaaaggaagttctgctggtggtgcaactgacagtcgcaatgatctggagcttgaaggactgaggcttcgcaacgaaaagctgcgcactgagattgaaaacctcaaaaaaggcgtgggtggtgagaataacgaaataattatccacaactctctgccgatgccgggagtggataatgtcgattga

SEQ ID NO: 377404 - DNA, 1329 bp, Salmonella enterica
atgtcgattgaaatctacctcccaaaacctcatgaggggcaaatagctgcatggacggcggcaatagaggaacgcttccacgcggtatgctgtggtcgtcgctggggtaaaacggtgatgctggtaaacatcgctaccagtttcgcgacgcggaaatttgccgttcctaccaccgggcaacttatcgcgggtagggtggggatttttaccgcacaataccgacagtaccaggaaatctgggatgaaattagcgcagttctgcaaccgctgatcctcagtcagtcaaaaaatgaaaagcgcatcattctccggaacggtggccgcatcgacttctgggtgacggacaacaacaaactggccggacgtgggcgtaagtatcacgctgtgctgattgatgaggccgcattcactaaatcgccggaaatgctcgaggaaatctggccccgcgctatacgcccgacgcttgtcgattaccgcggctgtgcgtgggtattttccacaccaaacggtatcgacgagagcaattttttctacgcgatatgccacgatgaatccctgggatttgtcatgcaccatgcgccaacttcatcgaatccgtatattccgaaagaagaactggaggaaacggagaaaaaatccgatccgcgcgtctggcagcaggaatatcttgcagagttcgtagactggtccaaagacgcgttactcgatgtcgataagctgctggtggacggtcaaccaattgagatgccgccgtactgcgacatgattttcgcagtgatggatacggcgctgaaaggcgggaccgaaaatgatggtactggcgtggtgtatttctcttatgagtcaacgtattcggacgagccaaaactgacgattattgactgggatgtgacgcaaattaaagcgtcattgcttcctgagtatatccccggcgtttatgacaacctcgagcgcctcgcgaaattatgccgtccgcgtctgggcagccagggtatttttatggaagacgcagcgatgggggcaatcctcaaccagaaggcggaaaccgaaggctgggatatgacgccgattaaatcggcactaaccagcaagggcaaagacgaacgggcggtgatggcatccagctaccactatcaggggatgtgcaaaatcgtccgggaggcttacgacaagaccgtttcattcaaacgcaccaccgcaaaccacctcataaaacaaatcgtcgggttccacctggcagacaaagatgcgcataaacgtgctgatgaccttttcgattgttacacctatggattgatcatcgcgcacggtaattacgcggaattgtaa

SEQ ID NO: 377405 - DNA, 441 bp, Salmonella enterica
atgaaactttgttttggggttatcgaccagccgtatgactacggcgacgaaccgggaaaaaccacgtttgacgtagcctgtgacctcgaggagcgatacgaaatttttacgcacttctgggaaatgcataaggacgagattatccaggaggcaggtactgaactggcgtaccagttggtcaatcacttcaagtataaggctccgctacctggcgagcattttctggaagggaccgggaagattttccatatttttcttgaaactgaagaaatggccgggatgacgattaacggaaaccctgtgccaactcaggccgcgctactgggcgttaactccaggcttaaggacaaatataccggagagcggcgtccgtcattcatagacggcggcctgtttaagggcagctttatagcgtggatagataataatgccgagtcttga

SEQ ID NO: 377406 - DNA, 618 bp, Salmonella enterica
atgaaaatcgcgcgaaatttaaacctgattattcctgtccggacagaaaagggtaatggctggatccatgccacgccgatcagcaaagaggtgtttaaagagcatttcttcattctgagtaaaactttttctgccattttttcagaaggtcttggcgtcgttgcgggtccgcgtatcgcttttttgatgctggagcggatctcgcgtgattctaatatctgggaaggtgataaaggggtccgtaatacacttgttaatgaggtcattcgcctggcaaaccttgtttacccagtggagggtaaaggctacgacacaatccctctcgatatggcgctggagcgtgaaatcattgatttggatgaagtggcgggtgagctcattttttttacatgcgtctcgtcgataaattcaccggagcaggcgaaggggactatggatgtggtcaatggagtatggagcactcaatgctcgttattgaatcttacggaatggatcgcttcattgccgacattgaaatcagccgccagttctggcgcgacggcgaacacgtcatcagcgacatcctcgactactcagccggagccggattcagagacatctgtgcagattccggcctaa

SEQ ID NO: 377407 - DNA, 2076 bp, Salmonella enterica
atggctggtaaccagatgccagttctgacgctggatgttaatgaagaacacctcaggcggcttgaggcgatatttgaaaagtatcgcaacggactgatgattggccctgccggtacgccgcttaaaataccttcaaataccggtccgggaggtggctcttggcagacaaccacaggcggagaagccaatcaggctcccaggaaaccatcttcacccgcgccagttctggctgcttccactgatggacgtttaagggatgaaaaatggcgctttgttggcagcgggaaaacacctgattcgctggtgagcaactataaaggtcgcggcgaaacgatgtttgataagtacctcagcgggctggggaaaaacgccaaacagacgctgaaaacttacaagcagatcaattctacgctacggacgaccacttcgagattaaacaacctgtttaaaaccaccgtatcgtgggggacaaaacttgcggttatgggcgttgccgggccgtttggctttggcatgatggctcgtaatgttgtagagaaacagaaaaatgctgatgaattgcaggcaactccaggagagttaaaggcggcagaaagcacttattcgccttatttttccggtgttggtaatttgctcaatacactggcagccgcgcaaaatgacactcagcatcctgcctacaacgggctaattggattagggataaatcctaaaaaaggggcagcagaaaatcttcctgtattgttagaaagagttgctgctcttgcaaaggagtatgagggaaccggacttactcagagcatgctcagaggtcgtggccttggatgggtaaattttggtattgctaaccagttagtcaaatatcaggacaaaatacctgaactcaacaaagagtttttatcgcgagcttctcagaatgactcgttgctcacctctggacatacaagccagtatcagaatcttaccagcaacttagaaaataactgggatcaacttaccagcggatttcagggggcaatgtcgggtaactctgtacagctaattagaatatctaatggtgtaaagaatgctggtctaaatttccttaacggtgagaactttaaaagaattttgactgatgttgaaacaggtctggataaacttggtaagtatgtaaatggcccggattttaataacgacctgaataattttgccgaaaatgttgcaaaggttgttaaggcacttagcgggtttgttggttttgcggttgaacatccctggctttttggggccgcagtacttgctggaccatcgagagttggtgctgtggcagccacaacgaccggagttgccgcccgtgttgttggtggaagtcttcttggggctacagccggaacagtagctggattggctattcctacaaatgacacacctaccaccagtgaggaaatgaaagggctggaggggcgtttcaactttgattattttaacgaagtgcaggagtggcaaaaaaacaatccgggtaaggtctggcctggaggattgcagggattttcaaatcaagtaaacaggtctgcatatttatccagagggatcaggaataacaatcccggaaatcttaatttcgcaggacaaaaaggggctaccctggaatcggggccaaatgcccgttttgccagcttcccgacgatgctggaaggcattgctgccttagatcggcaggtaatgctatacctgaaacgcggcaaaaatacgattgatcagattattgatatttatgccccttcatctgatggaaataacacatcgtcctataaaagctatctctctcagtacaccggattaggtgttaaggagaaaatcgatggttctaattttgagataatgagaaagctaattcagggcattattaaccatgaaaatggggacgccgctcgtgcagtaagtggcgatgatgtgatgcgggcgctggcaatgaaccggggaaacgtatattcaccaaataatacttctcaggtaatcaggctcgacgttcaacaaaaaccaggttccgacatactggcacaactcgccggaatgcaacaaataccggggtaa

SEQ ID NO: 377408 - DNA, 162 bp, Salmonella enterica
gtgattaattttagcggaggagactggattgtgaaagccttaaaattagtggcaaaaagcaataccttacgacgcatgtattacaccgctgcactcgtagctttagcatttgccttttcaccagtactgacagagttagttaaagtgatgggggcacgatga

SEQ ID NO: 377409 - DNA, 264 bp, Salmonella enterica
atgtctgtagtgatatcaggtgcgctgattgatggcgcaggcatccccatgtccggatgccacataattctgaaatcccgggtaaacacctcagaagtggtgatgcgcacagttgctgatgtggtaacgggcgctgacggtgaatattcatttgaagcacagaccgggaaatactgcgtatatctgaaacaggactggcgcgacgagtactgtgttggtcatatcacggtttatccagaatcacccccccggtacactgaatga

SEQ ID NO: 377410 - DNA, 2709 bp, Salmonella enterica
ttggtcatatcacggtttatccagaatcacccccccggtacactgaatgattttctgacagccatcgatgaaggtgacctgaagccggatgtcgtcaaacgatttgaggaaatggtggcgcaggcgcagcagagcgcggaagccgcagcggaaagcgagcgacaggcctggcaacatgtcgctgatgcgcaacaaattaagagcgactgccagacgctggcagataacgtacagcagaatgcagaagccgttgccgaagataaacagcgcgttgcacagctggcctcagaagttgagcagaacgccgggcaggtacagcagggtgtgcagagtgttacagatgcagtaaagcaggctcaacaggcagcagatgactcagcatccagcgcagaggaatcaaaaaacaatgcggataacgccgccctgagcgagcagaatgcgaaaaattgcgctgataatgctgccggaagtgcacagcagaccgcacaggatgtgaaggcaaccgcagcggcgcgtgatgatgcagagcgttttgctgatgaagccagaaataatgcagttgcaacggctgcggacagggaatccactgcggaggatgcgaaacaaaccggtcagaatgccgccgcggccgccatgagtgctcaggaggcgaaagacgcagcagggcatgtgcagggattcattcatgaccacctttcagtatcagcccgttattcggtaacagaggcgaaccgtcagctacaggcgttgaggataaacagcgggcgctacgaggggctgtggcgctacctgaatgcgaacggtggtatcaactggtattttctgtttcttgccgtgtatgaaagtgaaggaaaatgcttttccctcagtgaccgtatgacaatttgcgaaaaggcgttaagactggggcttgtggttccgtttatgaccggttgccgttatgaagccgggcagcgcctgacaataaacggcacgcttttttttgttaatatcgcgggcaccaccggggaaacgttgcctgatatcagctctgtagcccccggagattttgtccggaccggctccgctgtgctggagtgcctgaaaagcccctcaaaccgaattccggctgcatggcagtatttttttctggatgtggctccggatttgtatacccctgttgcgccggactccacggacagctacccggcgctctggttcgcctgcattgctgaatttgcggacagtacctggttacaggagtcagccggaatcggcgggtccagccgctgggaaatcataaaacaggtggcaaagttcaatatcgttgctgaaataaatccggtggcaagtctggtaaacgtattccagcacaatcttgcacccggtgaccgggcttatgcacagtgtttttgtcaggataacgcagaggtttatgccggtttgcgtgcactgaaaacactggctgaccttgccggagataccactgctgcaactgaatataccgctgccatgaaaaccatcagggctggcctgcttgcgttgtttgtacctgaacaaaaacggttcctgacgtattacaacgagacggattacccggcagagcctggtgaagggcgttttgttgataaggaccgtttttctgtggccccgtggcgctttggggtgctggaaacacaggaagaagtggaacggtacggcaggcaggtcctggacgccatacagagtgcttacccggacctgttcacggcaaattatgacggcattgatacgtttgccatgagtgatttttttgcttttgtggcaaaggtcaccacctctcagacagcagccacggctgccatcagacgcctgcaaatccgggcgacatctgccgtcacggtggccgacgttgccgccgccatatccgttacagcctggggaaaaatcccacagtttcgtgcctgtgattttatgcgcatcaacgggcattccgtgctcggagggggcgatatcacgctgggcgcggcggccacaatggagccacagagtgatattcgcgacaggacggaaggcaggatggcacttcccgatgccttcggttttgggcgtatattcaatacaaacgaaactgtctgctttgactcagaaaatgattttctggtgtgggtaaaacaggtcacgccgggtgaatattttgttgatggtggcagtaaaatcatatccggaggtgtgttgtttaacggggtggtcagcatccgctgggttgaggcacgcaataatccaccggaaccgcgatatacagtaaaggtcattattttctacggtattaatggcgatatttattacaaccgttactggacaacaggtaatggttatctgactggctgggaaaggttgaagctgggggaaacagggattgcggatacgctacgttccatcgccggaagagccaataattacggttatccaggaattggcggggtcgtgtttgccgcatactgcataaatgacatggatgaagacggaagaattttcaggggaagcggtgtgtcaggctccagacttgctgccatttctgttacagcgccgtacagccataatggcctgagcacctcaactccgcagattgtaattgcaccgccttcggcgtatccaatggcagggacgtttgtggcactgtcaggggaacccacaactaaagtgagtgccggtacttcgataacaggtctgtttgtccgtattgcgtag

SEQ ID NO: 377411 - DNA, 564 bp, Salmonella enterica
atgcagataaaacgaattgaaaatgcgcgttatcttgagaatggcgcgattgactgcgaggtgttgtttgatggcatggatgcccctgttccgtatacggcaactgccactgatgcagcagagacagggcagcgagtctggctggaactgcaaagcgggagatggggtgagattaccccgttcgtcgttacaccagaactgctggaggccgtaaaagcagccaaacgtcaggaaatagaagaatggcgtacagaacaggaggcgcagccgttcacgttcgaatggaacggtcatagctggaacgggggaccggattcgatggcccgtctttacacggtggtgatgtcagcaaaatcagtcacggcacggaaaaccatggtatggtgcgatgcggaaaatcggcaggtaaagttgtcaatgcaacaactggatgagctgcttactgcaatggcgcaggcgcaggtcgatcgtaatgacgagatttatcagcgccagcgagggatgaaagaggagctgagcagtctggaggatttgaaatcggttagggatttcatgctggaataa

SEQ ID NO: 377412 - DNA, 465 bp, Salmonella enterica
atggaaagcagagtgaaacaactaagactggaaagagcctggtctcaagaaagactggctgagttatcatcgctcagcacaaggactattcagcgaatagaaaataatgaagtgccaagtttagaaacacttagcgcattagcttccgtgtttaatgtcagtgtatctgaacttacttctgagccgctgccggaaagtatagagttagatagtcgaatcgcagaagctaaaaaacgagtaaaagatgaagctaagttattaaaaagtataatagtagctatcattgtatgtgcaataatgtattttcttaattatatatatgcgccgcatagtgattggcctgtttgggttatggctatttggggcggtattttgatagtgaaagtattcaaactatttcttttagataagttgctctttaaatggcaaaaaaatagattaatgtctcttaccagaaaaaattag

SEQ ID NO: 377413 - DNA, 213 bp, Salmonella enterica
atgataatggacaaaatgaccacgggagtgtcatacggcgtgtcttttgccacaacgctttattccgtcctcgactcatttactcctgatgaatgggcggcaattggaattcttagtggcgttatttttggtacgctgacatttctaacgaatttttattttcagtggcggcggttaaagattcaggagggggatggtagttctaaagaataa

SEQ ID NO: 377414 - DNA, 357 bp, Salmonella enterica
atggtagttctaaagaataaagtaaaagcccttctggctggtggcgcgggggcaatagtgatagcggcggcgcttcttgacgatctggaaggcaggcgccacgaaccctatcgcgatgtggcagtcgtactcacagtctgcgacgggcatacgggaaaagacatcgttccaggcaagtactacaccgatgcggaatgtgatgcgctactgaataaagaccttgcactggtcgcagcccgcattgatccactgattaaggtcagtatccccgaaagcgaaagggcggcgttctactcctttgcatacaacgttggtactggtgcatttgccaaattctccctgctgaaaagaaagtga

SEQ ID NO: 377415 - DNA, 453 bp, Salmonella enterica
atgaaaaaaatcacctctgtttgtgcgttattaagcctcatttgttctttcaacgccagcgctgagtggacgggagattacgaaaacattggttatttttcacacgaagttatcagtgagttccatgttggccagatcgatgggggcgcttatttttgcataaaagcggttaaagccgatggtagtcgtagtactcctcttattgcatgctcagtatcaaatgagagtgtatgggctccttcttttaaagtgctcctagaacaagcaaggtatttttacgtcaccgaacaatctgtaaggatttattatgatcataatgtctggacaaatcaaccctttgtaaatacattttcaacaaatgccctcgtgggattatcgtcatgcagcgcagcaaccgactgctttggccctggtaagcctaagagtaagagtaagagggatgtggaacaatga

SEQ ID NO: 377416 - DNA, 732 bp, Salmonella enterica
atgaaaaagttaatattactgaccttaataatagccagttttgatatctatgcgatagattttgtttatcgtgtagatccaaatccaccggatgttatttttcgtgatgggttctctctacttggatataatcgggacctacagcaattgatcagtggaagatcgtgtgctggtggaagtagtgacagtcgttatattgtaacgacatcagatattaataaaacatacgctatagccagagcgtactattctcattcaaaattcaaaggtaatctgtacagatataaaattcgcgcagacaataatttctacagtttgactccatccgtcaactacctggaatcgcaaggcggtcactttaatgcttatgaaaaaagcatgatacgattacaaagtgagtatgtttccacattgtctattttgccggaaaatattcaaaaggctgtggcgctcgtttatgatagttcaacaggtcagataaaggatggtacaagtacaataaataccgattatgtaagtataagcagtgtgtcgaatccaggagtgataccttttctccccgagccgcaggctaatacacagcaacggattgatgcatttggctcgttaataagttcatgcttttcaatttatagcgtgtgtcagacacatagaggtcaaaaaactgaagtgtacaaaatgccattttatgatgcaaggccagtaatacaatttatcatttcaggtaattga

SEQ ID NO: 377417 - DNA, 543 bp, Salmonella enterica
atgactaaagatgaagtctttgcgtctatcctcgatagagagggcggttacgttaatcatcctgacgacagaggcggtccaactaactgggggatcaccctgatgagggcgcgagctaatggctacatgggcgatatgcgaaatcttactcgtgatcaagcgttaaaaattcttgaggctgattactggtacggtccgcggttcgatcaagtcgccatgatatctcactctgtcgctgctgagctttgtgatacgggtgtgaatatggggccattaatcccgattaagtggttccagcgttggctgaatgtctttaataatcaacaaagattttatccggatttgatagtggatagtcagattggttcgcgtaccctatcggcgttgagatttttcctctctatccggggaagtgaaggtgaaatgatacttattcttgcgctaaattgtagtcaggggcaacgctatctggaactggctgaacagcgtcaggctaatgaatcatttatttacggatggatgaaagaacgtgttaaactgtag

SEQ ID NO: 377418 - DNA, 240 bp, Salmonella enterica
atgactctcatacttcacagtctgattaactttctcaggctgactttcaaaattaacaaagtggatgggttattaaaaaagcatggaaagcctccatgctttaaaatagcaattatgattcttaacggctttactgttccatcgacagtgacacaaatcgtattgatgcatccatcgcaaatagccatattgcagattaatgaaaactacagtttaacacgttctttcatccatccgtaa

SEQ ID NO: 377419 - DNA, 378 bp, Salmonella enterica
atgagttgttttactactccagcaataatggaaatgttaggtcattatagatggcgggtttacgaaccattccgattttatctcagtgaagataaaaatgatgtaattgaagtgccagtcggttttattaccgatctagccactgttccgcgtattttctggtcactgttaccaccggatggagaatatgccaaagcagcaatcattcacgactacctgtaccactattcactacgcgacagaaaagaatccgatttaatatttctggatggaatgacagtactcggtgtgccaaaatggaaacgaacattaatgtatcttgctgtaaggatgtttggatggaaatattatgactctcatacttcacagtctgattaa

SEQ ID NO: 377420 - DNA, 807 bp, Salmonella enterica
atgacaggacataaccggatgccggttcggcagatcatcgtgcatggtgactgctggccggtaacaaccgccgtggcgcatctggtcaggtcagtactatctacgtgtgagtatgtaattacgtacacgctgccagttctgttacagcaactgcaccggaaaccggaagcaaccttagtattgtgtctgcgccctcgtgaacatctttttttgttttacgctctgaaacaagcgatcctggatcacccggtcctggtcatcagtgatgaactgttttttagtgaccagttggtactaaaggtatatggggatatcccggcaattcagcagcaggaactaacggagatgcttatacgggttaaacaagaagagcaatggtatggcggaacgcgttgtcaagtgacgaaaaagctggacgattttctgttatatccgaccctggtgacaggttttctggaagtcccccagatattcaacagcccaaagcggctgatgacctacatgtcactgctgatgcacagggaaattctggcatgtggagtgagtccggcccagcagcgtctgcttgaggaggtttatcgtggccggggaaggctgtcagcgctctgtggacggctgaatgcaagggaaagacaaatctggcaagacaagtatcggttactggtgaaattaggcatgagaaatcggttacgtgaactgttgtacggcacccggttctgtatgaatatgcaaaaaacagtttttatggctccggcagaaaccgtattccctgaccagcagaatgatttcgcaccacactcattctga

SEQ ID NO: 377421 - DNA, 510 bp, Salmonella enterica
atgtgccctgataacacacacgcaaaaaagcggtacctgacgcccggtaacgatatgcattatcccggtcagtcaaaccatgacgcctgctttattccagagagcgtccgccagtatgccagcgagcccttatatatcatcgtcgcgcactggtgccaacagcagcaggactgggtccaacgcaaccagatatcagaggcgtttcatattactgccagacgggccagttacctgattgcctatctgcgaagtaaagcttcgcgggtagtctgtgtctgccgccatcagactctgcctaataaagcgctacgctatgagatttatattattcgtgttcttaacaatcccaatccagctcgccgtgaacggatcgtaacgccaccggtatcccggcgcagggtcgggaatgccgacaaaacgatggcgaatgtgttgtggaaccagctgtgcagtaacagaaatgcggggaaaatcctgaaaaaggagaaagatgaagatgacaggacataa

SEQ ID NO: 377422 - DNA, 678 bp, Salmonella enterica
atgaccatcaatgcaaccctgtcaagaaatccatcacaaagtacccgccccgggttttatgcgataccatcgctgtctgctttcagactgaaaccttattataattatggcagtggtccattcctgacttctccggcaataagattacagtatgtcccgacatgttttgtgaggttccaactggataaaaataacattaactttggaccggtaatgacaacagatgtggacagttctttttcccggagagataactttactgtcactgcagatgtaaacccaaactgtaacagcgggcagttcggaaatctccttggcggctatacccctcaactgacaggggcacagacatattatctggacctccctttaaaggtctcttttacactgcagggtggaggatatatttcagggaattccattcttctgtataagcaaggcacactaacaaaaaatggcctgaaactgacaataactgacccggataatcacccggttaagtttggtgaaatcatttcacctgatgcccagtcactacctggcaataaactaggtgaattcagtaatggaaattttaatgctaaaaaaatatataacgtcaaactgtccgccacaggagaaccggcattaaccggaaaatacaacgcacaggttctcgttaaggtggaatattactga

SEQ ID NO: 377423 - DNA, 459 bp, Salmonella enterica
atgaataaggtgatgtacggagaaaacaggagacgtggcggcaggaatatgttatgccggctgctccggtccggacggtggtttttatgtctggcgctgcactgttctgtcatgttgccgggatttgccagcgcggcagagcctgttccggctacagcgcaatgtacggactggaacaatagccagggagatatacaactaaagttgccggcctctatcactattcagcccagtatggtcgacattcctcccatcccgtcggtcaccgttaagtataaatgtagcgtaccggacagtaacaatcacacagtggctatagtctctcttgccgatgcgcataatttaattagctcactgaaatcacttgggctgacactgaaaatgacgattactgatagctccggaggggccgtaggtcattggacttttcccgccccgggggggggggatataccctga

SEQ ID NO: 377424 - DNA, 753 bp, Salmonella enterica
gtgaacaacagacagacagcgatgctcattgccggcctggtccttgtccttgtcgggcccggtactggccaggcggccatcaatgttgaccgcacccgtatcatcatgagcagcgatgcaaaagccgtctccgtcgggctgagtaacgacagtcccgacgccccctatctggcgcagtcatggatggaggacagcctgggaaaagcgacaaatatactgatagcgctgccgccgctgcagcgcatcgatgcgggaaaaaaatcccgggtcaggataatgcgggtggagaatgcaggcaccgccccgctgccggcagaccgggagagcctgttttattttaacgtcagggaaatcccaccggcgccggaggacaaaaacaaaaatatcctgcagcttgccacccagagccagttgaagctgttcctgcgcccggccacgctggcggcggaggggaacgcctcgccggagaagaggctgctggtacagtccgccggcgggtcgctgacgctgaaaaatccgacgccgtattacatcacgcttgtctggctgggacaaagtccgaaacagaaactggcgggctttaaggaaggcacgatggtggccccgttttcatcgctgccggtgaatgccgtcctgcctgccggaactggccagataatggtgggcaatgtggatgactatggcgggctgcggatgaaccgcttcatctgcacgtcaggaagatgtacttatcaggagcgtatcaatgaataa

SEQ ID NO: 377425 - DNA, 2484 bp, Salmonella enterica
atgaaaataacccggccggcactgctgattaccctgaatatactgacgttacctgcaggggcgacacagttcagcgccggttttcttaaaaacagtgaccacagcagcgtggatttatccgccttcagccgggatggctacgttgcgccgggagattacctgcttgatatttacctgaacgacagactcatccgcagccagtacaacgtcagggtggtggagaccggcgacgggcgctcacgcttctgcatcaccccggcactgacagacatgctcgggctgaaagaggagagccgccgtcagcttgtcccggtcgaagggacggacggtcagtgccttaacctgagcacagcggacagcagggtacagtattcaccggacaaccagtccctgtccgtcaccctgccccaggcgtggatggaataccaggacccggactgggtgcccccggcccgctggagcgagggcgtcacggcggccctgctggactataacctgatggccaaccggtacatgccgcatcagggtgagacctccaccagttacagtctgtacggcaccgccgggtttaacctcggcgcctggcgcctgcgcagcgattaccagtacaaccgctatgacagcggaaacggcagcgtgcagtctgatttttacctgccgcagacgtatctgttccgggcgctgccctcactgcgctcgaaactgacgctgggacagacgtatctcagctccgccatttttgactccttccgctttgccggactcaccctggccagcgatgagcgcatgctgccgtcctccctgcagggatatgccccgcaaatcagcggcattgcgaacagtaacgcgcaggtgaccgtcagccagaacggccgcatgctgtaccagacccgggtgtctcccggaccgttcgtactgccggacctgagccagaacatcagcggcaatcttgacgtgacggtgcgcgaaagcgacggcagcgtccgggcctggcaggtcaacacggccagcgtgccttttatggcccgtcaggggcaggttcgctacaaggtggccgccggacgtccgctgtacggcgggacgcataacaacagcacggtcagtcccgactttctgctcggcgaggccacctggggagcatttaataacacctcgctgtacggcggcgtgattgcctccaccggcgattaccagtccgtcgccctgggtgcggcgcagaacatggggctcttcggcgcggtatcggtggatgtcacccgctcggatgcacagctcccgcacgggcagagccagtccggttacagctaccgggttaactacaccaaaacgtttaacagtaccggcagcacgctggcgttcgtcggataccgtttctctgaccggcattttctgtccctgcaggagtatctggcgcgttccgtgtatgacggggagtatctgcaggatgaaaagcagagctactccgtaagctggaatcagtatctgtcagccctgaacatgaatgcctcgctttccctgagccgtctcagctactggaatgctgattcaaacaataactggacaatgtcgctcagtaagtcgacagatatcggccccgttcacggcattaacctgtcactgtcactgtcccgtaaccagtcggcgtacaaccggacacaaaaccaggtttatttccaggtcagtgtcccctggggggacagtcgccaggtgagttacagcctgcagaaggataaccagggcagtatgctgcagaccgtgaattacagcgatttccataacccggatacctcatggaatatcagcgccggccataaccggtatgacagcaacagcagtgacagcttcagcgggagtatccagagccgtctgccgtggggccaggccagcgcggatgccaccctgcagcccggtcagtaccgcagtctggggctgaactggtatggctcactgaccgccacggcacatggcgctgcgttcagccagtcaatggccgggaatgagccgcggatgatgattgataccggagacgtgtccggtgtgccggttaacggcaacagcggcgtgaccaaccacttcggggtggccgtggtgagcgcgggcagcagctatcgcccgggcgacgtctccgtggatgtgtccgcgctgccggacggcgtggatgtggctgacccggtgatcagccaggtactgacggaaggggccatcggttacaggaagatagacgtcagccagggagaacagatattcgggcatatccggctggctgacggcacaagtccgccattcggcgcgcaggtcgtgtcggagaaaaccggtaaaacggcggggatggcgggtgataacgggctggtctacctgacgggcattgaggcttcagagcggaatgctctggtcgtgacatggggcggcaggccgcagtgccggctgtccctgccggagaacgcgaatctcagccggggagccctgctgcttccctgccggtga

SEQ ID NO: 377426 - DNA, 615 bp, Salmonella enterica
atgcgtaataaaataatacttgccatgacggctgccggtatgatgtgcgccacttcggcttttgctgctggtgctattgccaccactgacgctggcggagggacaatgaccttcagtggctcagtcattgatgcgccgtgcagcattgtgccggacagccagaacatcaaagtggacctgggtcaggtcagtatgaaatcactatcagcagcagacaagtactccagttcggttcctgttaccataagtctgaccggatgttcatttgaggcagcccctggcacgccaccgacagatggcacgacaggtaactattcaaaagtggccgtaacattccctggtgttatgcccccaccgggcggcgatttgactaaaggagaaatagcaaataccgcaaactcccctgccgctaatgtagctattcagctcctgaaaggtgatggcgttaatcctgtggacctgagcaagacgacacctacaacaggtgatattacactggatacctcttcggcaaccaataagctgaatttctttgcccgtatgataaccgttggcggagcagcctcccagggcgctgtcagcgccacagtcacctataaactgaaatatttctga

SEQ ID NO: 377427 - DNA, 999 bp, Salmonella enterica
atgcacatcaattcagcgaaaacctatgccagggcgtttaccgcaaatacacaactgcatgaagctgcaggaaattatgaaaataaacttgccactaaaatcgccaaaggaatcgttggagcactcactctgggaattggatatggtattatccgactaattgaaaattattgcaacgttcgtgataaaattaatgattattgcgctaatgccgagaatattcataatgggattgcggtagctatagtgacggggaataacgttgccgagattaaactccaggacaatagaattttaacattagaacaaattaaccatgagcacgttagtgaatcctctgtaaggatatcagatggtgagcatacagaagaaatcccaggaacgtttagcgatatctgtatgaagctaggtcaggagtttaataatgcgcctggtctgtataacattagcagtcaatatcagccgctggacttctttttacagatgcgagcctgcacaattgcgccagtcattaacttttcgccggtcaccggacaatatgaaaatttatatgagaataatattctcaatatacataatgcacttagcaaggctatatccatggaaatgacaggggcaaaagtaacgttaatcggagggtcggaaattgaatttagtatctcgcaagaatcaggcgacgaacaaaaaaaatcacagataactaatgggttacaagttatggaagttgaaggtactttcaccgatctctgtcgggaatacgagttattactttatacaaaagaccagaatattgattttacaacgctggatgaaaggttagctgaggtaaaagcgaataaaaactcagctggggcaatccctgatctggaagactttactcttacagcacgctgtatggctgacgcagaaacggcgcgtcttgcagaagccacccaacggtttaatgcagcgtatggtgatagcgcgccaccttcaagacccccactacgttttaagtaa

SEQ ID NO: 377428 - DNA, 396 bp, Salmonella enterica
atggaattacagcttatacttaataattatttcgagcgcgtcagaagggatgcaaatttcaacgcatttttaatcgatctggaacacaataatattgcttattatatctattttgttgctaccggtaatgttaaaatcattacccataccggtcactttatttcggttaaaagcaatagaaagctaattaaagtcagttcaacaacgaatgcagaattaataaaattcacttccgctaaacatttttctggaggacactcctatgaaaagtactgtaatgatctggcaacagcaggcgtttttaaatggattgttgagttaaaccaaaaaactcgacaatactggtcgaaagacaacaaattattatatatagaaaatgtgatcacgacgctttaa

SEQ ID NO: 377429 - DNA, 723 bp, Salmonella enterica
gtgactaacataacactatccccccagctttgtagaattcataaaagtgacgttgaaccagtaaaagaaaaaacagcggagaagagcgcgtttgcaaaaagtattaccgctgttagaaatagctttatcagactatctacgagtctgtcagagcattttagcttgcacaagcaaacagaaacaccgactgcccattttcatcgtgggaacgcttctgagggacgctcagtattaaccaataaaattgttaaagattttatgctgcaaaaactcaatagtctggatatcaaagggaatgcgagtaaagatccggcctatgctcgtcagacatgcgaagccatattatcatcggtgtacagtaatcataaagatcaatgttgtaaattactcgtcaataaagggggcagtattacgccctttctgaaagagataggagaggctgcgcaaaatgcggggctacctggagagataaaaaatggcgtatttactccagctggggcagggacgaatccttttgtcgttcctctcatctcttcagcgagcactaaatatccgcatatgtttacaaattataatcagcaggtgtcttttaaagcatatgctgagaagatcattatgaaagaagttacgtcgctgtttaatgagagatcgatgcagacgccacaacaatttcagttaacagtggaaaatattgcgaataagtatcttcagaatgcctcctga

SEQ ID NO: 377430 - DNA, 7467 bp, Salmonella enterica
atgccgcaaataaccgctatcaatagtattgaaagtcaaaatgtaatgcatggcgccccctccgcgataacagcacttactacagaacaattattaataaaaatagataatgtaaggttagaagaaagacctgcaattccagtctgctaccggctggctgtgaatgctggcgttgtcgccgggacgatatccaaagaaacagaagatatcctttcatctattcctggtaattattctgaaaactatcaaaaaattatgggaattactgtagggaattacttcatgcatatcagcaaggatcatattgtcgactctggaataataaatttcaggaatttaagaagtggtaaaatatttcacacagcctatgtgcataaaactataaatggcgaaattatatttctacataataataatcttacaatagatgcaatattaaacaaagggatgcattctctccctttacaaaaagggggactgaatgttcatatattagatgaccagaaacttagaaacctacaggattatcttaaccaaaacattggctttcacttcattacaacacgtgatttggaaactaatttaaaaaaagagtatggctttaaccatccctgtaatttgccatgtgagcatttaacacataattcagagggagaaaaactttcatcagaacaaatgatggatgttgatgtaccggggacatcggcacaacaagctaatatccctactattgtatatgaattctcagcacagaatttgccggaaaaactcagcgatataaaacctgacgatgacgatgacatatatacttcctcttcttcctcttcttcctcttcttcctcttcgccttgttcttcgccttgcccctctccccctcgtgttcctgatgcggaagaaataagaaggaaagaagagtataataaacgggttcgctggtatcaacaaaaacggtttgcagaactcactaaattacatccggatctggctagtcatatcgtaacagaaatgttacctacaggtattttgttgactcgtgttaaaaacagcccaactgatatattatttgttgatgtacatggtacatacatgaatatgaagtctggcacaatgctgaaaccagaagctattgctcgaggtttcactaagacaataactatccctaagaatttagaactgaattttttagcaccacacgatactatccttacagaaggacctggatcgaaggatggtaatcatgttggtataacagaaagagcattaggcgctaccggtaaatcttgccagatttattccaggctggcagcgcctgatgctatgagacccggtattgtttactcagaatataatgaaaaaacggcgggaacaaacgaaacagggaaagttgtgaattatcttttgagttctacttccgacgatgtggatcagacattgtgccaactttctgttttagaaaaccgtattagttgtcctgataaaatggatatgctgactattgcaccgaaagtaggtatttttgatgaaaaatataaagtaacaaccctggaggaactcttaagagtgatccagattactaaccctcaatataaaaggataatccttggttcatgccgaagaagttatttttcacgtgatgattccatttatgagtattctcttcagacatcagacttaccaattgacaggcagatgcctatacgtggaaataataaatcagcttttattgttgaagattacaatatcctacccaatgatgatttaatgtcaatacgaaattatatcgatagggaaatcaggaaaaatctcgcatggactccagatgcaggtgattttattccccatgtgatgatgaagttaccagattttcaggagacaggcttacaacttaatatatttacgccatcactggagtcaggtgagtataatcactgcgttagttacccagaaaatacagaacagtctatccggcatgaaataaaccttattaattatggcgaccactatgatcttttgactgcagataacaaaataattgatattcctcctggtggaaattgtttttatcatgcaatttataacgcattaacggcagagcagaaaatcaagataacaggtacgccgttcattgatttagctatccagaacttaagacatcgtattgccgatcagattcttcgagatccatctttgtggcatttaatccccggtttacgctcgttcatcccggctaatgattctcaaatggatgaggctcagcagaacttaccaactcattatactggtactatcacccgtaatgttggatatgaacatgatgagggtattaaattatcgataaataaggtacagctaaaaaaacgaccggcacacgatcaaaaagttaaaactttaaccaaacgtcttcctgaagccaaaaaattgacattacatgctgcttatgccggtaaacttatgacagagacagtgcttgctgaagccgaaagagatggcatgctgcctgcccgtgtcgatggaatgataaacgcaaaagatattttaagtcattaccggcagcaatcactgcgtttaatgaaccaggaatcttttggcgtaaccggatatgaaataacaagacagatggaatccagactggagaaactagacagtgagttgtcttatttagatcatgaggggaagagagatgagtacaatttattagccgcttcactttttgatatccatccttatgagttaaaaaagatggcgcgcgaatcttttccactgatggatcgctattgcgaaatgttggatcgggttgtgacgagtggcaatctcacgccggagacgttgcaacaatgtcttgatgcattgctccatcgtcattcagatgaaaaaatgccatcaattgttactacgcttctcatagatggtcatttctcaaccaatcatcgtgatgattccttgcatgaatggaaaccccggttgtggagtgtcatggtgcataccgctcaggcattggatcctgtagagggtataaacaatatcagaaaaatattactatcccgattgtggcacgatacatcagtcggcaaaataggtttttcattcaggcagaaaaaagtcaatgcctatgagaaaatattttcctcttcagttcacaaagattcattttctgcaaatctgccgcctcttgaacttctgccctctcgtgaagagttaagagcaagcaaagctggactggaatgtgtcaggttaaatgataaatatgccagaatagcgttctgtgtcttaacgcccgttgaaaatatgtcccccctgtcaaagacagttcgggaactggcgctcatccctgatgctgaaacccggatgtctaaggtggtagggtacctacttgatgcggaaaatagtcaggataaggaaaaatttaactattatatcagactattgctgcctccactgatgaagccaggagcgttatcaggaatggatgataaatcaatggcgctttatgcgagtattctggataccgtgagtcgaagcgcgttactggaaccgaaaatggcagaaaaaattgttcatacgttggttaatccggatgaactattttctgtgattcgtatcgctttacagcggaattctgctccctggatgcactcaatatggagtgcattgtaccatgccacgaataaatcggaaaatatgacacttgataagataaaagaaattcttttatccaatacctatagtaatgaaatgattgggtcgttaaagtctattcgaggccttatccatccatatggttacaatgcttataaaaccatcttcagacgccctgtttctgaccataagagacaactaccacgacagtttttacccgaacggagccaaatattacgatatagcaattccaccaggcttcgtaatgaaattgaacagcataaaaacgtcgctccggatgtgacaacgtctcaatacatatctttaggggccttgttttcacgtctttttgctgatggggatgtcagaaaacctctggcgagtattgagcataataatatccgaacgcctcaaacgttggctcaaagtttacaagcgaggaaagaaaaggagcaattggcactgagtcagttttatacttctgctacactggtaaaagaaagcgattggctccgtaatgatattatctcaactcaacgtaatttgttacgaacagatcttttgctaaatgatttttggtctgaagagatgcgccagtatgcaccatcattgattggacgtattttgcattgtaatattatcattagtaataatgacgtagtacgtagtgttggtggaaattatcaggataaagtacagctcattgaaactgctgaaggatatattcctcagcatgctaaagatactgattataagcctgcaccattttttactgctttactctcggcattacccgataagttacatagcgaattaacagatgcacttcgcaaaaagacaggaaaaactctggcccatttgaaacctgaagaacagatcgcgaagttgctctctgattatattgaaataaatccacaagtaatagataagctaattgaggaaagatctggtattgataatcatgaattatcatatctggatgtattgatgtccagaattaccgggcaaagcgaatcaaaacatggcgatcttgatttttacgaatttctttatttatctacacgaattttccatgtggacaataatgatatacaagaaaaaatactatctgtcatgttaaggaaggatattatccagaagatgttgaggttagaaaaaaattatggcgtgatgacaacatatcttggactactacaagttgcatccaacaaaaataaaataagtagtgacggcatcatgactattttcaactttcttgctgataagaattcgttttttattaaaagaattatcgatagcaaagatggcgagcagcttttcagttcttatgtttctctgttggattacgccatcgatttcattgcgaaaagtaaaaccaatacttacgaggaattcaaacgtgtggttggggagatgaaatctcaacttcgtcagaaatggctgaatatggatgtgtttaaaaaacttgtcagtaaaaaacagcggcgtgattataaaaaattcatctctctgttgcatcatcgtgaattaacgcctacctccatggagttcgattctgaacagaaaaaaagacgtctcgacttcaggaaaaaagtgctcaggacgtcacaccgcataaataagtctattcgtatggagcctgaaaatagacaaccacacagtacagagataacctctctgggcttattacgatttgcacaaaaatacttccataccagtattattgagcctgagcgcatctacaggattgagcaagaagctatcagcatagttaaatctgcaattattcaacaagttaaaaaagaggtaataacaatcatctctcagcagtaccttgatgcagcgaatgatatattgagtcgttaccccggtaatttcgaagccattgaccaggccgacaaattacgtaacgaagctaagaatccatctaaagagatcgttgacaaaattgccagtgaactggcggaacagttttttagggaaagagagcaggattatattcccgttcttcggcagataatttccagtcatgcgaatttgcttccttttatgcaaacgtgggatgagcaagaagaacggatggtcgttcctcgttatgcgagttatatttcatccagtccagtattcaaccttttaattcaggatgttatcgtcggtgatcatgcttctgaacacaaagagccaatgatgcccaacagcgaactttctgttgaggattgtgcgagagtatccaaattaattgatgcgagtaaggatgtatcgggtataaatgcagatggtcaatatacaacggaggaattgtatattgatcagtatcgaaataaaacaggccagactaatgcctggattagcaaaaataaacgtctccgtcttaatcataaatatccgcatacaagagatattaagatattttccgacgagaatatttttcctgcacaaagtgaacgagcgcaacaatcattcagtaaaacgctaaagaatagtacgagaaacagcctggaaaatagtgaccgaactaaaattacaggagaaaccggaggaattcgtgttccaacaattgtatcgcatgcaaattctctgaacacaatgtctctacctaatggcatacaaaataatgttaatgcttcggtggatactggaaatgaaagagttaaagtaacgaattctcttgtagagaaccctctcactactgaaaagcttaaacctgaccttaactatttacaacctgtagagcatgagcgagagtccagagtggctcaagcagttactaccaatggagcattaagttatcacgctatttcatccacgtatgccattgacaaaaaagatgtaaaaaaattacaagacaaaccttactctccagctctgattaatgataaaaaaatgaaagagaatgttctaccgatgtctaaaccacaatcgtttcaatattttcaatatgataaatcaataactgaagatgagattaagaaaaaatttgaagtggagaggaataaagcccaaacgcctaattttacttttgatggatatgttgagggtataaaccagaaatctatcaacgaaaaagcgttagttagagacgcgatacaaaaattaaatgcggaatatattgaatgggaacgggaagttaaaaataatagtatggtatctaacgatgcagtggagaccaaagcacattatcaatggaatgaacctgctcttggtaaagaagaggtccacatgaataagattttgaatgacacacatcttttgaataaagtacataatactgtaaaattaaaatcggaaagtgaaaataacgaaacccactcccgttgggaaagcaaaataattagcgctaatacgctcacatcgcttcctgaagatatccgaagccgatataaagatggctttaattctgctataaaacatattgaagacagtgctaaagctattgttgaaacatcgcagtttgccactatcataaagcatgaggccgctctggttgatgcggttacattttcagataaaatgcaatctaaggactcaacagatactacggtcataaaagctaatagtgaaattcatgatgcagtcgatgcgaagcgaagtgaaatagaagaagaaagggctgaaaagcatgagaaggccttagacaaggccagggaagaagagaagaaaatagaggaagagaaggaaaaagaacagaaagagaaggatgcttataaggcgttaaaaaatgaggaagatgaggaaaaattgaagcggatgcaaaacatgaaagaaccgacacaggcagaaaaacgtgctgcagcactcaagcgttttgagcttgtaccggattctgtgtaa

SEQ ID NO: 377431 - DNA, 714 bp, Salmonella enterica
atgaatacgtttattaaatttatcgtggcctcctcatgtcttttttttgcagaacaggcattagcaaatgattataaaacaacaattgaatatcgtcatgattatcgtgatggtgttaaaaaacatggtgaccgctttaaagtctacctcgacacagggaaaaatattggcttagagtttgatgctcgttacaacaataaagatgagaatccttatgacgagatgcaattaaatggctctgagctatcagccttctattacactaacttaaataagaataccgtcggcttagcaggcctttctttggactataactctgatggtttagtttatattccttatgttcgtctaaactatacctttgacaatggttttcgtttgcaaggccgttataaatggaaattatgggattatggtatggtcggagccgatggaaatagctatcattccaaaattcaggagtttgatagtttcattggttataagtatgatcgctgggattttctgtatcagttcgatattttttgggaaatggattccaatgcgttacctctttataacaatcgcaaatgggattatcagcataacattaggctcatgtattctcttgataagaactggcgcccttttattgaaattggaaacattaaagagaatcgttataccagtgagcgacaaacacgctatcgtgtaggtatcaaatatacatggtaa

SEQ ID NO: 377432 - DNA, 153 bp, Salmonella enterica
atgcttgtgtggctgagcaggagaggcatgtattgtatgaagaaattttgcaatcataatttaatttctattttttttgttattttgaataagtttattattgattatgctcagtgtaataatattcagttaataatggattgcaaagagtaa

SEQ ID NO: 377433 - DNA, 585 bp, Salmonella enterica
atgagtgcaatcgatactttaagggagtatgccgaagtatggcggctatttggtagtatgccagatgatgcaaccctgagtgctgaggtttcggccctttatcttggtgtaagtgtcaaaacattggctcgttatcgccagactggtaatggccctgattatatccaataccaggcagaagacagcaaagcaaggaaccaacgagtaaattatcttttaggtgatttaagaatatggcgtgatcgtcataaggtaagcagcacaatggaggctgcacaggtccgtggactggcttttacttcgttggttgactttatcgaaccggagcctttctggactattgataataaaatttattcacatgttcttactgtttctgacgaaatattcaaggaactgttaaatacaacccgtgcagaagttatctggatctctgtggaaaaagttttgtctgagaactggcatactgcgagagaacggcagagatggaatgatttgtttattggggttatgacaggattggtagatgcttgtgtggctgagcaggagaggcatgtattgtatgaagaaattttgcaatcataa

SEQ ID NO: 377434 - DNA, 1458 bp, Salmonella enterica
atgaaaatgacacttactcagtcgattataatcaataagttatctatcgacgtgaaaccagatctcgaccagcaagggcgagtagtctacttacccaatcctgaacgaaagccgtatattatcactgacaaccacagggattcacccgtaggtttcggtgtcaaaatcagtgccaccaaaaaaacctatatcattcaacgacgggtggcatcagcagacaagcgaccctcgacgggtggcaaggcaccgaaacaggttatcagatctacgattggtaatgtttcagattttgccaacattgatcaggcacgcgatgctgctcgcaaattcgttgaaactatgaagttgaccagacgaaatccgaatgcagtaaagcgagaagcagaggcttctgagctaacgatcagtgaagtttttgcgcaatacagaagtcatcttatgggcagatcgaaaccggcaaagcccaacacattaaatgtgctgaacaaagccgaaaatcgcctgaaagagtgggaaaatcttagagtaaaagatctgacaggcaacgagatattgcgcaagtttgatgagatcgcttcaagagccagaactgcggcagagcagacttttcgctgggtgaatgtggcggtaagacatgcaattgagatcgaagcgggaaatgctcagacacaacaacgacaaccgacactaagctacaaccccttttcaattctgacgattcagaaaaaattcagaacccgttcacagcttgaagaaagctatcgcgcaaaaggtgtacgaaacccactgtcgccaaaagacaccttggggcgatttttaacggcattgcacaacaagagaagcttcaaccgcctgggatgcgattatcttttgctgactgttctgacaggagccaggaaagaagaaacagcttcattgtgctggcgagaggctctgacagaagaagaagccagaacgaccagctatgttgatcttgaaaataggataattcgattttacgacactaaaaaccgcaacgaccatgaacttccaatttgtgatgctacgaagcgaattcttgaagaccgaagagatttagtcaacgagactgaaaagcgagcagataaacgcaaatgggtttttcctgctcggtcgtcacgaagcaaagttgggcactattcagacagcaaaagcctacgcgagtatatctgccaggaagccggaatagggaagttgggaatgcacgacctgcgaagaacctttggtcgtgttgcagaaggactaacttcatatagtgtggtgaaaaggttgctcaaccatcgcaatactactgatcctactgaacggtatgcaatgcctgataatgatcgaatttatgaggcacttcaaagtattgagctccatatgcttatgactgcaccagagttgtataatacacttctggcttcggcgaaatatcaaccattgccaacaaattag

SEQ ID NO: 377435 - DNA, 1209 bp, Salmonella enterica
atgacgtatcgcagtaaagtggcggtggtttacctgcttggcttctttcttgatctgattaatctgtttatcgccagcgtggcttttcccgcgatgtccgtggatctgcatacgtccatatcggcgctggcatgggtgagtaacggttatattgcaggattaacgctgatcgttccgtttagcgcgtttctttcgcgttatctcggcgcacgacggctgatcatgttttcgctcattctgtttagcgttgccgccgctgccgcaggttttgccgattccttacacagccttgttttctggcgtattgtgcagggggcgggcggtggcttattgatcccggttggtcaggcgttaacctggcaacagtttaaaccgcatgaacgcgctggcgtgtcatcggttgtcatgatggtggcgctactggcgccggcatgttcgcctgcgattggcgggctgctggtggaaacgtgcggctggcgctggatattctttgctacgctgccggtggccgttctcactttattgctcgcttatcgttggctgaacgtcgcttcgacgacaatggcgtcagcaagattgctccatctgccgttgttgacggacaggctgctgcgttttgccatgatcgtctatctgtgtgtgccgggtatgttcattggtatcagcgtggtcgggatgttttatctacagaacgtcgcgcagctatcgcctgcggtggcggggtcgctgatgctcccctggtcgatcgcttcatttgtcgccattatgcttaccggacgttacttcaatcagcttgggccgcgtccgctgattatcgtcggctgtcttcttcaggccgcagggatattgtttttaactaacgttacgcttgcgacatctcaccgtgtactgatgatgatattcgcgttaatgggcgctggcggcagtttgtgcagcagtaccgcgcagagtggcgctttcctgactattgctcgccgggacatgcctgacgccagcgcgctatggaatcttaatcgtcagctcagctttttcattggcgcgacgttgttgacgctgctgttaaacgcactccagcgcgttatgtcgcttgaggttgcttatcgctggacctttattgccgcagccggtatcaccctgctgccccttatttacgctgtctgtctaaacaatagaaaagcgcttctgtgcctgaaaaaggaaagaccatga

SEQ ID NO: 377436 - DNA, 651 bp, Salmonella enterica
gtgtatctctcaagaataactttacatactgctcagcttgttccctcgcagctacttcaccttgtggagcgcggcgagtacgtgatgcaccagtggctatgggagctctttcccggcggcaaggaacggcagtttctctatcgtcgtgaagagctacagggggcgtttcgcttttttgttctgtcacaggaacggccagcggagagcgcgattttcgacgtacagtgtcgcccatttgcccctgagctaagtgttggtcagatactacgttttaccctgcgcgcaaatccaaccatttgtaaagcgggtaagcgccacgatctgttgatggaggcgaagcgtcaggtaaaaacgcagcctgatagtcgggatatctggacttatcagcagcaggcagcgctggagtggttatcgcgccagggtgaacaaaatggattctctctgcgcgaggcaagtgtcgatgcttatcggcaacagcagatacgacgcgaaaaatcccggcagatgattcagtttagcagtgtggactatgcaggtgtgctggtggtgaataaccctgtgctgtttctgcaacggctggtgcagggatacggtaaaagccgggcatttggctgcgggatgatgttgatcaaacccggagacagtgagtga

SEQ ID NO: 377437 - DNA, 537 bp, Salmonella enterica
atgagtatcgtgaaggacgatcataatgccacgctgcgccagtggcatgaagagttacaggaacagcgcggcgcgcgggccagtctgcgacgcagcgtaacggtgaacgacgtttgcttgtcggaaggattccgctccctactgatgcagacccatacgctatggaaaatcgaagggcaggagtggcgctttaccgcgctggcgttgacggcggcagtagcggcccatatcaaatcgatagatgagcggcaaaaattcgccgcacagctaaataacgtcatgtcggagctacgattttcccgactttgcgcggtaaaaacccccgatgaactgctgcgccagctccgacgcgcggtgaagttgttaaatggcacagtcaacctgatttcgctggcggaggatattttccactggtgccaggaaaataatgagttgctgaaccaccatcgccgccaacagcggccaaccgaatttatccgtatccgctgggcgctggaatactaccaggccggcgatgacgataacgaaaaagattaa

SEQ ID NO: 377438 - DNA, 954 bp, Salmonella enterica
atgccagtcactctaaatttcggtaaccatcaaaattatacgcttaatgaaactcggcttgctcatctgctaagtgcagataaagaaaaagcaacccatatggggaactgggataaagtccgggaccactttagatcggaaaaaaaggaccatgcgctggaagtattatacgccattattcacgggcggggtcctggggaacctggagaaatggaagtcaacgtagaggatatgagtaaaatttacgcgtttaaacggttacaacatttagcctgtcccgctcaccaggatctgtttaagattgagatggatgcctctcagacacaacttttatttatggtcggcgacacggtgatcagccaaagcaagattcaggatatcctcaatacctcagataatgtagtagtagaatctatgagtagagaggagagacagctatttttacaaatatgcgaggtgattggcgcgacgattacctggcacccagagttacttcagggatcggtatcaaccctacgaaaagaagtcactggtaatgcacaaatcaaagaggcggtttatgggatgatgcgtcccgcagaagcgcccgaccaccagcttgttgaatggcaggactcacttactgaaaatgaaaagtcgatgctgacctgtattaatgcaggtaactttgagcctacaactcagttttgcaaaataggttatcaggaagtagaaggtgaagtcgcttttagcatgatgcatccatgcatctcctatttgctacatacctatacgctgcttgtagattttaaaggaacaaatgcaggttttttaaatgaacttaatcaggattataacggctatcataaaaataaaatgtttattgatgtaattcttgaaagaatatatctagcgcatgaacattctttgcatattggtaaaaatgagtgcagtcgcaatatattactgacataa

SEQ ID NO: 377439 - DNA, 138 bp, Salmonella enterica
atgaatacaaacggcttcagtttcgaaggatttactagctttaccggtatgctgacggtttggtttatgacctggtatatgactaacgggttacaaaactattactcatcgtatttttcatcatttattatttcatag

SEQ ID NO: 377440 - DNA, 765 bp, Salmonella enterica
atggcgacgacgtataaccggtcagtcacgccccggcaggttattattctcggtgactgctggccggtgacgaccgctgtggcacatctggtccggacatttctgccgggcagcgactgtgaaagcacatataggctgccagcgctgttgcagcaactgcgccggaaaccggaggccatactgatactgtgtttgcgtccccgtgaacatctctttttgttctatgccctgaggcaggtgctgccggagcacccggtgatggtcatcagcgatgagctgcttttcagtgaccgggtggtactgaaggtgtacgggggtatcccggcgctgccggagcaggcgctggaggagatacttatccgggtgcggcggggtgaacagtggtccgggggggcacgtctgcgggtgacgggagcactggaggggtttctgttatcaccgaccccggtgacgggttttctggaggtgccaccgatatttaacagtccgaagcggctgatgaactgtatggaccatctgatgcaccgggagatactggcatgtggagtgagcctggcccagttacgtttgcttcaggaagtttaccgtggacggggaaggttatcagcgctatgtgggaggctgaatacgcaggagaagcaaatctggcaggacaaataccggttactggtgaagctgagaatgcggaaccggttacgggaactgctgtttggtacccggttttgtaaatcactgcagcgaactccgtttattgctccgcagtaa

SEQ ID NO: 377441 - DNA, 1032 bp, Salmonella enterica
atgcttaatattcaaaattattccgcttctcctcgtccgggacttgctgccgaacggccacaggcaaccgcggcgagcgatcacgtagagattaccgctgcgccgtccacagcagaacatcgcggcgcggatattatctcattatctcaggcggccacgaaagcccaacaggcacagcagacgttacgatcaacgttgccgatctccgaagagaataatgacgagcgtactctggctcgccaacaattgaccagtagtctgaatgcgctggcaaaatcaggtgtttcattatcggcagaacaagataaagggctgcggagcgcgttttctgcacctgcgttggcattatttagcactgcgcctatggtgcagccgagaacaaccatttccgatgcagagatttgggatatggtttcccaaaatatatcggcgattggcgacaactatctgggcgtttatgagaacgttgtggcagtttataccgatttttatcaggcattcagtgacatcctttccaaaatgggaggctggttattacctggtaaggatgggaataccgttaagctggatgttacttcactcaaaaatgatttaaacaatttaatcaataaatataatcaaaccaataaaaataccatcttatttccagcgcaatcaggcagtggtgttaagggggcaacggaagctgaagcgaggcagtggctcagtgagttgaatttacccgatagctgcctgaaatcaacgggatcaggttatgtcgttaccgtcgatctgacgccgttacgaaaaatggttcaggatattagtggattaggtaagccgggagatgattccaaacttgaaatggataacgcgaaataccaggcctggcaagcaggttttaaagctcaggaagaaaatttaaaaacaacattacagacgctgacgcaaaaatatagcaattccaattcattgtacgacaacctggtaaaagtgctgagtagtacgataagtagcagcctggaaaccgctaaaagcttcctgcagggataa

SEQ ID NO: 377442 - DNA, 252 bp, Salmonella enterica
atgaaaatcatcacacatgtagtacccggttcagatatggctgaaatatatgatgatattgctgacagttcgcttttctttagtaaaggaaagttacgccatgttgaaaacgatccgaaagagttgctgatatgtgtcccgacacgtagtgagtggttattttactggattaaaggagataaacattgcgcccggcgacgggcgcataagaatatcaaacatgacatttctctggtaaaaccgaaaaattaa

SEQ ID NO: 377443 - DNA, 1611 bp, Salmonella enterica
ttgaataatttaacattgtcttcattttcaaaatctggcgtaccgagtgatgcccgactatatattgctaaggaaaatactaataaggcatatgttgcgcctgaaaaattttcgtcaaaagtattaacctggcttggaaaaatgccgttatttaaaaatactgaagtggtgcaaaaacacacggaaaataccagaatacaggatcaaaaaactttacaggtatttatccaggcattaacggaaaaatatggggaaacagcagtaaatgacgcactattaatgtccagaataaatatgaacaaaccccttacccaacgtttagcagagcagatcacggagtgtgtaaaagctgctgacgaagggtttataaatcttattaagaacaaggataatgttggtatcatgaattccgctttagtaataaaaggcggcgagacaaaagtgacagagcaaaatggcgatgttggtgcagagatgaaacagcatttactcgatattgcgctaaacggacttaagagtgcaatacctcaactggaacaaatggacggaaataagctgcgagaaaacttccaggagatggcttcgggtagcggtacgctacgttcattaatgacgaatttacggaatttaaataaaattccagaggctaaacaacttaatgattatgctgtaacgttaacaaatattcaggtaggtgtagcccggttctcacaatggggaaccagtggaggagaggtcgagaagtggattggtaaagcctccagtcaagaattaacgcaggctgcaaaaaagattcaggctattactaacgaactgaaaaatgttacaactgaacttgagaacataaaagctggtgcgccaatgccacagatgttgagcggacctacactgggtctggcacggttcgcagccagcagcatcccgattaatcagcaaactcaggtgaaattgaacgacggaacgcctgtgccagtgaatacgctaacttttgccggtaagccagtggcattagccagttcgtatccaaaatctacgccagccgcgctggaagcgcacatgaaaacgcttcttgaaaaagagtgctcatgcctggtggtgttaacgccggaagagcagatacaggcaagtcaattacccgcctatttcagggggattcatacctttggcgaggtacataccagcagccaaaaagtgaactcagggaatcaggaaggcacgatagaccgatacaatatgcaactgtcctggggagaaaagcagtatacgctcccggtactacatgtgaaaaattggtcagatcaccagccgttaccgtccgctgctcagttagaatatctggcagatagcgtgaaaaatattgccaaccaaaatggcgcgccggggcgtagtacatcggataatcatttaccgatgattcattgtctgggcggagtgggaagaaccggaacgatggctgcggcccttgtgcttaaggataatcctcatagcaatctggagcaggtacgttcagattttcgggattcacggaataatagaatgctggaagatgcatcgcagtttgtacagctaaaagcaatgcaagcccaattgcttacgaacacggcaatctga

SEQ ID NO: 377444 - DNA, 483 bp, Salmonella enterica
atgcattatttttttatcatcgtaatctggttgcttagtatgagtacggcacgggctgattgctggcttcaggctgaaaaaatgttcaatattgaatcagaactactttatgctatcgctcaacaggaatcagcgatgaaaccaggcgccattggttataaccgagatggttctaccgatattggcctgatgcaaattaatagcttccatatgaaaagattgaaaaaaatggggatcagtgaaaaacagttattacatgatccctgcatttctgtcattgttggcgcatccattttatcagatatgatgaaaatctacggttatagctgggaggccgttggtgcttataatgccgggacgtcgccgaaaagagctgatataaggaaaagttatgctaaaaaaatttgggagaattacaaaaaattaaaagagatgccagcagaagagaagaacaaaagactttctatcgcgttaaacaaataa

SEQ ID NO: 377445 - DNA, 1662 bp, Salmonella enterica
atgccacattttaatcctgttcctgtatctaataaaaaattcgtctttgatgatttcatactcaacatggatggctccctgctacgagcagaaaagaaagtgaatattccgccaaaagaatatgccgttctggtcatcctgctcgaagccgccggcgagattgttagtaaaaacaccttactggaccaggtatggggcgacgccgaggttaacgaagaatctcttacccgctgtatttatgctttacgacgtatcctgtcggaagataaagaacatcgttacatcgaaacgttatatgggcaaggctatcgttttaatcgtccggtcgtggtagtgtctccgccagcgccgcaacccaccactcatacgttggcgattcttccttttcagatgcaggatcaaattcaatctgagagcctgcattactctatcgtgaagggactatctcagtatgcgccctttggcctgagcgtgctgccggtgaccattactaagaattgtcgcagtgttaaggacattctggagctcatggatcaactgcgccccgattattacatctccggacagatgatccccgatggcaacgataatgttgtgcagatcgagatcgttcgggttaaaggctataacctattgcatcaggaaagcattaagttggtggaaaaccagcccacctctctcttgcaaaacaaaattgcgaatcttttgctcagatgtatcccggggcttcgctgggacacaaagcaggttagcgagctaaattcgattgacagtaccatggtctatttacgcggtaagcatgaattaaaccaatataccccctatagcttacagcaagcgcttaagttgttaactcaatgcgtcaatatgtcgccaaatagcattgcgccttattgtgcgctggcagaatgctatctcagcatggcgcaaatgggaatttttgacaaacaaaacgctatgatcaaagccaaagaacatgccattaaggcgacagagctggaccataataatccgcaagctttaggattactggggttaattaatacgattcattcagaatacatcgttgggagtttactattcaaacaagctaatttaatttcgcccgtctctgcggatattaaatattattatggctggaacctcttcatggctggtcagttggaggaggccttacaaacgattaacgagtgtttaaaattggacccaacgcgcgcagcagcagggatcactaaactatggattacctactatcatactggccttgatgatgctatacgtttaggagatgaattacgttcgcaacatttgcaggataatccaatattattaagtatgcaggttatgtttctttcgcttaaaggtaaacatgaactggcacgaaaattaactaaagaaatatccacacatgaaataacagggcttattgctgttaatcttctttatgctgaatactgtcagaatagtgagcgtgccttaccggcgataagagaatttctggaaactgaacagagtattgataataatccagggctattaccgttagtactgattgcccatggagaagttattgccgagaaaatgtggagtaaatttaaaaacgaagacaacatttggttcaaaagatggaaacaggatccccgcttggttaaattacggtaa

SEQ ID NO: 377446 - DNA, 174 bp, Salmonella enterica
atgtcatcgacacaagtgacgatgacggatgacaaccgttcaggggatgaaagaaatgccgaatacctcattcggcatcaaaaagttacgcctccggcgcttccagtcgcgcaaatccgccgtttccctgccacccttccaggcgctgatagatggtgtttaccgcgtccttaa

SEQ ID NO: 377447 - DNA, 180 bp, Salmonella enterica
atgttcgctcccggtgatatagtacagccccgaatgggagggccgaaactgaaagtcattgaagtgaatgaggatcaaattgttgccgtacaggcccgcaatgagcagggcgaaaaattgacgctcaaagcggtggacgtcaccctttattctgaagaagatgattttggcctgtgctga

SEQ ID NO: 377448 - DNA, 978 bp, Salmonella enterica
atgaatgcactgactgccgtaaaagcgaacacagatgatttagcccaacgccatactggtttcacccttgccccctcggcgcagtcgccgcgcctgctggcgttaacgtttacggcggataccacgacgcaatttctccatcaagttgcacagtggccgttgcaggcgctggaatacaaatccttcttacgttttaaaatcggcaagatcctcgacgatctgtgcggcaatcagctacaaccgctgttgatcaaaacgctacttaaccgtacggaaggcgcgctgttgatcagtgccgaagggatcgatgatgtcgcacaggcagaagagatggtcaaactggcgacggcggtggcgcatcttattggtcgctctaactacgatgcgatgagcggccagtactacgcgcgtttcgtagtaaaaaatgttgataattcagacagttatctgcgccagccccaccgcgtaatggaactgcacaatgacggtacctatgttgaggaagtgaccgactacgtgctgatgatgaaaatcgacgaacaaaatatggaaggcggtaactcgctgctgctgcaccttgatgactgggaacatcttgaatcgttttttacccatccgctggcgcgtcgcaccatgcgctgggcggcaccgccaagcaagaatgttagccatgacgcctggcatccggtgtttgatgtcgaccagcaaggccgcccggtcatgcgttatatcgaccagtttgtccagccaaaagactttgaagaaggcgtctggctcagcgagctttcagacgcgctggaaaccagtcaaaacatcctctcagtgccggtaccggtcggcaaattcctgctgattaacaatctgttctggctgcatggacgcgatcgttttacgccgcatcctgacttgcgccgagagctgatgcgccagcgcggttacttcgcctacgccgccagccattatcaaactcaccaataa

SEQ ID NO: 377449 - DNA, 174 bp, Salmonella enterica
atgcctccgtggaccacgtttcagtgggtacaggagaacctgatacggggacgagtcagaccactggacaaacgcagccctacccgcgccatccagggtattgacggcgacctgaaactcaaccgggccctgcggctttttttgtgtttgttgtcgtctggtgatatttactaa

SEQ ID NO: 377450 - DNA, 333 bp, Salmonella enterica
gtgaatattaatcttattaactgtgctcttttgggtgcaggaaaagaaggtgccgataccaccaaagcggatgttactttcgattcttcagcggtggataccactgatacaaatctgctggcaactaccttttctacagaggtaactgatgttggtattcgtttgctgaccagtgaagacaattcattgaagctgggaatcagcagtaaggtgccattacagatttcatctgccgagcaaacgctaacatttcagggggatatggaaaaaattaagagtgaaatcagccagacagaagctgcaaacacaacttacgtagtggagtataagtaa

SEQ ID NO: 377451 - DNA, 555 bp, Salmonella enterica
atgattaaaaagttattatttgtgacaatcgcgtgctcggcattctcaggtgtggcaatggcggatgatgttgctaatggtggcacaattaatttcaccggtacggtggttgatgcgccgtgtgttatcgcagcggacagcgtcgatatgtccgtggatttaggacaaacaaccattgattatctgaataaatatagcagctcaaaacctgttaatgtgaacatcaatctgactaactgtgcgctttcaggtgcaggaacagatgatgctgacattactaaagcggacgttactttcaattcttcagccgttgatacctccgacaaagatctgctggcaaataccgactctgccggggctcaggggatcggggtgcgcttgttgaatggtgatggcgctaatgtggtattgggtacagctgatgagataccgctgcaggtttcatcctcagaacagacactgacatttcaggctgatatggaaaacattaacagcgtggccatcactcccggcgccgtggctgcaaatgcaacttataccatcgcttataaatga

SEQ ID NO: 377452 - DNA, 579 bp, Salmonella enterica
atgaggtgtaaagctaaagtagggctggtactgacgggggtattaatgattgctccggcatttgctggcgaacctgtaaatggcggctcagtcaactttaccggaacagtggtcaatgccccatgtattcttgccggggatagcgtggatatgactgttcctctggggcagaccacagttaactatctgaagcagtataccaatgcaaagcttgtcaatatcaatattcatctgactaactgtgcgctttctggtgctggggcagagggtgcagatatcactaaagcacatgttaggtttgacagttcggctgtcgagactgacgactccatgatactggcgaatacagtatccagcggtgctcagggtgttggtgtagaagttctgacgagtgatggccaggttattcactttgggggaaatggtacaccagacgtggccttacaagtgacttctagtgagcaaactctgacctttcagagccgaatggtcaatatagttgcaattgacggaggggaaactgatatcactccgggacaagttgcggctaatgcaacatatgttatttcctatcagtaa

SEQ ID NO: 377453 - DNA, 678 bp, Salmonella enterica
atgcagggatggatggcaatggtggctggatgctgcttactggtttcaattcgggcaggtgcgaccgattttaacctcagcgttattgataaagatgcccgttcccatgtggatttgagctggttcagaaacccggcctcggtgccacccgggcgttatctggtttccgtggcagtaaatgataccctgctgtctgagcagcagatgttgtcctggcatgaaaccgatacgggttcacaggtctgtatccctccggcaatggccgatcgctttgagttacagccttcggttcgtcagtcgttgccggataacaatgggtgtacagatttctcatccagaccggatatccagtttaattttgaccagccaaaccagcagttacacattatcgtgccgcaggcctggctgatgtaccattcgaaagggtggacgcccccttccgaatggtctgatggtattccggggttccttctcgattacaacctgtttgcgggcacttaccagtcacagggcgaaaaccgatcggataacgccaatacctatggtactgccgggcttaatgccggggcgtggcgtctgcgtagcgattttcagtattcctcctcccggcagggagatgacagcacaaagggcggatcttttccagaacctatctgttcaggccgttgccggatatag

SEQ ID NO: 377454 - DNA, 729 bp, Salmonella enterica
atgaaaacttatttgtctgttgtgctcgctgtaatgatgatctgtatgaccgcacacgcggctgtcaatattgaccggacgcggctggtatttaatgaaagggataaagccgtcagtctgaaaattgaaaacgagagtaaaaaattgccttatctggcttatgcgtgggtcacggacagtcaggggcagaaaaacgatgatttttttatcgccctgccacctatccagcgcctggagcctggtgcaatgtctcaggtgcgcatcatgaaacagaataccgccagactgccgcaggacagggagtcactgttttacttcgacctgcgtgagataccgccacagcccgaccttcagggaaaaaacagcgccgtaatgcagctcgccatgcagagtcgcatcaaactgttttatcgcccggccgctctacagacagaaaatatccaggaccaggcaatcaaactgaaggtcactcagaatggtaattggctgactatcaacaatcccaccccctaccacatcaccattgcctggatggggcaggaaggacaaacgctgaacggatttaaaggtgatatggtggccccgttcgattccatcagcgtgaaggcgactggcagcacgcgttacctgctgggttacctggatgactacggcgcaatgagaacgctggtggtttcctgcccttcttcgacctgcagcctgagtgaatataaggtgaagaaaccatga

SEQ ID NO: 377455 - DNA, 999 bp, Salmonella enterica
atgaaactcgtcctgtcatttattctgctgatgtttaccgtgtgctggtcacccggcacgctggcaatagattgctactatggaggcaaaggcggcccggtggataagagtgtcacaatcccttcatttgctattccgtccacgataggaaccggcgaaaaaatctgggtctcacccataataaaagtgcctgtctattgtgataacaatacccagcctgacggacaggatgagaaaattgcgctgtgggtttcaccgcagtcgggagccagcgatccttatcttcaacccggcatcacctttgaaggcgccgatcatgatgccgaaggtgggccggatgccgtggataccggccaatgcgtgggtagcgcctcatcaggaagtcagtgtacaggcggaacgccaacttcccgtcggtttgttgcccggataaggttctatgtcagactgaaacagcggccacctcatgattatgttagtacattatcagcaattccgttaattgcatttgccggttatgatgatgtcagtagtaacggccacaatttgaagtataccctgaccgggctgaataatattcgggtactggattgtggagtacatctgagcgtatccccggaaaatgaagtggtgaatttcggtactttcagtaccagagatattcagcggcacaatattaccaggacgtttaccgtcaaagcgacccgggctgaggatgctgaatgctctgacggttttaaactgaatgcggctttttttaccgatgagcacctgtctgcagaccgactgctgttgcgccccgggaatggactgcagttgcaactgttatccgggactgagcccgtgggttttgaacgctttaatagttttgccgactttacaacaggtgaactcagcgtggagaaagaatatcacgcggaactgagcccggtgccgggccaggatattaagccaggctccttcactatcgttgttttattacgaattaattatcattaa

SEQ ID NO: 377456 - DNA, 393 bp, Salmonella enterica
atggctgacataaaagatgaaatagcgctgatttatcaggctttacttccgctctcattacagatagagacatcggatgaccctatattttcaacctacttttttgatgcaagcgatgacgttttttcagttttaaagggaaccggttatcttcattggaaacatgttgggaaaatgactggtgaaatacatgggccaatagtgattaattctcatacattattgcaaccatttttacattgcgaatttcttgtatcgaatggtactgatgtaatttatttatttgatgctttaaattggcgctattttttactaaaaaacattttagctgacaaaactgccatttatcatctacacagacgttatagtattaacgcaatagttgaacgataa

SEQ ID NO: 377457 - DNA, 609 bp, Salmonella enterica
atgaatcctgtcgaaaacatcaccctattaattaataacctttctaaaaaagaaaatatcaatcactcacaaaaacaagaaataattccattagtttcagagggacatgcacgctgcattatcattcactctggaacatttggagtgtaccgacgtgaagagcgcttgcttctcagggtaatagaaggaccagaaatattaggggttgcatcaatctttcaacatattggaatggagcaatatgaatctctctatttatatacctacacgtctatagattacgaattcatagatccgctgcaattttccagaattgtgagtgagcgcaatttatgggagcccgccatgttacatttcggacaccttttatctgaggcagtgaattcacttaagaattacacaggaagagatacgaaagcgctcgtcacccgtgccttactggcattatcttctcattctgaggaatttcgaagaaaaatcatcgccagtgattatattaaagaaagaacgtcactgtcccgtagcgtaataatgaagatactaaaacaacttcgggatgaaggaaagatagagatagaaaaaggtatcctgataaaaactacactataa

SEQ ID NO: 377458 - DNA, 405 bp, Salmonella enterica
atgcgattaaaacttctggtaatggcattttctgctcccgttgcactcaatgcgctggccaccactgaacctttcgcttttacccctgaaaaggtcagcacagaactgagtctgggaacactgagcggtaaaaccaaagagcgagtttacgctcctgaagaggaaggacggaaagtcagtcaactggactggaaatacagcaacgccgctattattaaaggcaccattaactgggacctgctcccccgtttgtctgttggtgcatcaggctggacaaccctcggtcagaaagggggaaatatggttgaccgtgactggcaggattcagataaaccggacatctggacagatgagagcaggcatcctgatacccgccttaattttgtgtcagcgccagtgatataa

SEQ ID NO: 377459 - DNA, 345 bp, Salmonella enterica
atgcgttcttttccggcatcatctcgccgtgctggccgtctggccggtgctgcggggatgctgtttctttccacctttgccatatccgttcaggcggctgaacaggatgaactggccactgccatgcgccagcttgaccaggtgcaggcggcgctggagcgggcccgggtggccgctgtgcagtccggctcgtctgagtcatcccgttacttctttgattatccccgggcgcgtgccgatctggagaccattcgtgatggcattgactgctatctcacgccttcccgggcccagccccgcacaacgtcagccgtgaacgggcactaccggcgggagcgtccctga

SEQ ID NO: 377460 - DNA, 243 bp, Salmonella enterica
atgggcatgtctgccatgcagtcctccgcctttaaagcagcatccggggaaatggatatcagtaccctgcatctgctgtcactcgggctgctttttgccgtgctgtttctctgggcggcctgggcgctgctggatgtctgggcgggctggagtaatgagaaggtccgcagcgcaatgctggggcgcttttttatccggctgactctcctgctggttctcagtatctggatgtttgccagctga

SEQ ID NO: 377461 - DNA, 399 bp, Salmonella enterica
atgaagtggtgttttcgttttctgaaacgtgttgtttctctgccgcgcacaatgctgttgcgtttgtggcaggccgtgttttctgtgtgcctgctgctccggatgagtatgcagccggcgctggctgatctgccccagatggagccgccgtcatcgggtggtggtggtgggctgttcgggcagattaaaggctattcccaggacggcgtggtgctgggtggtctgattatttctgccattgctttcattgttgtggcgaatgctgcgatttccacgttttcggaaatccaggatggaaaaaaatcctggacgcagtttggggccattgtggtggtgggggtgatcctgctggttgcggtgatctggctgctgaccaaatcggcttccatcattctgtaa

SEQ ID NO: 377462 - DNA, 366 bp, Salmonella enterica
atgcagaccattcattttttacccgatcgccttaacgtggagccggccgtgttccggggcttcaccacgccggaacttggactggccgcactgaccggtgccggtctcggcctgctctggccgttaccgctgcttccgctgaccggctgggtgattatcccgaccgggatgatggtcacgccgctgctgctgatctggttcggtggaagctggatcacccggatgaagcgtggcaagccggataactggctctggcagcggctggaggagaaaaagtgtcgtgccggtatgggccgttcatcgctgattatggcggcgcagggctggtccctgcgccgtacccggccggtaaggagagtatcatga

SEQ ID NO: 377463 - DNA, 663 bp, Salmonella enterica
atgagtcgttttcgtcacgcccttcaggacagggaccagcatatccgcagcctgcgcattatcagtaccgtgctggcaggatttctgttactggcctgtattggctggatgacagcccccagtcgcctgaccattcataacccgcctgatttgcgttccggcagtacccgtccgtggtgggaagtgcccccgtcgacggtctactctttcgccttttatatcttccagcagttaaatgcctggccgaagaacggtgaggtggattacccggctaaaattcatgccctgtcggcctatctgacgccgtcatgccgtgaactgatggagaacgatgcccgccgccgtaaggatgcaggggaactgcttgaccgtgtgcgcgtggtgtatgaaatccctgagcacgggtacggagggcgctacaacaaaaatccggtcaccgtacagggccgggataactggctggtacgtctggacctggtggcggatgagtattttcatgccgagccggtcaaacgtgcgctggtgcgttatcccctgaaagtggtgcgttgggagggggacccggagcataaccccttcgggctggcgcttgactgctacagcagcacaccacaacggctggaagccgcgccggtggcttcaggcccgggaggtgcgcagtga

SEQ ID NO: 377464 - DNA, 948 bp, Salmonella enterica
atggcagtcaccgtccgtcatttcctccggaatagcctgatggcgcttccgttactgatacccccgtttgtgctgcatgctgacgaactgatgaagtgggagcgtattccgttatccgtacctctgaaggtggggcaggagcgggtgatttttgcggacaaaaatgtgcgggtgggattcccgccggcactgaacggtaagctgcgggtgcagagtaccggtggtgccgtgtacctgaaggcggacagtgcctttccacagacacggctgcagttgcaggatgtggagaccggggaaatgattctgctcgatgtcaccgccggtgaacagggaccttctgagccggtacgtattgtgtatgacggtgaggtcagcacggtcagtcaggcgactgacctgatgaaaccggcgtcctcatccggtaaaacctccgccggtcagtcgcgggcaccgggacaggatgacggtacgcaggcccgtcgtcagccggttcgttacagcgcgcccctgccggtgttactgacccgttacgctgcccagtccctgtatgccccgctcaggactctggaggcgatgcctggtattcacccggtcagtcatcacctgcccggacgcatcaccaccctgtatccgtcagagcccctgaccgtcacgccactggcggcatggggcgctggcggacgcactgtggtggcgctgaagctcatcaacacggtcagccgtaaggtggtgctggaccccagggcactgcagggaaactttgtgaccgccacgttccagcatcgctggctgggacctgccggtacaccggaggacaccacaacactgtatctggtgacagagggcagaccggacagggcgtttatcgcagagccagtccgccgtaaagtcaccacagcccgtaagacagggggcagcgcccgcggggaggtgaatcgtgcagattaa

SEQ ID NO: 377465 - DNA, 1491 bp, Salmonella enterica
gtgcagattaaatccaacacgctggtcaaatttgtggtgcccgttgtggttgtgggcggggtattcatcgggcttaaaagctgtggtgatcccgcgtcgtcatcagatccgtcagcacagcagacacaggtcctggggactctgtctcaggaggaactgaaggcgctgggtgttgagggtgacacgccggaagataccctgcgcacgcttatcgggcgtctcaatcaggtacgtgaacgtcagcagacgctggacgaacagaacagcagactgctgaaggagaatgaacaactgcgcaaacgcggaacggatgtgtccggtcagctgaacgatgccgtggcaggactgcagaaaagttatgaggagaagcagcgccagttacagaacgagcagaacgccctgatggcaaaggtgcagtccctgacggagcagctggcgcagcagggtggcagcagtaaggcaaatactgacagcgatattcccctcgggctggggcttgacggactgagtagttctccgggaagcgcggtgtcacagggggccgatggcctgatgtgggtgacgccggctgaccagtcacagcctgacccacgggatgtggcagggggcaaaagtggtccccgtttccccacctcctttctggatgataacccgctgacccgtcagaaggcggcgtatgaacagcaggtgaagggatacagtaacgagaaacaacaggccaccacacaggccgtctacaccctgccggagaatgccaccctggtcgggagccgggcaatgacggccctgctggggcgggtgccggtcaacggcacggtgacagacccttatccgttcaaggtgcttatcggtaaggacaacctgaccgccaacggcattgaactgccggatgtggaaggggccgtggtgtccggtaccgccagtggtgactggacgctttcctgtgtgcggggccaggtgaacagtatcacctttgtgtttgctgacgggcgggttcgcacgctgccggcaccggatgtgaacggcaccaccaacagcaatcagcagacgaagaacgggaataacaccggcggcattggctggatttcggatgaggatggcattccgtgtatcagtggcacccgtaagtccaatgctgccacatacctgcccaccattttcggtctgtctgccgcgggggcggccggtgaggccctgagccaggggcagtacaccacgcagaataacgtcaacggcctttcttctgcgctgaccggcagtgccggggaggcggcactgggtaaggcgatttccggcggaatgaatgagacagcagagtgggtgaagcagcgttacgggcagacgtttgatgccatttatgtgccaccgggaaaaaggctggccgttcacatcacccgccagctggcgattgattacgaagacctgggccgtaaggtgcgttatgacttcaccctgccgggagaggcggacacacagggtggtctggactga

SEQ ID NO: 377466 - DNA, 444 bp, Salmonella enterica
atgaaaccagattgttcacgcctgcgtgtttcaggcagaacgctgttaccgttactggtactgacaggggctgtgctggccagcggttgttccacgtcaaaagaggaactgctgcccgccggggagcagacgatgctggaaatctggcaggggcaggcgggcggcggaagcgcccgttctgctgcgacagcccgtgacacactgcggcgtccgctgacagaaacggaacagcaggacgctgcgcagacggaccgcagttacagccggacacaggagagtgaaatcagccagcagtttccacgactgcccaacccggacatggtgatgtatgtctttccgcaccttgcagaggggaactcaccggtaccgggctacagcacggtgttttcattttacagccagacgcagtatgcgatgcccggtgaacgcacggcagcgttctga

SEQ ID NO: 377467 - DNA, 2829 bp, Salmonella enterica
atggtttttcctttgtttaaaaagaaagtaaagacggaggtgcctgcacaggcagtggcatcagcagcgtgtgcgcatgaaaccggtgccggtgacgccggtattccccgtaacctgacccgccccgggcgaatgacccgccaggaggaggcgaaaatttaccatgcgggcccgtccattattgattttctgccctgggtggaatacctggatgaagagcagtgcctgctgctggatgacggggtgtcggtcggggctgtgtatgaggtgacaccggcagccacggaagggcgcacggcagagcgtcttgagcaaatccgcgacacggtggaggatgccctgcaggacagctttgatgaatacgacactcacccctgggtggtgcagttcttctgtcaggatgaaaatgatgtggatgcatatcttgaccatctgagggggtatgtgaagccccatgcgcagcgcaccgcttttacagaggcctggctgggcgagatggaacggcatctgcggggaattgcccgtccggaagggcttttcacggacacactggtgaccgggcagccctggcgtggtcagcagcgacggacccggatggtggtgtaccgccgtatcgggaaaaacagccatgacccgatgccgccggtggcgatgctgaaccaggtttgtgaacgcgtggtgggggcgctgggcggggcgggggtgcgctgtacccgtatgaacggtctgcaggtacatggctggctgctcaggctgttcaatccccggccggcgtgggtggacagggacactctgtatcgtctggccactcgcgcggcaccgcaggagaccccggagggcatgatgcctgtgatgaccgactttgcggaaagtctctggttcacgccgccggtgtcggatccggaaaacggcgtgtggtggctggacaggcttccgcatgccgccgtggtggtggagaaattgcgtacacccccggaggcagggacgctgaccggtgagaaggcccggggcgaaaagacggtgaatgccctgatggatacgttccctgaaggcaccatgctgtgcatgaccattgtggtacagccgcaggacacactcgaggagcgtttcacccggctgtcaaaaaatgcagtcggggagaacacagagtccatccgtgcccgtcaggatgtggccaccgtgaaggaatatctggggaaccgccataaactttaccgggcggggatcagttttctgttacgggcagaggatatggacagcctgaagcgtaagcgggtggccctgactacagcactactgggcgccggtctgcagccggtacgtccggagtttgatgtggggccactgaacagctggctgcgtgcgctgcccatgtgttttgatccggatacggacaggaagcagtggtacacgcgtctgatgtgggtgcagcatctggctgggctcctgccggtgaccgggcgggagacgggcaccggtcatcccggattcagtttctttaaccggggtggggatgtgctgacctttgatccgctgaataaactggatcgcacccagaatgcgcacctgctgctgtttggtccgaccggcgccgggaaatccgccacactgtgctcctcgctgtcgcagatcatggccgtacatcgcccccgtctttttattgctgaggctggtaactcgttcggactgctggccgattattttgagagcctcgggctgagcgtcaacaaaatcagcgtgaaaccgggcaccggtgtcagcctgccaccgtttgcggatgcacatcacctggtggcacagggacagaccctgcaggatgtggatgaacagacactgccggatattgatgatgacacgcaggacgagagcgaggagcagcgcgatatcctgggagaaatggagatctctgcccgcatgatgatcaccgggggggatccgaaggaagaggcggcactcaaacgggcggacagggcggtgatccgtgaagccctgctgatggccacgcacaccacataccgggaggaacgccagatgctgccggcggatttgcagtcggcactgtgggaaatctcccgggacagtcagcgaaatgaactccggcggacgaaagcggcagagatggcggaagcgctggggatgttcactcagccgggcagttttgaggcggagctgtttaaccgggagggggcgctgtggccggaggcggatgtgacgctgattgacctggggcatctggcccgtgaggggtatgaagcccagatggcgctgaccatggtgtcgatgaccaacatgattaacaacatcgcggagcgtgaccagtatctggggcgggatattctgtttgcggtggatgaggcacacattgtgacggtgaatccgttgctgtccccgtacatgaccaaggtggtgaaaatgtggcgcaagctgggcgcctggctgtggctggccacgcagaacctgaaggactacccggatgctgccgagaagatgctgaatatggctgagtggtgggtgtgtctgaccatgccgccggaggaggtgaacaacattgcccgctttaaggcgctgacagaggagcagaaggcggtgctgctgtcagccggcaaactgtcggggtgttacacggaaggggtggtactggcgaagaaggtggaggcactgttccgcgtggtgcccccgagtatttacctcgcgctggggatgacggagaaggaggagaaggcggagcgccgggcgttaatgaaagcgcatcagtgcagcgaactggaagccgcatttcatgtggcccggaagctggacagactgcgtgggctgactgacggggagtaa

SEQ ID NO: 377468 - DNA, 381 bp, Salmonella enterica
atgctgtgtctgaaatatccggagccggaagaggtttcacaggggcatcctgccggaagtgtgtttgtgctgccgccacagggacagcccggtgccagtagtgccacccgggataatcttgagcgtctgcgcgggcatctgcagaagcagctggggccggtgacgcgtatctgttgccagcctcagcgtgtgggggtgaacagcagcgtggcggtggcactggaagggcggtcgggtcagcaggtgaatctcctgctgacggtgagtggccatgagggctggccgtcggaggaggaatatgcgcatccccgctggtatatcccggtgaccgatgctgctgatttgtgttatctgctgctgtggctggcagagctaaagtga

SEQ ID NO: 377469 - DNA, 204 bp, Salmonella enterica
atggcggctcgttataaaatcacggcaacgataatgaagcctggcaatccgccggtactctggacccgttactccggaaataaaatgacccgggcagagtgtgagaatatgttttccattccaaaagagcccggtcgctcttttggcgataaggtcaaagtgcaggattttcggtgtgtggcggttgagcacgaaaaagtctga

SEQ ID NO: 377470 - DNA, 2046 bp, Salmonella enterica
atgaaacaaaaacatttatcggattttctcagtaagcttgagttacttcaggacgatacggcattacgctgggtcgctgaacaaaataacattactatgacgaagtttgcccgaagtggacgttttcaggatatgcagcagaccattctgagatcattaaatgatcaggaaaatattccttggggtgagcattatcatgatatggtttataacttttggcaggatgataatcatcctcgtggtatttggcgacgaactcatcaaacatcatatatgacagcagaccctcaatgggaaattgtgctggatattgattacattaatgaagaggaaggtgcaaactggagtttctgcggtgcagaactgctctatcctgattttgttcgtgctttaatttttttatcgagaggaggggatgcctgcgaaattcgtgaattcgatctgatcaataaaacttttatcagagatggtttttttctgccagaaagtaaaagttcagttgcctggtttgatgaaaataccctgttgctggcacttgatgatggcgaggatactgtcacgacatcaggttatccgcgttgtgtcagtcgctggcagcgaggcactttaccacaagaggctaccttgatttatgccggggaaacaacagatatgatggtttccgcctggcatgactttactcagggatttgagaaaacgttggtgcaatgcgagcgggattttttccacaggcagacatatctactcactgcgcaggggaagttgctctccatagatattccggatgatgcatcctgtggtttttttaatgcctggttgcttgtcttgcttaccacatcttggcgaatagcggataaaacctatccggcaggggctttgctgacaatggattttacatcttttcagcagggtgaacgtaatttcactatactgttcacgccggatgaacatactgtgctacagaattattgttcgacccgtgattatttaatcctcaatttgaaccgggacatggtcgggagagttgaaatattaaaagaagagaatgggatgtggtgcaatgttgaaacgttaatattaccagattttgtgacggtttcggcctcaggtgttgatacaaagagtaaccgctatcaggtggtgagcgagggttttttgcagccttgtagcataagttatggcgatctggataacaaaacccttcatcagttgaagcatgaacctgcatgttttgataaggctgattttgaggtcactcagcattttgtccagtcattggacggtacatatatcccgtattttcagatagcgaccaaaggtctggagctcaccggtaatcaccctactctgctgtatggctatggaggtttcggggtctctttaattcccgaatacatgggggctaaaggtgcaacatggttgcaaaaaggtggtgtctatgtcgtggcaaatattcgtggtggcggcgaatatggccctgaatggcatcaggcagcgttgcaacaacaccggcaccgcgcttatgaagattttgctgctgtggcaagggatctggtaacccgcggtgtgacctgtgcagcccgacttgcggcacaaggaggaagcaatggcggtctgctgattggtaatatgctgacagactatccagccctgtttggcgcactgttatgcgaagtacctcttctggatatggctaactatcatcgctggctggccggtgcttcatggattgccgaatacggagacccggacatcgcagaagaatggcaatggctgcaaacatattcaccattcgataaagtctcttcagatgtaatctatccgccggtactgtttaccactggtacgcatgacgatcgtgtcagtccggcacatgcacgtaaaatggtggcccggatgaaacagcagggccataacaatgtctggctgtatgaagaaaccaatgcaggtcacggtggtgctcaggataatagtcagttggcattttatcatgccatgacagaagagtttctgtggcaaatgctgacagaatggcaacaaggataa

SEQ ID NO: 377471 - DNA, 219 bp, Salmonella enterica
atggcgagcggatataaaatcacagcaatgataattaaaccaggggaggtgccgattacccgaacacgttttaccagaggaaaaatgacgaaatctcaatgcgaaaagatgttttctcttcctgatataccgggtagagccgccaggaaacgagatattgttcttgtggaggatttctgttgcgagcctgtggattattttaagcagaaagctgaatga

SEQ ID NO: 377472 - DNA, 210 bp, Salmonella enterica
atgtataaaatatttaacaccatactggtgctgataatactgattgcgggttatatcgcgaccagcacatacattgtttatctgaacggggaatgcccgaatgaatgggaatgcccacctcccgcttttggcatctcaattctgctcatactgatatgcagtggcttattaaccgcgggcgctctgctcagaaaagctttcagaaaataa

SEQ ID NO: 377473 - DNA, 396 bp, Salmonella enterica
atgtaccggaagctgttgtattcctttcttgccctgccggtgatatcagttgccggcactactgtttataccgactcggcacatctgccggttaatccgccccctgatgtacaggttgtgttgctcgacgggccacagcaactgcaggatgctttttttggcccgttgccggctgaccctgaagccgctgaggtggccgttcgtgagcacatgcagtctcctgaatggcagtctgcacaggctgaccttgcagaacgttaccgccaggtgacccacgcctggtcgctggggcttaaaaaataccctgcggtggtgttcgatgaccgggaagcggtgtacggcaccaccgatgtggcacaggctgaacgactcaggagtcagggaggccagccatga

SEQ ID NO: 377474 - DNA, 975 bp, Salmonella enterica
atgacgggtctgcgaacacgacgttatgctggcgcatttttgttgtggacagcgactgtttctgtggccggtgcttccctgaatacggcacagatagcggccggtgctatttctcagagctgcatcagctggcgggtcagcggtatctgttactggctgcactgctcctggtcggggtgtcgggtcagaacgtccgtgaaggtctcacattttatccctgaagcagtggtgtccacctataccgcaccgggcggtaatccctggcgggaaattgctctggtcagtcagacatccggcggtgtggagaacgccatcagcagcgggattgccgggctgtctgctggcgggggaaacccggcagatatgaaatcgccggggcggcgtaaatctgccatccgtttcaaatacgcggatgcgctggggcatccggccacgttgcttatcgggggcagcattcccgggtattcgtgtgagtctgctgccacaccactgaggccttattttctcagcacgctggacagtcttgcctggcgcaccggcatgcctgaatccctgtatcccgaagccatgatacccggcagacgggaactggggagtcaacgtaatgcagacatgtggggaaatatctacccccgttccggttttgtcagccagaccgatgatgacaaagcggcagccctggtggcccagcgggtggcggatattatcacccgcaccggtgagccccacgtctatcagtcgctgaaaggccgaaaaaaggatggctactggccaccggatgcggtggaagaaaacaccggcacccgtaatcacaagtggcagcgactgaccccttccgtttcttcatcctgcgccgtgtttccggatggcagtcatgccgcgccggaggacggtaatgccgcgtttgccctgtggcgtccctacagttgctgcaaaaagcggggccagaaattcttgggcagtacgaatttttag

SEQ ID NO: 377475 - DNA, 1455 bp, Salmonella enterica
atgaagcataaacctaaaccacaactgataaatgtcgtggcactggccgtcatgctggcctgcagcacaatggccgacgcggcggagaatgaacgcagtacgttcggtctctccctgccacaggtgaatgacagtgccatcgggtacgggaaatccattgatggtgccatttcggacaaactgttttacaccctgggaggcgggtcagtgatatcgcagccggcgacccggagcaacatgaagaagctcggggtggatattggctggagcagcaacctgatgtgcggcaactttgacctgaaaaccacggtgagcaatcagctgaacggggtgacggacggttttaaaaacctgatgggggatgtgatacaaggagcgacgggggcggtggccagtctgccggcgatggttatccagcgggctaatccggggctgtatgacgcactgactaacggggtgcttcaggctaatgtggcgttcgacaaggcacagctgaactgtcagaacatggcgaagcgcatgatggagttctcggacagcagcaagtggacacaggctgcgatgctggatgagtacaagaaaatcgtgaattcaggggatggtgacgccatccggggagatgatgccggtcgtaaggctaccgggaaagaaggccggaaatggattggtggccaggatcgtggcggggcagggcaggcggctattcgccccacgcatgatctggctgcagcgggttttaacatgatgaataacctgcctgttaccagtacatcaacggtcgggagcaccagttgtaccggaagtgtgtgcagtaagttcagtaatgctgaagaggcagcaaaggcggtggtgagggtgctgggcgatcgttccatgcggacctgcggcaatgcagcggaatgtaccagcggggatgaagaccaacagccgggagtggcggttgccggaaccgggttcacgccgatgctggaagaagcggtgaaagtgaatacggagcaactggtgaagttggtgaatggtactgaaaagccgacagcagcaaatctggccagactccggtcaggcagtctgacagtaacggccggagtgattaaggcgctgcaacgggatccggataatgctgcactgaccgggcgtctggccggtgaactggcaatggcagatacggtggagacggcgctattgatgcgcagaatgattatgacggggatgtctgagccgtatgctgcagcgcaggatgccgcgattgaagaaggaagccgccgtattgaggcgctggaccgggagattgcagcgctgaaaaacgagatggagctgaagcgtgaactggcccgcaacagcgtgctgaccattattgaacgggagaatgaacgggttgggaacaatccgatgattcagcagacggataatgctgacagccggatgcatacgctggaggcccctgatgaggaataa

SEQ ID NO: 377476 - DNA, 372 bp, Salmonella enterica
atgaggaataaggttatgaaggtgaatacgggagcaggaatgcgcggccggctaaaaaggaagggaaagatgcttattttgtatctgctgctactggcaggtatcaccgtgttttctttgtggctggcaaataccggtattcgccatgcagagggttttgctgccctgcgtgaatggatgtatgagacgcgttatggctggctgatctggcgtctgtgtgtctactgcgcgctcggatggtgggggtggaaaatctggcatgcatcgggcttcagacaggaatacagggcaccttttcttcgtatggccacagtcagtgttttgtttgttctgctgtgtgaatactctgtttttgccggaccggggcgttga

SEQ ID NO: 377477 - DNA, 1542 bp, Salmonella enterica
atgaccacaaataattatctggaatattttctgaccctgttgggctgggtggtgaataatggcctgtgggatgtgctaatcagcaccggattgtttgcactgccgctggtatttaaggtgattgggatctggctgaaagtccgggaagagggggaagatgaaggtaacaagggattactttcgctgccccgtattgagaatgtgctctacggtgctttcttcgtcatgattgtctgttgcgttcctctgattcagatcagtcttgacagtattaagtttgataaaacgcgggcaagaacatgcggaacctggacaccgaaagatcccggagataccggttacagtggagttatttccagtcttggtgatcggaccgctgctgcgccactctggtgggtgatggtgcataaattatccaagggggtgacacaggctgcggttgcgtcgatcccctgtcggccagatttacgtcagttacgttttgaggttcagcggacgtttattgaaaaccgtgcgctggcagatgaattgcaggattttaccaatgactgctattcgctggccctgtatatgtggaaacaaagggatcaggggcagacgaaggataaaaaactcctttcagatattgcgtggatagggagtaccacgtttatgaaaggcgattacatgacgctgcagtcaaaactcccccgtgcagcttttccctggaatgaatcgcgggacagcgggcgtccgaatacgggacgtggaggatatccgacatgtaatgagtggtggctggcagcagataacggcctgagggcgcgggtgattgcggaggtcagcgacagttactggttgcggttgtcagcggcaatgaaaatgattggcagcagccaggtcgattataaggaagaagttgtccgacggctggtgagtccgaagagtctgacagtctctcaggacggtgaggtttaccgtggatatggtggtaatgcggatatgacgacctataatgcggtggccaggattgcgggaacggctggcagtgcggtggcagcactgggggcattcccggcgcttgatgcaatgcgacaggcgctgccaatggtgcaggccattctgctgatggcaatttatatcatgttgccgctgattctggcgtttgcagcatatgagttgtcaaccctgatcacactgacgtttgtggtatttgcgctgaattttctgacgttctggtgggagcttgcacgatggcttgacagctggatgctgacggcactgtacagttcggacacgcatacccggttcaatatgatgggattccagaacacgtcggacgatctgataatgaatctggtaatggggacgatgtttatggtgttgccggcagtctggcttggggcgttgtcatgggcgggagtacatatcggagtcgcgattagtacagcagctaaagatggaactagtggtacatatcaggcagcgcagaaagcaggtaatttagcaggggcaggtggtaatagtttctctaagggactggataagggaatgaataaataa

SEQ ID NO: 377478 - DNA, 174 bp, Salmonella enterica
atgaatatgttgctgaaaaagctcctttgtgcactcctgccagatccggttcccgatgtccccaaaaactcaacgaattatctagtagaagaaaatccacaagaagaattaccttcctttctagattcccattcatattgggaatatgagcaatgggaaaatcaaaataactag

SEQ ID NO: 377479 - DNA, 576 bp, Salmonella enterica
atgttgagtaaaaagttgttgcttgtttgtgtgtcatgtctggtgctgagcgcctgttctgttgatgaaattgctgcggttaacaagcaaatcagtgatggtgcctttgctttgactggtgcattacgcggtaataattcatcaactgctgataatggtatgccgttgctgtcacagaaagcgccgaccaaaagggaaaaacgggaaaatgtaacggaaatccccgttgatgttgatacggctgcaggaagattaaagcggtactataaattttattcgaatgaggaagttgacgctattcgtaataatggaactactgatgggaaatggcaggcttcggcaataaaagatcatggacatatatgggacgcgatgcctggtagctattacaaaatggggagtgactgggatggcggtcagtttgatgatcatcttaccattgaagttgaaaaaaatggtaaagggagtcatctctatataacgtacgcatcaccggctccagggcatctgaaagaagcaacgcttgcgccgttatttaaacacgtaaaagatgtggcagaaggaagagtcagataa

SEQ ID NO: 377480 - DNA, 159 bp, Salmonella enterica
atgagaaataaaattcttttcgctttattaattatagtggtggctgctttgtcattctatttcggccgaagctgggaattatcaaaaacagcagaatactgttcttcaattggtaagcaattgtctgattctggtcctgcgtattgtgtggaaaaataa

SEQ ID NO: 377481 - DNA, 306 bp, Salmonella enterica
atgaataatactttgcggcagtggcttgaatttgatgagatgattacgccaaagataataaaagttatctactggatttttcttgttatcacaatcgttggtggcgtcacaggaatgttcgccaatttttttgcaggatgtattggtcttgtatttggtgttataggtctgagagttgggtgtgagatggttattctgatgtttaatatctataagcaacttaaaaaaattgcagatgcagttcctgaaaaaacaagtgatgtgtctgaggctgaaatgccttcaccttcagataatcatatctga

SEQ ID NO: 377482 - DNA, 921 bp, Salmonella enterica
atgagtagaaaatcgcagcgttccagagttgagatgtttcgcaaggatttcattactcttgcccgtgagtgtggcggcagttatgcgacaaaagccgacagggttcgtattgcaaaatattttctgaattatttacgggaaaacggaataaagctgcgggacacccacagtatcaatacgaggcattttcaggggtatcttctgagcagaaaagcgcaggggatttctcaccggactattcagaatgaaagggcggtgatgagagctattttacagaaggacggtcgttataaattagccgctcctgataaccctttactgagtaatgagacgctcggcctgacaaatacatgccgggatggaaaaaaaataccgttgccaccggaggaattccggaaagcatttacagaggtggaaaaaaagaatcccggtgttgcagcggcaatgcaactttcttatgtactgggtttgcgaacgaaggaagcagtccagtcatgtaaatcagttaagtcgtggatgcaggctctggaatcggggcacaattctctgttgattgtatttggcacaaaaggtgggcgcccccgggatactattattaccgatcgtgatgttgtcagacaggccctgagttatgctgagaaaataatgaatgaacagagtggaaagcttatcgaacgtccgaatataaaacaggcaatagatgtttatcgctatcatgttcgtaaggctggattaaccggagagaaatcacctcacagtatgcgttaccatttttctcaggaggccagacgtttttatcgaaaagatggggtgggtgataaagagatatatgcacgggtttctatggatttaggtcatggggacggtcgggggcgttatgtgaaacaggtttactttaaaaacggtgatattcaggaataa

SEQ ID NO: 377483 - DNA, 447 bp, Salmonella enterica
atgtatcatatattgatggaaataaaagcggttcgttatatcagggatatcgtactggatagtgagaacgattatacagatattatggtgcattaccgttgtaaaacgccactgagtgaatctgatacatgtgccatgatttgccgctattttgagtcagtatattttgatgatgaagctggcggtgattattttattccaaaaacaacggcggttgaattgtggtcggaaatgggtggtgttctcagatgtaaaccggatcaccggagcctttcgctgaaagtggataatacggttattattccggtgattccggaaattgtttatgccctgcaaaatgggacatatgatccagactcatctgatattacatcatctgtaaatacatggtttggtgatctgtttgatgataatggagatctgatcatacataaacagaattgctga

SEQ ID NO: 377484 - DNA, 192 bp, Salmonella enterica
atgcagccacccgaaagcgttcctcacagactgccggaacattggtggtcacccaaaggtgacagaattagcatgctcattttccgttgctctgtttatcctgtcaagattacgttatcagcaattctgtttatgtatgatcagatctccattatcatcaaacagatcaccaaaccatgtatttacagatga

SEQ ID NO: 377485 - DNA, 438 bp, Salmonella enterica
atgaacattctgttaacacttctttattctgtcgtatggcttgtctgcaccattcttgggagggttgcaccagagtcggtggcccgtgcgtggtgtgagtatcatctggaaggtatgtcgatccttcgttatacgtaccgctcactggcaaaggcggcagaaatgcgtgaaggaaaagaacctctttatcggctgttcagctatctcgaaggcctcgcacattatctggggtacagaagcggcgatgaaaagctggaatcaggatttctccggctgtttctgtggcatatatgtgcgaaaggccatgcgctgggtgctcttatagagatggaggcacgtgtgtgcaagtacaatccatgggagtacggctggcgcgatggctggattcagtgtgtctatattgacagaaatgaatatttcgaatgcgatttcgaatga

SEQ ID NO: 377486 - DNA, 393 bp, Salmonella enterica
atgtcaacgtttattttgtgccctgaacagggcatctcttcttttttccggcgaatgacggcccagttgcgggtgtttttttcccgtaacaacctgtcatattacagtcgctggtacaccaatccggccggcaatctgagtgtgcgggtctgtatgttccgtcgtggcggtgtctggacaccctgtctgtactaccggcagggaatgcaccgcaacgcgtacacaggctggtatcagccgttaccgcgtgaggtcatttatctgaaccggtttaccgggcggatatcccgtcgcaggacctggcatgccgcctgtcgtatggcggaacagctgaccaccctgcgttaccgctttggtctgcaggctggtgaaagcgtcgtacagccctgctga

SEQ ID NO: 377487 - DNA, 480 bp, Salmonella enterica
atgaatagtctgttaatactcctttacgttgttgtatggcgtgtctgcaccattcttcgggtaatcacaccagtgtcgactgtccgtgcgtggtgtgagtatcaactggaaggtatgacgatacttcgtgatgcgtacagctcgctggcaaaggcggctggaatgcagaatgaagcatttgaatatcttaaaggtattgcacgtcatctgggctacgaaagcggtggtgaccaactgaaatcaggacttttccggccgtttctgtggcatatacgtgcgaaaggccacaggctgggggctgtcatggagatggaggtatggaagacatggaagaacggctgtaacgatgtctgcaatccatgggaggatatctacaatccatgggagcgtggatggaacgatggctggactgaatgtctgaatcaacgtgtagccggcatcctgaagcaggcctgtgttgacttttccgacgcagactga

SEQ ID NO: 377488 - DNA, 378 bp, Salmonella enterica
atgtactcacccttacttgttcattattcagcagagcagacgcagtctgctctgctggcgcatatcagccagctggaaggtgagctgatgcggttacgcgcctggcaacggctggggattaccccggagccggatgatgagacggagccttcactggtatacgtgcaactgtgggataccggtgaggcgctgggctggctgctgtatgacctggagcaggagaacattcctgctccgggagttcaggcccgtcaggcacttgacagtctgatggcgctggggcgtgaaattaatcatgaaatctggactgacagtatcagtaccggaaagctgacggccggggcggatgcctgttttgcccggcacgacatgatgtag

SEQ ID NO: 377489 - DNA, 630 bp, Salmonella enterica
atgtctgaattatcttcacgtccggcccgtgagccggtggtatatacccttgagcaggttgccacaataccggaaaaacagtggcatgcttttgttctggccgtaacagaaaccttctggcagttgccggaggcgttacggccgcagaatgcgtatttcggctccctgacccgggcatctgagttgtttccggtaacggacacactggcgttttacagccggtctgcagacgggctgtggtcggtgaatgtcaccattgaacgggaacatcgtcagaacatcctggtgcttaaggagctgaatttcgggcgccagccgggggatttctttgcccgtgcggtgtttgtgctgctgcacaatctgtgtccggattgtttccgcattcattccactgccggtggggccagctggtcactgccgctgaaatggataaaacggtacctggggcatgagaatttttctgctccggagtctgtattaaccaccccggtaaggggagatgcgtttgaccgtttactgctgcagtttctgtccggtcaggggcgacagttatccccggatgactggtcagcactggaagaggctgaacatcagctttactggctgcgtgcacttgccggtggacactga

SEQ ID NO: 377490 - DNA, 384 bp, Salmonella enterica
atgggacttgatatttactttatggctcgtgataaccatcagaatggtgccgttgtggaaacacaggaacatcaggaagtggggaccttccgtaaggtgatgccgcttctgacatggttccgtaaccatactgatgcttcagatgagcagcatactttcccggtaacacgccggtcactgactgtattattgcgtgacctcagtatgctgacgccgggaaactgccacagcctgtttccttatgtcagaaactcgcgtttacggggggaagactatgctgatgactactggtatgacgtggatgacgtaaaagcgtgggtcagcgatacgctgaagacgtttgattttgagcgtcgttcactggtgatgttggcgttgtggtaa

SEQ ID NO: 377491 - DNA, 948 bp, Salmonella enterica
atgtctgaatggtgccagaatcgttttgaaattaccggtaagtcagtctgtctggatgtgctgacgcagtggattgaaggatgtgagacaccgcgttaccgccatgccatacagcagagtatacagctgtttctggccggttgtgcagggctggtgaagcccacccggacgacgcagtatccgccatatccggcgctggttcgtcacggtacagggttgtcatctccggctaaccaggcatttgaacagtggctggggctgctggtaaaagatgccgtactggatgaagagacgataaagaccattgaccgcctttatcaccagtcatgtattggcgctgtccgctgggggaacctgccggataatgcccgggagataatcaccgcgttaatgcactgccagtattctgactggtttggcctggtcggactgagtgaacacattgatgccgaggcctgctggagccggctgtcggattacccggagcaggcgcagccctgtgacatgctgatggtcataccctcccgtctggccacagagctgaacggttcaggtggactgctgcagggcatttccaccacgaccagcctttacagccggatatacggtgtggagtggccatcaggtcacaatgttcgctgggtgcgtgatgagatgagcagtctggtgctgctgactgacacaccctggtatccgccttcaggtgagctggttggtgaaatctcgaaggtgttcgactgtgagatacggcactggtacagcgaaccagtccggggcatacagggttacaactgttatgacggtggtgaacatacggacagtgacccgcaggccgaatggccaggcagggaaacacttcctcagccccggctgtatctggtggaggagcgcgctgaagaacagacagaagccgcgcctttaccggttccgctggcttcaggccagtaa

SEQ ID NO: 377492 - DNA, 687 bp, Salmonella enterica
atggccacctttatcgaccatcagaaagccttcatttcgctgtttaatcagaccgcccgttatcacaaacgccataaggtgtttgaagactttgtcagctgcagtgtgattgccctggagaaccggcttcagttcagtgaggcacgggagcagaagtacctgcgaatcgtcagtggttatgaaaagcaggatgttatcaacatggcgcatttgcttgcccatgtcattgagggactggagcagggattctgtgactttctgggcagcgtgttcatgcaactggagctgggggacacataccggggccagtttttcacgccctggagtgtggccagcatgatggcacagatgcaactggggaatgtgaaggtgttgtttgagaacaaaccctttatcacgctcagtgaacctgcctgtggtgccggcagtatggttctggctgtggctgacaccctgaaccgttcggggtatccggcataccgcaggatgtgggtgtcggcaacggacattgacccgctggcagccggcatggcgtatatacaactgtcgctgtgtggtgtggccggagaagtggtgattggtaacgcgctgtgtaatgagcgacgccgggtgctgctgacgcccgggcattacctcggaaactggtcatatcgtctgcgtcattctcaggagcagattgtcgcctga

SEQ ID NO: 377493 - DNA, 534 bp, Salmonella enterica
atgaaaatgattaaaactgttatggctggcgcagttgcaatggctctggtttcttttggtgctaatgctgcaaatcagggacagggcgttgttaactttaaaggttctgtaatcagtgcaccgtgcggtattgcaccggaatctgcagatcagtccattgattttggtcagatctcaaaagcgcatctgaatgctgatggtatttctgtaaagaaaaatttggatattaagttggttaactgtgatgccactgaactggctactactggtagtgtaaaagtatcatttactggcacctccgttaatggccaggtaaaagaactgggcactgctggcgataccggtactgctgttgttgtttctgaagctggtggcaatctggtttcctttgatggtactgctggcgctgcaaccaagctgcaggctggtgacaatactttgcgttacagcacttgggttaaaaaagccaccagcggtgctctgaaagaaggtgacttcactgccgttgctaatttcaatctgacctacgagtaa

SEQ ID NO: 377494 - DNA, 588 bp, Salmonella enterica
atgttctggcgtatgatcctttcggtaacatttttcttgagtgcagcggttcaggctgcgccatcgccctcttttccgccgccggggatgaccctgccggagtactggggagaggagcatgtctggtggcatggtcgggcgagttttaaggggcaggtgattgctccggcctgcacgctggccatggaagatacctggcaggcgattgatatgggggagaccccggttcgtgatttacaggacagtttcgccggtcctgaaaagaaattccgtctgcggttgcgtaactgtgagctggcgggaacaggtaaacgggtttatacggcgagccgtgtccgggtgacctttgatggtctgcagggcgaaacgcctgacaaattctcgctgaccggtcaggcagaaggtatcaatctgcagatactggataaccagggctatccggcccgtgtcggtaaagtgatgccgccgttattgctgaacggaaatgaagaggggctggattataccctacgtgttgtccgtaatggtcagccgttaaaggcagggaattattatgccgcattgcgttttaaggtggattacgaataa

SEQ ID NO: 377495 - DNA, 2508 bp, Salmonella enterica
atgaaaaataatatctcttttgctgttaacagcattacatatgcgctgatgctttcccttgcaggcgcaccggcttatgccgtcgactttaatacagatgttctggatgcagcagacagacagaatatagacttttcccgtttctctcaggccgggtatattcttccgggtcagtaccagatggaaataatggtgaatgaccaggggatttcaccgtcggcatttccggtgacgtttctggagccgccggtttccggtcaggacggaaagaagccgttaccgcaggcctgtctgacgccggagatggtcagccggatggggctgacggcggcttctcaggagaaggtcacatactggaataacgggcagtgtgcggatctcagccagttgccgggggtggagatacgcccgaatccggcagaagggatgctgtacatcaatatgccgcaggcctggctggaatattccgacgcctcctggctgccgccgtcacgctgggataatggtattccgggactgttgtttgactacaacatcaacgggacggtgaacaagccgcacaagggaaaacagtcacagtcactgagctataacgggaccgcaggtgccaactttggtgcctggcgtctgcgtgcggactatcagggcaacctgaatcataccaccggcagcgggcaggggacggacagtcagttcacctggagccgtttctacatgtaccgcgccatcccgcgctggcgcgccaacctcactctgggtgagaactacatcaattctgagattttcagctcctggcgctataccggtgccagcctggaaagtgatgaccgcatgctgccgccaaaactgcgcggttatgcaccgcaggtctcagggattgcggatacgaatgcgcgcgtcgtgatttcgcagcagggacgcatcctctatgactccaccgtgccggcaggtccgttcaccattcaggacctggacagctccgtgcgtggtcgtctggatgttgaggttatcgagcaggacgggcggaaaaaaacgttccaggtggacacagcatatgtgccgtatctgacccgtccgggccagattcgttacaagctgatttccggtcgttcgcgtaattatgagcacaccacggaaggtccggtctttgctgccggtgaggcgtcctggggtatcagtaacaagtggtcactttacggtggcggtatcgttgccggggattacaacgccctggcagtgggtctgggccgtgacctgaatgagttcggtacggtatctgctgacgtgactcagtccgtggcccgcattccgggagaagatacaaagcagggtaaatcctggcgtctgagctactccaaacgttttgatgacgtgaatgcggatatcacctttgcgggttaccgcttctctgaacgcaattacatgacgatggaccagtacctcaatgcccgttaccggaatgacttcacgggacgtgagaaggaactgtacaccgtcacgctcaacaagaacttcgaggactggaagacctcggtcaacctgcagtacagccatcagacctactgggaccgccggacatctgactattacacgctgtcggtgaaccgttacttcgatgccttcgggtttaagaacatttccctggggctgtccgcatcccgttcgaaataccagaaccgggataacgattcggcatttgtacgtttgtccgtgccgtggggaaccggtacggccagctacagcggcagcatgagcaatgaccgttacaccaacaccgtggggtacagcgacacgctgaacaaagggttgagcagttacagcctgaacgccggtgtgagcagtggcggtggtcagccatcgcagagtcagatgagcgcgtactacaaccacagcagtccgctggccaacctgtcagcgaacttctctgccgtggagaacggttacacgtcattcggtatgagcgcatccggtggtgcaacgataaccgcgaaaggcgcggccctgcatgcagggggcatgaacggaggaacccggctgttggtggacaccgatggtgtcggaggcgtgcctgtcgacggcggccgggtctccaccaaccggtggggcattggtgtggtgacggatgtgagcagctattaccgcaacaccacctcagtggacctgaacaagctgccggaagacatggaagccacccgctcggtggtggagtcggtcctgacggaaggggccattggttacagggagtttgaagtcctgaaaggaagtcgtctgtttgccgtgctgcgtctggcagacaacagccatccgccgtttggtgccagcgtgacaaacgcaaaaggccgtgagctggggatggtggcagacagtggtctggcctggctgagcggggtgaatccgggtgaaaccctgaatgtcggctgggacggccggacacagtgtgtggtggatatcccggcaaaactggacccggcacagcaactgctgctgccctgccgtaaggcgaactga

SEQ ID NO: 377496 - DNA, 732 bp, Salmonella enterica
atgctgaaaatgaaaccggcgctgaaaaaaacgctgatggcggtagcgtgcctgagcgcagtaccggcagcccaggctgccatctccctggaccgtacgcgtgcgatttttaacggtggtgagaaatcgatgacactgaatatcgccaatgataacaaacagctcccctacctggcgcaggcctggatagagaatgagaagcaggaaaaaatcaccaccggaccgattgtggtcacgccgccggtgcagcgtcttgagccgggggcgaaaagtatggtccgtctggccagcaccccggatatcagcaaactgccacaggaccgggaatccctgttctacttcaaccttcgtgaaattcctccgaagagtgataaggcgaatgtgctgcagatagccctgcagaccaaaatcaagctgttttaccgcccgaaagccattgaggcgaaacccaatgcagtctggcaggaccagctggtgctgaacaaaaccagcggaggctaccggattgaaaacccgacgccgtattacgtgacggtgataggccttggcggcagtgaaaaacaggcgaaggaaggcgagtttgaggccgtgatgctggcaccgaagtccacgcagacggtgaaatccggaacatacagcacgccgtacctgagctacatcaacgactacggcggacgtccggttctgcagttcagctgcagcggagaccgttgtacggcagtgaagaaataa

SEQ ID NO: 377497 - DNA, 588 bp, Salmonella enterica
atgaacaggacaacaacagggctctgtctggctgcgctgctggtgagctgcagcatgaacagtgtgctgcgggcagacgagctggtcatgcgggataacttctttgtcgcagatgagacccgtcaccagtgggtgaatgagcacaatggccgtaccgggatgctgacagtcagtggtgcgctgctgtcatccccgtgcacgctggagacgaatgaggtggatctgccattacaaaaaagcacggaaggcatcatgacgcgttatgtgctgaagctgaatctgctgggatgtggtgacggtggtgcggtgacctctgccacttcagtggcggggcgtgacagcatgatggtgatgcagagtgccctgctgacgggagtggaggacggcgtgctgcagccggaacagcggatggtcagcacggggcgtgctgttgtgtacggtggtgcaaatcagttcacctactggctgagtgaggcacagcagcaggcactggcgggtcagcaggcgacagaccgtgcgcaggggaaaccgtatatgaatccgcgggacaactcggctctgttgcgtctgcggctggattatgaataa

SEQ ID NO: 377498 - DNA, 567 bp, Salmonella enterica
atgaaaggcattatttccggaacgggtatagcccgactggcgggctgtctgcctctgttgctgacgctgtctgcaggtgcggtgaatgtcacttttgatggggagttacttgaccgcccctgccagattgactctgccagtctgaatcagacagtccagtttctggaacgacctgtaaaggattttcaggtgtcaccgggtaaggggccggctgaaaaattcagtattcgtctggttgactgtgacacatcctccatctggaaaacagtgaagctgaaattcagcggtaatcctgagccaggaatgaaggaaaagtcggactggtttttacgtgtttccggagagaaccagggaaaacttgctgttggtctgctggatacggatggtgtcacaccgctgaaactgggggacgcgcacaataacagacagggaacgcagattgagggcaatacggtaacgctgaattttaaggcttttgtgcaggcaacacctgatgccattgcacagaaaagcgtacagcctggagagtatgagtcagtagcgaattttgagttgttctatgaatga

SEQ ID NO: 377499 - DNA, 1341 bp, Salmonella enterica
atgaatgacggactgaaaatatgccgccggatactgcaaacgacgggaggtgttgcactgttattgtggggtggctgtgccggagccggagacaattcaggaggtgttccgggcatactgaagtttgcacagcagtatcagcagcaggaagcctctgccataaaagagggaggttcaggtggaaaaacggacagtgtcgccaggtctgtcggaaaaggtgaagcaggggcgggcagcactaccgaactgcgacgccggctgacgctgagggaacaggaggttcgacagcttaaaaaggaaaaccggggactgcgtgaacgactgaaagtgctgcctgacactgcacaggataatgcagaaaaagacaaggtggtggcttccctgaaagcggaacttgatgaaagcaggaaacagcttgagaccatcaccagaaagggagagcaggctcaggaaacgctgaatgcgcaggttattgagctgaaacagcaactgtcccgtatggaaacggaaagtaagactgctgctgaacaggccggaaaagaaaagactgagctgcaggccacgctgaataccctgaaagctgaaatggcggatatgccggtagtgacagcggaaatgctgaaacctgacgatatgcagcagacttatgccgccggtgtgatgctgggacgcgatatgctgaatcttcaggctgcacaacaacaacttggtctgaaaacagataaccgaattctgatggcaggaatacgcgatgcgctgaacaggaaagttctgctgaatgaatctgttctggatgtcgctctgcagcgggcggaagagctggcacagaaagcccgtctggctgtgattcgcgaacagaagaaggcgggagcagcctggcttgagaagttcagaaaacagaaaggcgtgaaacaggcggaagggggattctggtacaggagtgagtatgccggcgatggtgagtttatccgtggtgatgacaccttggtggatgttgtggtgacagaaaaactgacggatggcacggttgttgaagatatggatgcaagaggtcgggtgatatctcaggtcctgggtgaatatccgccggtgttccgcgaagcactgatgttgatgaagaatcacggaacaatggagcttgttgtccctccggaactggcttacggtgatgagggatatccaccaaaagttcctcctggagcaaccatggtttacacgctcagggttgaagaagtgaagcctgttacagaacccgcgtccggtgaaagcgccgggaaaaaagcgttatctctggccggaaggaatgacaaagcaggccggacagaaggagtgaaaaaatga

SEQ ID NO: 377500 - DNA, 561 bp, Salmonella enterica
atgaaaaacagaatgaagctgatattatcagcactgacgggcggagttatgttgttatcggcaccagccatggcagtggatgtccccataaaaataaccggaaccgtttatatcccaccctgtaaaataaaaaatgatactgactttaaagtctctttcggaaagattgcgcttcagaaagtggatggacggaattatgcacaacccacaaccgtggaagtcagttgtgagtatttccagggaaaaccatatatccgtctgtccgggggaacaggtcagctttccggtgcacccgataatgtgctgaaaaccacgggtgctaattcttcggcactgggtattgcattatatcagggtggttctgtggatcctcagaatccgctcaggctgggtgccggagcacagggacaatttggatatgaaatcacaaaaggcctttcagccgttaatgttcagaacagtcagtttacgttcacggcagtgccttataaacatggcaatacagatttgaatgccggaaccttcagtgcttcggtcacaatgagtatcagttacctgtaa

SEQ ID NO: 377501 - DNA, 315 bp, Salmonella enterica
atgcggcacagcgcgctaaaccctgactcagtccatgctgcgaaatatttatgtcccggaaaggttatgccggaacattttgaacagttgatgctgctgtctaaaataagagggagaaaaattaatgctgcactgaaggattttcttgttaacggaaaaacccggaaagagatattctgtatctatggtatcagtccagggtatttttctcataaacttaatcagttaaggcattgtagtcgaatgattatggatttactccctttctacgtgtgtgacgatgcggataatattcaaaatgaaagaatacattaa

SEQ ID NO: 377502 - DNA, 270 bp, Salmonella enterica
gtgagtagttcaggagatcgtctggatgatgttgaaaaaatggagcgctgtcggcgggaactggaggcgctgaagaaaatagattcggcggtatataacaaacgtaaagcggaatttgacagactggtctcaggcgcatcgctttataacggagtaagaagtgatgtcggaaattatactcagagtgcagttgatgcattgtaccggttcaggtcagataaactgtgtgccgatatagccagtgatgtgttaaagggactggctaaataa

SEQ ID NO: 377503 - DNA, 1017 bp, Salmonella enterica
atgagttgctttaaaataaagtgtttttatttttattttttcatttccaacgaggtgctttctgcaggaagtaattaccagaactttttatgggctccagcctctccatcttctgtatctaatgcaatcgcagtaactatagatgatagtgctgtatcacaagcattaatcacatttccacagataaactcctggaaagtgttagccacatcctgtagcggacattgggatggattgcaaagaggaaactatagatattggctgcaatataagactgggtggcagaaggcctctggaggtttagtatatagatttagtgatatcagcaactgggatatggctctctcaacaccagtgccaggtgttaatactatggtgagtacaaaccattacgatgagcaaggaatgtctggttgttggcagttaggaaagattgtgggctttactccatcactaactattccggtatttcgagtgaatatcgaacttcaaaggagttctgcttttcctggtaaatatactgttcgtgtaccatattggtgggggtatgaggaaaataaagcatctggatacgatgaggctatagcatggcgtaggtttggtataattatgcagaatgaagcaccatcttacattgatatccctgttgttgttacgtcaaaatgtaatttcaatacatcgccaataaatttatctcatggttcattgtctgggcgagctgctgatggcaatcagacaacaccttacaatctcaatgttacctgtgcgtcaggaacttcattgtcggtgaaacttattggttcgcaaaaagtatcaggtaaaacagataactatacactgtgcggaagcggtggaatgtgtgagctgacatttgataatggtaaatataatgaaaccatgacaatctataacagcaagacgctatccattaaatccacttatcgcctgaatgatattactaaaccggtggcagaatcttttgaaggaagtggtgtgttgcaggtgctggtaaattaa

SEQ ID NO: 377504 - DNA, 222 bp, Salmonella enterica
atgaatatgcgttcacaacctgactgttatgaaaaaatcatccgttttatggaagggcgaaatgcatccgtatcaccgctgaaaacacgtgaaattgcggatggttgcgaaatgtctgtttaccttgcgctttattatctccgggaactgcaccgacagcatatagtggagcctgaccgcagtggtaagggaagcaccatctactggcatcttgtgaattaa

SEQ ID NO: 377505 - DNA, 639 bp, Salmonella enterica
atgcgtaaaagcagactgatatctctttttttgtgtctggtattgtcaggcacagtatatgcagaggaaaacgcaacctattcggtactggataagccggtggcgagtgctgttcaggataatgaaacggtggttgagtttttttctttttattgcccaccctgttatgccttttctcaggattacggcattgataaagccatccgcgaaagccttcctccggggaaaaaactggtcaagtatcatgccggttttctgggagagctgggagaggagctgacccgggcatggtcagtggcaatggtgctgggtgtggaagataaggtggagccgctgttatttgatgccgtgcagaaaacgcggagactgaaatcagcagaggatattccggggatttttatccgtgcgggtgtttatccgggagaatatatgcaggcgcttgccagtaaggaagtggctgagatgacagagaagcagaaacgtctgttcagggagtatggtgtgaccagcaccccgtccgtgtatgtcaacggcagataccgtattgagaacagtgcatttcaggcagacagtgtggaggctttccgtaaaagctacgttgctgcggtgaacgcactgactgaccggacagataaataa

SEQ ID NO: 377506 - DNA, 555 bp, Salmonella enterica
atggaggccgtatgggttgccggatgcagcagttatgaaacaaccggcgtaatacatctgttaagtgggtgtggtatcagtgcggagcttttcagaccgggagagcaactccggaccagagacacgctgatactctgtttcagcagtgcaccttttctggggtggtggcggtatctgaagataacacaatgggtgatgcatcgttatgatatccagttgattgttctgtgtcctgatgaggtacaccgggctggtattgtatgtggcagaaataccgtggtagtgaacggagaacgcagttgtattcatttgtcccggtcattacagcaggcagtacagcgtcgtctgccggaggcgatactggctccttatcgggaatgtgtcaggttgttttttctggaaagagctgttcagaccctgcggattcatcccgccggggagtctgactgcccggccgcacgaagagcatactaccggcgttatcggattgttcagcgcctgggatttatttcactgctgaagctgaaagtattcatggccggctttgtcggataa

SEQ ID NO: 377507 - DNA, 1227 bp, Salmonella enterica
atgcttggaaccataataaaaatcagaacgggtgaagatgttctgtccgcagccattcatcgcattgaatggctgtttgatacattctcttcggtttgcctgtctttttccggaggaaaggattctactgtactctttcaccttgtggccggtgtggcacgcaggaaaaaacgtcgtttctctgtactgttcattgactgggaagcccagtatcagtgcaccattgaacatattcagaaaatacgggaaatgtaccgggatgtgacggataccttttactgggtggctcttcccctgaccacggttaacggtgtctcgcagtttcagccggagtggatatgctgggagtctggtgtgacctgggttcgccagccaccggaagaggccattacagacataacgtattttcccttttaccggtatgccatgacgtttgaagaatttgttccggcattttcttcctggtttgccggtaaccggtgtggagtggcaatactgactggtgtccgtgctgatgaatcgctcaatcgctttatgggactggtatctcagcgcaaactgagatatgcagatgataaaccctggaccacagcgtcgcctgaagggttttattacaccatgtatccgttatatgactggaaagcccgcgatatctggatatataacgccagaacctgtgccatctacaatcctctgtatgacctgatgtaccgtgccggcgtgccgttacgcaacatgcgtgtctgtgaaccttttggtcctgaacagcgtaagggactgtggctttaccatgttctggagccggaaacctgggccaggatgtgtgaacgggtgtcaggggctgccagcggggcactttatgctaatgaaagtggtgcttattttgccctgcgtaagcgtatttcaaaaccagcccatcatacctggcgcagctatgcgatgttcctgctggatgtgatgccggaaagaacggcagaacattaccgtaacaaaatagctgtctatctgcgctggtatcagacacggggcttcccggatgacattcctgatgaacaggagaatgacctggggtgtcgggatattccgtcctggcgacgtatctgtaagacactcataaagaatgatttctggtgccggaccctctccttcagcccgaacaaaccccggcactatgaacgttatctgcagcgtatgaaagaaaggaggaaggaatgggggattctgtga

SEQ ID NO: 377508 - DNA, 639 bp, Salmonella enterica
atgggggattctgtgacaccggacgtgctgggcaacatgattcgtcagtacttcagccagacgcaatctgaagaagagaccatacaggctctgaatcacctgcgcagggtgcttcatgaggtcagcccttttgcgcaggagcctgtggactgtgtgctgtgggtgaaagcggataaagtggtggccaacgattacaatcccaatgtcatggcgccgggtgagaagaaactgctgaagcagtcactggagaaagatggtttcacacaaccggtggtggtgtctgaggaaaagaaccattacctggtggtggatggttttcatcgccaggtgctgggcagggaggcaggcacaggtaaacgcctgaagggctggctgccggtggcttgtattaatcctgagagaaagggacaggctgaacgcattgccgcgaccatacgacataaccgggccagaggaaaacatcagataacctcaatgtctgatattgtcagggatctttcgcgtctgggctggacagatgagcgtattggcacagagttgggcatggatcaggatgaagtgctgagattgaaacagataagtgggctgacggagctgtttctggaagaggatttcagtccggcatggacggttagttaa

SEQ ID NO: 377509 - DNA, 729 bp, Salmonella enterica
atgagaaaatttattgattttaatgataagagagaatcaactaatactgatgtgtgtcagtgtaatagtggtggggttaatattcagaatacgcatatttcaaataataatatagtcaataagaattacaccggtgccagtgagaatagtgatggtgttgtatatatattgatggttgggggcgttttgtctgcactggcgtggattttttttagttattatgatgagatttatcttatgataagtgttggagtgataaccagttcagttttgtctgttattgctttaagtatcttgttcgtcagaaatgaaattgatatgggggatttttcaagagttgcctggattatatttttaggtgttggggtgtttggtctgaatacatacctgagtatccagattcctcaggatattattaatatttcaaaggcgagcgattcttttattgagttcttcaaggcagttcacagaggctcttatgataattatatgaattatgtgggttctggcttgcttatctgtgctttagttattggtttgtgtttgtctggtttcagagagttagcgtatgtgctggccagtgaatatcgaaccggactgtggtttggtttatataaattgaccaactgtttcagaatgaaattggctggttttggaggggttattattattgttatggcaattgttattgttctgataagcggagtcgatttttcttccatttggtga

SEQ ID NO: 377510 - DNA, 759 bp, Salmonella enterica
atgttttcagtatggactgagttgatagctctcgttttaatctttgcttttatgcttcttccatttcttccggcattgctggaattatattctccccgggatcctgaggcgctttgtcttgatgaaaatgaacggttgtctcctcctgatacagaatccgaagaagaaaaaaatgagggcgaaggtagtgggatgtttttacaggcagatgatgaatgcgttgtttttcctggcgctttgtttaaacatctcaccgcctcatgtattcgtattgcaggatatagtggtagttatccttcgctctcagaaaagtattctatggagcagtatgctccggaagaagctcaatggtatccggaacaacgttactggtacagtaaaaaagatattattattcctccaggggtatgtgttgacggagatatggtttctgaaggaaatattatactgggtgaatcgtccgttatttctggagcagtaaaagccgggtgtgatattgaattacgtgctcaggcaagagtgaaagggtgctgtacggcaaataatatcagattattttatgcagcaggaatatccggttgtgttgttgccagtcagcgtattcatatgatggaactgtcatgggccggtgaccaggagtcacctgtcagcgtggtggcaaatgaagtgttattgctgccaggcgttcggatatatggcgggattaatgcacataaacatgtgaaagtttctgacgcagatgaggagtatattttgtga

SEQ ID NO: 377511 - DNA, 1173 bp, Salmonella enterica
gtgaggaaaaataaaatattgctggtttgtggaaccagaccagaaattattaagatggctccggtttttcaggtattacagaacagtgaatattttttacctgttgtgatacatacggggcagcatactgatatggcatcaccgctatatcagttttttcggatgatgcccaggcactcactgagtttacacagacgttcaggtgatcttgctcatttaacggaaatattgctggcggaacttgctccggttttatcctgtgagcagcctgcggcattgctcgttcatggtgatacgacgagcgcaatgaccgctgcacttgccgcatattatgcgcgtgtgccgatcgggcatgtcgaggccggactcaggacatacaataaatattctccttttcctgaggaaatgaaccggagtcttatcgggcgtctggctgactggcattatgcacccacaccatgcgcccggaaggccttgctgaatgaaggtgttgatagctcccgcattgtggtgacgggaaatacagtggtggatgcggccttgcagacggcggaattaataacggtatcagaaaatttaccttcggttgtgagacaacatcgtcttgataaacgtctggttggtcgacggctgatactggtcactgcacacaggagagaaaactgggggagcggattgcagcgtattgcacaggcggttgatcaactcttgtctcagtatgatgatgtttttgttatctggcccctgcatgcaaatcctgatgtatcctgttgcattaaagaagcgttatctcactattcaggaaataacagttctttaattttgtgcccacctctggattacccttctcttatatggttacagaatcatgcatgggtcgtactgactgattccggaggcattcaggaggaatctgctgcgctgggaactccggtattaatattgcgggatgcaacggaacggcctgaacttgttaacgccgggggaggtgttctggttggaacggacacttctgtaatatatgaaacggtgagtaatttgtacaaaaatgctgatatatggcgtggaatgaaaaatataaaaaacccatttgggagcggggaggctgcaaaaaatattgtcagtcatctgacgggggtattttatgacaatattcagagtggcagagggtaa

SEQ ID NO: 377512 - DNA, 777 bp, Salmonella enterica
atgaataaatataaattcagcatgctgacattattactggtcggtgtaaatctgtcggttcaggctgcagagtcagggcgtttcgaaagtagtatagccggtgctcatgtgacaggaccatatgaaggtggtaaatcattcaaatcatctttattacttaatcttgagggaaaaaataagcttggtttcagctatctggctcttgatgcctggggagagtcaaccaattattttaatgtacgctatgtgtcttatctgacaccagatatctggattgacagtaacttcagtgcgtcagataaaaattccattacagcaaaggcccgtgggaatgccatgataaacaggggatttccggataagggactgatacttgctggcggatttgatcgctataccatgcgtagtggaggaggtgccagtgctgttcgttccatggttgtaaagtatctgaagaattatcccgttgcactacaacttaatacatcatttgtgcgcagtgatatgaataaccggacagggggaaatgtcggtgtcagtgttcagtatggatttgaacgccgttggactgttgctgctggaggaaattacggaagagttcattacgagttagtgaaacaaccgggaacggtggctgattaccggagcacatcatattttacatctggtcgttactggcttggaaatgactggggggtaagtgcccgttattctggagtttcgaatcgccattatacacgtaatgaagcagagctcggaatatttgttgatttttaa

SEQ ID NO: 377513 - DNA, 327 bp, Salmonella enterica
atgagagaacctgaatatcctgatatgaatgcatatctggccacaatttttcatgccggatactggttcgttgttcttggtccattattttttgcaatcatggcatttaccctccctgggaatctggtattgcgtctggggtgggtgttactggcagaactttatcttatattgatcgtacctgtgattgctttgtggcactggttaattctgttatgggcagggccactgatacttcctgtaactggaagcctgggaactgtctttttgctctcctgctatctgatagcattttacggaatggccgcttctgtggaggttttgtga

SEQ ID NO: 377514 - DNA, 1122 bp, Salmonella enterica
gtgaaagagactcaccgatttgatacactggatggaatgcggggaatttgtgcattactgattgcctgttcacattttccggccccttttcttggcgatcaatgggtattgttccgtcatgcttttgtattcacgaatcttttttttggcctaagtgggtttattttattatcagtatatcgtgaacgactgacaacgtttcgtcattatttactttttagtgggaaaagaataaaacgattattgccagtgcatctggtaacaacgcttcttattatgattgtgccagttgtttcatggtggctgcagtgcctgacgacccgatttattctgggagagacgccgggaggtatgccagcactaccatgggatggttatgcttttcttgttcatcttttcttgctgcaggggggaggactgttaccaaacctggtctataatttcccggcatggtcgctgggggctatcctttactgttcgttactgatgggggggattcttgtttttgccagaagactcaggattatattatttacactgatttgttctgtatctgtatatatattgattaaatatgcacctcattatatgaccagcagtcaggattatggcattttcagggcactgtcctgtttcttccttggtgcgcttgcagcagagattcgttgccattactgtgttctttcgtcgaaggttttgcgctggttacctttgttacagacattaatgctgatggtcgtactggcttttatgacagttgtgaaggctgataccaggcagacatttttgttattaccaatgttgacgttatttttatttgtcttcagttatgatgggggcgattacaccagggcgctgaaattacctgtattcagatggttgtctgagcgtgcttactctgtttttatgaatcaggctttattgttattcctgggggctgaagttcaacggtgcagtgaacttctgggtctgtcgccgtttaatacccgggtgagcggaacgttagtattggtgttgtatttatttttgttactattgatttctgactggacatggcggcatatcgaatgtcgttttaataaaaaacattctgcagtgatggcgtctacagtgagagaataa

SEQ ID NO: 377515 - DNA, 1062 bp, Salmonella enterica
atgctgagttatttaatgttttttcggttttttgtttttttatcccttttgttttttttgtccggaaacgtagctttcgcagaggataatcttatttcttcagttaagaatgagtctggctcaagttcgctggatctgagaaaatatcagaccagagatgggttgttaattacattcaaaaatggtgatgtagctgatccttattttggtttatattctctggagctggcacgacgagcgggaatggatatccggaagacatctctcgaatttattcgatgggggattctgaatcagcgaagcgatggtcgctttgggcgttattgtaagctggaggggagctggaaatactgtgggagagctgattctgatgatgcaacactggccaggtggttacagttgcttgtaaatatgagtgataataagcctctgccatctgtctggcaatcaagttttgatcgtgcactgaaggcattaatgtcattacgcatggataatggtatctacagcgtttttcctcatgacacgcgcggatatgctggttatgcattgtttaaagataatgttgaagttcttaatgctctggagaatctggctaattactttcggcagactggtgatgaaatacaggcccggcgttttgaacaggatgtcagcgatctgcggaaagcaatggaaaaggcgttcggacaggatatctttgccttaaaaaaactggctctgaatgcaaattatgacaaaccgcgtttttatcctcatgcagtggctgttccttttgcatggatggagggatatggtcctcgcccaacccgtgcagatgccatccgctggcttgacaaatatgaaaatgactggaaagaaatggccagaactaattatccatggggattaatggcgctggctcttatggatgccggaatgaatgaacgtgctgttcgttggtttgaagacaatcaacactggcgtcaaaaaggagaacactggaatattctggaagaaaccagtgcccagattatccattaccgtcttatgacgcaaaatggagggaaagagaatggttga

SEQ ID NO: 377516 - DNA, 1269 bp, Salmonella enterica
atggttgaagtaacaggaggattcctgcttgttatctctctgataatgtttttatatagtatccgtcattttatatttggtatgaaccggctttttagtcggcaaaaaacaggctttgaaggcatacaggatgcaccatggccgacgctcactgtttttattgcagctcataatgaagaagccgttgtcggtcattgtattgaatctctgttgaaaacgaattatccacatgacaggttatgtattatcccggtaaatgatcgctcaaccgatggaacacgcattgtctgtgatgactgggctgcgcgttatccccatcttataaaacctttccatcgtcgtgatgggcgggcaggaaagccagccgctcttatggatgctgtccgacaggctcctgaaagcgaagtttatgttatttttgatgcggattatttgcccgcaccgggattactgaaacaaatagttgcgccgttatttgaccctcagattggcgtgaccatgggcagagttgtgcctcaaaatacggggagaaaccttctgacccgtttgctggatatggaacgttcggcgggatatcagggtgatcagcaggcaagacaaaatacaggtttactgccccagtttggtggaactgtaggagcaattaaagttcatgctctggaagctgtgggcgggtttcgtgaggatgtgctggctgaagatactgatctgactttcagaatgttggagaagggatggagggtgcagtatgtgaatactgctgagtgctatgaggaggtaccggaaacctgggaagtgcgtgtccgacagcttcagcggtgggcaaagggacataaccaggttatggttcgctatttatttagtagtttatataacagtcatctgaatattatgcaaaaaatggatgctttaatgttgcttggatgttatgcaattgctccgctaacgcttgtcgggtgggggattgttctttttacatggtatatccagccagcatggattttgcagttatcaataacagctatgacgctggttatgtttggtgggtttggcaatctggcggcattttttcagatggctgtggccgtgcggcttgacgggcatgggcgacgtttgaggcttctgcctctgagtcttgcgggatatctggtgagtgccgtgacaataagccggggagccgttaacctgattctggataaacttctggaaagagaggttcgctgggataagacagtccgattcagacattataataaagaaagagaatag

SEQ ID NO: 377517 - DNA, 477 bp, Salmonella enterica
atgccatggtttgatcccgctgatggtggaattaacgcccgaatactaatattattacaatctcctgcaaaaagtgaactttctcctcgttttgtgtcacaagataaccctggcccatcgcagcagaatctcaaccgctttcttaaacaggctaaaataaaaagacaaaacatcattatctggaatactattccatggctgatgccgaccaacacaaagattattccgaccagagaaaatataaacaaaggtcttaatataataaaatctctgatgcctttactgaaaaacgtaagagtgatactcctagctggctcagtcgcatcaaaaaccagaatattttttgaaaaagaatatcctcatatagtattgctgaacatgcctcacccaagtccgttatcactctgccgctctcctgacatttctacaaaaataaaagacacattacagcaggcatatttattaacagcatcatga

SEQ ID NO: 377518 - DNA, 438 bp, Salmonella enterica
gtggccgcacaggcagccagattgactctgaatcatggcattccaggcacgatatccatccccgtaaccatcaccagtaaatgtgatttctctgtggcaccgctcaacttaactcacggaacaatgtccggaagacaagcaaacgggcatcagacaaaaccttataatctgaatataaaatgtgacacaggaacatcagtttccgtaaaactaaaaggggcacatcctgtatcaggtaaaacagctaattttacacaatgcggaaatggggggctgtgcgaactgacattcaacggaaacaagtataatgaaacaatgacagtaactggaaacaatcttgccttatccataacatccacgtaccaccttaaaaatccatcatctcctgtcgccgaatcgtttgaaggaagcggcattctggaaatacaagttttgtaa

SEQ ID NO: 377519 - DNA, 297 bp, Salmonella enterica
atgcacaagaatattttaaccgcaattttattactggtttcagaaccagttctgtcagctacatatatgtataattttctgtgggtaccggtaaatccattaaaacatgctgaaggctcccccgtagttgtggatgattacagtgaatcatcttattctaccgttaccatcaatcctgttggagatcagaacagactggtactgagcgagtgctggggaaaagaagggcccatatggggcatctggccaggtcactgcctggattgtcgtaccagagggatggaaaaaaacaactga

SEQ ID NO: 377520 - DNA, 1491 bp, Salmonella enterica
atgtcactgatacccaccgatgaacagtctgctattatccactggcaggggcagaaactggttgtgaacgcctttgctggtacaggaaagaccagtaccctggttcagtatgcactggcaaaccccgacagcagaatactgtatctggcttataaccgcgctgtacgcgatgaggctgagcgtaaatttccgtttaatgtggagtgcaaaacctcccaccaactggcctggtcgcgcttcggcagacattaccggaatcgtctgattgccagtctgcgcatcacggatgtggccagaaagctgaacacccgtcactggctgctggttcgtcttgcactcagcagcctgaatcagtttctgtgtagtgctgacaaggaaccggggctgcagcatttaccggatgaggacgcacgggccggtacggatgtctcagccattctgcaggcggtacaggtactctggcatgagatgagttgccctgatggctcattccctgtcacgcatgatacctacctgaagctgttccagttgtcattcccggacctgtcccggcgctgggataccattctgtttgatgaggcacaggacgccaatccggtgacgtctgcgctggtactcagtcagtcctgccgggtaatcctggtgggtgaccgttaccagcagatttaccgctttcgtggtgccgatgatgcgctttctcatcctgttctgaacgatgcagaccgtctgtggctgacgcagagttttcgttttggtccgtcagtggcccggatggcgaatctgcttttgcagcgtgccggtgagacacgacaggtgaccggcagtggcggggaagatgaagtactgatgagccgtaccggagcggataaaccggaagggccccggacggtactgagccggacggtggcaggagtgatatgcacggcgctgatggccagtctgagtggcaggaaggtgtactgggtgggcggtattgaaggctaccggactgaggcactggaggacctgtactggttttctgctgatatgccggaaaagatgcagtctgatgcactgcggcgggattaccgcgattttgatgaatactgccggatagccaaatccacccgggatgtggagatgaatcaggccattcgcctgctggatatctgtttcccgttgccggtgaaactgaagcttctgcgggagcacaccgtcacgagtgagaaggatgcggatattaccgtgtcaacggcccaccgcagtaaggggctggaatggccggtggtgatactggatgaggattttgcggatatcaccgacccgctgatgccggaagatgaacggagggacgaaactaacctgttttacgttgcggtcacccgggcccgtaaaaccctggtactgaacagtctgatgcgtcagctggtaagtgaacaaagccagaaggctgctgatacatccccgtcagaagaagatacggtatgcgggcaggagggggaaaatgtttaa

SEQ ID NO: 377521 - DNA, 1656 bp, Salmonella enterica
atgtttaatcgcctgaaaaaactgcttcccggtaacagcaatgccagcagtgctgagacaaccgccccggaaaccgcacgccagccggaacatctgccggaaggtttttatatgcccgggactgcagaggagctgacgtccacaccacgcaggaaacagtgtctgaagcagttatgggaaaacagcagtatgccatctgacgtgtatcagcagttctgtcttactccggtacaaaaactcctgatggcggcgcagaacgttcccgcagccggagactcccggtgggcagatgccaacggttttggcgacctgacgctgcagttcaccacctatgccgttcgtctggccagaggatatatgtttccgcccggtgccacaccggaagagcaggctgcgcagtccggtgtatggaatgtcgtggtgttctggtcggcactgttttatcacctgccacttcttgcacacctggagggggaactggtcagcggaaagttatggcagccggggatgtcatcaccggatgaggcatttcgtttccgctaccgacagccacgtctgcagggctcagaggcacagcaactggcagcggtgatggccgggcagttgttgccggagggggcgacagcatggctggccactgtgccgggggcattacagaatctggcgggagcggtctggcatcagcatccggagatggcattgattcgctcagtcctgaaaatagcggcagaagaggtggagagtccgctcctcgcattacaggtgacggaagccgtaacagcacctttgctcccggaaaacactgtgcagtctgaagacaatgtgccatctgacagccagccagaaacatcaactgaggccattgcgccggaaatgttggtgaccgtcccggaggtgggtgaatttacgctgcagccctctgtttcaggaaccgatgaaacagaagcagtcgtcccggatacgttgcagtctgcaacaggcgcagaggaaaagccaccggaggagcagagtgtccatgatgataccgatatgctgctgagcctgttttcagcagtcagtgatgacacagaactccctgaggttgatgtggcagaacctgttgaaaataaagagacagtttctgatgaatcaggttgtgcaaacagtgaacaggctggcgcggaaagtgatcctgcgcaagacacggggatttttggctctgttttatgtatcagtgagcaggctcaggagataaaaaaatcaccagagcactcacaggaccggaacagtacggaaaatgtcagggctccgggcaatggtggtgaatttattgaatggctcagacatggactggattcgggagagatcccggtgaatcagcctgatgccagagttcatctgattgccggatatgcttttctgcgtgtaccggatgtgttttacctgtatctgaaacagacggggagtaaccacgatcgccgttatattcagtccgtatttgagcgtgcggggcttcaccgggttcgttccggagagcgttttgttcaggccagactgtatgattcggcagaacgaacagggcgctatcaacctgtcagcggttacctggtgaaaagccgcagtctgttcagcgggaatgggagccccggagacagtccgtttatcacatttccgtga

SEQ ID NO: 377522 - DNA, 1059 bp, Salmonella enterica
atgggatcaaagaaggccgggaaactgacctgggatgaattgcttgatgagtattttttctcgagaaacctgcgtccggatacggaatggagttaccgcaaggttgtccggggatttgttgattttatgggcgagggggtatttccggcggatgtaacccagcgtgatattcagcattggcgacgtcaggttctgaaaacgcagtcactttcaacatacacgtggaataacaaggtggcgcatctccgggcgatttttgggttcgggatcaaaaaagggctgttgccccagacagaaaacccgttatgtgaggcatcagtggcaaaggaggcgaaaaagaagaagacgctgaacaaagatcagatgatccaggtttatctggttgttcagaagtttgctgaatatgaaacacagcagagggtaccctgcgatcggagacgtaatgctctgtatccggcaagatactggctgacggttctggatgtgttgcgttataccgggatgcgctttaatcagctgcagcatatcaggctgaaggatgttcgtcccggagaaggggtgattgaactgcaactggaggggagtaaaacacaccgggagtggtgtgtgccgatcgtggcaccactgaaagcgcccctggaactcctcctgtcacgggcccgacgtatgggtgccggttctgatgattttttgtttgatgtctgccggtttacagactgcattgaacctgatgattatgagtattgcccggcgcgggcccatcaggcggttaagggatttttcagacgtctgtcacgggagtgtggttttctggtttctgcccaccgtttcaggcacacactggcgacgattctgatggagtcaccggagcgaaacatgcatctggttaaatccatgctggggcatcagagtattgcgacgactatggagtatgtggatgtcagtgctgcatccgcagccggaacgctggaaacggcactgggtctgtataccgatacacgaacggtcagtgaggtttgtaaagagggagagaacagggaagaagagacggaaaattaa

SEQ ID NO: 377523 - DNA, 483 bp, Salmonella enterica
atggctattccagtttatttatggctgaaagatgacggcggcgcagatattaaaggttcggttgacgtaagggatcgcgaaggcagtatcgaggttaacggatttacgcataacctgcgcctgcctaccgatgcctttaccgggaaagtgaccggcactcgccagcatgcgccgttggtttttcagaaagaaatagactcatcctcgccctacctcatgaaagccgttgcaaccggacaaacgctcaaatcagcggagttcaaatggtacaacatcaatgatgccgggcaggaagctgagtattacaatatgctactggaaaacgtgaaagttgtctccgttaccccgttgatgcatgacatcaaagaccccaccaaagagaagcataaccaccttgagctggtggaactgcgttacgataaaatcacctggaaatactgcgacggcaatttgcagtttgctgacagttgggcagagcgttaa

SEQ ID NO: 377524 - DNA, 405 bp, Salmonella enterica
atgcgctttccggtgtactcaactccatatgatatttcatcgttcgcaccgcccggcgttgatgttgtaagccatatggtgattgctcgcctacacggtggcgcttcgctgatgacttacgtatggttttatcagatggttcggaatcatggcccgtgggattacaagcaaggccacccacaatatgcgaatttcggtaacttccattacggcgcaattggtgcggcagcgggtattcctgacggtgtgcttttacgtggcgctggtgcggcgcagattctggctggtacaagtaatccggtagagttcgcacagtaccatgcggtcgacgcatacggcgatgaccccgtagatcagtcatggataaaggcgggtattgattatgcaaggcgcagtgggttttag

SEQ ID NO: 377525 - DNA, 399 bp, Salmonella enterica
atgcaaggcgcagtgggttttagcaggaagacaggcgtaatatttgtgttgcttcttctgggttttctggcttatcagtttcgtgattttttcagcgtttatgagcaggtgaaaagcacggttaaaattaacgataagttgacgttgtacgttaccgaagtgtctaaaagctcgctctctaaagatacctacaactactatttttatgatgctggtaagagcgcggatgacttcctgattcacgttaagagtatagagccggtgatgacaacagatgactacaaggccagcgcagaggtaaaagacggcgatatttatttccgcgttcgcgggaatgtctatgccttcaggagcgtcggctataacgtcagtatccacctcgatacatcgccatactga

SEQ ID NO: 377526 - DNA, 1092 bp, Salmonella enterica
atgagttcagctacacacgttaatcccgcaaaacctgtgacagatgtttatctgctggcaggcctgggattactggcggtcagaattatccagggatttatttactgggggggtgggagccgacgttttatttatgcgccggataaacttaacccggatgcaccccactggatggcctacaagtttcagacggcaatgcccggtgctcttatggggctggagcatgtaatttcatttatgctccagcatttctggctgctgtatgccggcgtaatacttttcagcgcggctgaactcatcgccgggctgtttctaatgataggtctgttcacccgtatttcagcgctgttgtcgatgtttttctccgtattgctaatgctgatgtttggctggcaaggggcaacctgtattgatgaatggacaatggctgcctgtaatctggcgatgggaaccacattgtttctttgcgggtcacacagctatgccctggacaacgttatcctgaagagaaagccccatttggctgacagtcggattttccggtggtgttgtggttcacttcctgtgccgctaaccccggtcggttataaaaaactggcgctatggctgttagctttagtggtggtttttgatgtagggacttacagttactatcggggctcagtggtcacgccatatcatcatggccctgttagccctaccacacatcatgtccgcctgactgaaggaaaattgttccctgatggccgcgttcaggttcatgcttacctggatgcaggaacgcctgaggcacctgagcatatcatggaggcatggctgaaagatgccgatggcgcaacgcttattcactgggacaccgccatgctgtcggcattaccgcctgatagcttccggaacgattatgcctacaacaaattcgctcctggtcactacggcatacaggctattgtcggatcagccgccacgctcacccttcctgctggtgttataaaaagaggtagcgatagattaccgaacggtccggtaacgctggtactgatagatatggaaggacatacgttcagcacgcctcttgaacgggtttccgactga

SEQ ID NO: 377527 - DNA, 537 bp, Salmonella enterica
atgaacaaaatgctattagccggaagtaccggtattgttctgctgtctgctgcagccagtccggtatgggcagacgataatgccagtacattttcactcggatacgcccagtcccatactaatcacgccggaacgctgcgtggggtacggctggcaaacaactataaaatgtcaccggactgggggctgacaacctcattttcctggctaaatggaagccagcgctattccgatgaaagcagtaatggtcgtgtaacaacccgttattactctctgcttgcaggtccctcatggaaaataaataaccagttaagcctgtatagtcaggtgggccccgtattattgcatcagcgtgatcatgggataaatgagtctgacagtaaggtcggatatggttattccgcaggtgtggcttacaccccagtcagtaatgttgcggtaactctgggttatgaaggtgcagattttgatgctacccataacagcggaagccttaatagcaatggttttaatcttggcgtgggttatcggttttga

SEQ ID NO: 377528 - DNA, 1749 bp, Salmonella enterica
atgaaagtctcagtttcattattcgcatttttgtttgcatctgcaattttccttacggggtgtggaccaacaatatccggtaagcctgccgcacgtatttcgggtgatttacccttggtacaacagccaatctgttccgccgatgggtcggggaagcgtacggcattttttatgacgatctctggcggtggttctcgttcggcaatcttcggggcgcgagtcttatcggaacttaagcatgttgacggcgaggatctcactcatcatatcaatgtgatctcttctgtttctggaggttcactggcggcggcgctgtatggaatctcggaagacgtggggcagggtgaggtgtggcgtccggtttggaatgataatctgatacgcgaacgcctggacgctaacctgaggttgagtgctgctgcaaagttagccaatccaatatttctcggcagctatatttttggtcaccaaacccggacggatgctctgttcgccgttctggattcagatgtcttcaatgtgccaggagaacgccgtacgctcacgttgggggatatgaatcccacgcgccctcaaatcatcattaactcaacaatcgccacccgggatgattctgatgcatttcgcccccgtccattcggtagcctttttacttttacggagacgaatcttggctcaatcggtgttgattatcaaagcatgcctatttcccgggctgtcgccgcctctgcagccttccctggaatgatgtcgccggtcgtattaaatcgttttcaacgaggcactgatgagacggaagccggcataccaaagtatgttcatctgattgacggtggtgcttcggataacctggggttgctggcggtgaaaagagcgctcatcgaagattctcaccggatactaacacaatgcgatcaggtgattgtgttaacagtggatgcctttggtattcagggtaaccatagggacgataccccgtatatgcgctcaccgctggggctggttattgatactaatacgttactcactgcttttgattcactcctggctgtaagcaggacccgggcactggcggagttcaggtcgcgaatttttgtaccgcccgccgatagcgagcagtgccgtaaagatgggctacctgacaacatttgtgcaggtggagttcgcgcgaactgggatgaaataaacacactgcttaagcagaagctattttttgtccatctttcgtttgatagtgaggaaatagccgggccgccaccgcccatctatttctgtgaatcaattgataaaaacggccagtcttcaggatgtgactacccacctattgattggaccacacatcacaatgaagtaaaagcgcttcaaaggcggttgaaactgattccaactaccttcgggctgccacaagacgatgtcgccgatattaccgcttttacgaaacttcttttttggccagcgaataggtgtttgatgcatatgcgtgacatgcttgtcagaggcgttcagcatacggatgtcttttacaaggacgcgactaactcatgtgatgaaacgacatcagtcactaaaacacaaatgttgcgtctaagggaatatagtgacgtaatcggtgacaggatctttgacaacagtaatcaaaaacggaatgcgtcacgctccgaaaaacctctgacatcggaacaacgagaggtgttctggaatgagacgttattttattatggctggaacggtcgtatgtacatgcagtaa

SEQ ID NO: 377529 - DNA, 2022 bp, Salmonella enterica
atgaaaatgacacggctttatcctctggccttggggggattattgctccccgccattgctaatgcccagacttcacagcaagacgaaagcacgctggtggttaccgccagtaaacaatcttcccgctcggcatcagccaacaatgtctcgtctaccgttgtcagcgcgccggagttaagcgacgccggcgttaccgccagcgacaaactccccaaagtcttgcctgggctcaatattgaaaatagcggcaacatgcttttttcgacaatctcgctacgcggcgtctcttcggcgcaggacttctataaccccgccgtcaccctgtatgtcgatggcgtccctcagctttctaccaacaccatccaggcgcttaccgatgtgcaaagcgtggagttgctgcgtggcccacagggaacgttatatggcaaaagcgctcagggcgggatcatcaacatcgtcacccggcagccggacaacacgccgcgcggctatattgaaggcggcgtcagcagccgcgacagttatcgaagtaaattcaacctgagcggccccattcaggatggcctgctgtacggcagcgtcaccctattacgccaggttgatgacggcgacatgattaaccccgcgacgggaagcgatgatttaggcggcacccgcgccagcatagggaatgtgaaactgcgtctggcgccggacgatcagccctgggaaataggctttgccgcctcacgcgaatgtacccgtgccacccaggacgcctatgtgggatggaatgatattaagggccgtaagctgtcgatcagcgatggtttaccagacccgtacatgcggcgctgcactgacagccagaccctgagtgggaaatacaccaccgacgactgggttttcaacctgatcagcgcctggcagcagcagcattattcgcgcaccttcccttccggttcgttaatcgtcaatatgcctcagcgctggaatcaggatgtccaggagctgcgcgccgcaaccctgggcgatgcgcgtaccgttgatatggtgtttggcctctatcgccagaacacgcgcgagcaaatgcaggcaacttacgacatgcctaccatgcgttatctgaccagcgccggctataccaccgctgaaacgctggccgcatacagtgacctgacctggcatttaaccgatcgttttgatatcggcggcggcgtgcgcttctcgcatgataaatccagtacacaatatcacggcagcatgcgcggcaatccgtttggcgaccagggtaagagcaatgacaatcaggtgctcggacagctatccgcaggctatatgctgaccgacgactggagagtgtatacccgtgtagcccagggatataaaccttccgggtacaacatcgtgcctactgcgggtcttgatgccaaaccgttcgtcgccgagaaatccatcaactatgaacttggcactcgctacgaaactgctgacgtcacgctgcaagccgcgacgttttatacccacaccaaagacatgcagctctactctggcccggtcgggatgcagacattaagcaatgcgggtaaagccgacgccaccggcgttgagcttgaagcgaagtggcggtttgcgccaggctggtcatgggatatcaatggcaacatgatccgttccgaattcaccaatgacagtgagttgtatcacggcaaccgggtgccgttcgtaccacgttatggcgcgggaagcagtgtgaacggcgtgattgatacgcgctatggcgcactgatgccccgactggcggttaatctggtcgggccgcattatttcgatggcgacaaccagttgcggcaaggcacctatgccaccctggacagcagcctgggctggcaggcgactgaacggatgaacatttccatctatgtcgataacctgttcgaccgtcgttaccgtacctatggctacatgaacggcagcagcgccgtcgcgcaggtgaatatggggcgcaccgtcggtatcaatacgcgaattgatttcttctga

SEQ ID NO: 377530 - DNA, 1578 bp, Salmonella enterica
atgaattcttcctttgaatctctgattgaacagtatcccttacccattgccgaacagttgcgccactgggcggcccgttatgcctcgcgaattgccgtcgttgatgcaaaggggtcgttaacctacagcgcgcttgatgcacgggtcgacgaacttgccgcaggtctgtcatcactgggtttgcgttcgggggagcatgtgattgtgcagcttcccaacgacaacgcgtttgttaccctgctgttcgccttgttaagactgggcgttatccccgtgctggcgatgccctcccaacgggcgctggatatcgacgcgctggttgagctggcgcaacccgtcgcttacgttattcacggggaaaaccacgcagatctggcccgacagatggcgcacaaacacgcctgcttgcgtcatgttctggtcgctggagagaccgtgagcaacgattttacgccgctcttctcccttcacggtgagcagcaggcgtggccgcagcctgatgtttccgccaccgcgttgctgctactttctggcggcacaaccggcacgcccaaactcatccctcgccgacacgccgactatagctataacttcagcgcttctgctgaactgtgcagcatcagtcaacagagcgtatatctcgccgtcctcccggtggcgcataactttccactggcctgccccggcattctgggtacgcttgcctgcggcggaaaagtggtgctgaccgacagcgccagctgtgatgaggtgatgccgttaatcgcgcaggaaggcgtgactcacgtcgccctggttccggcgctggcgcaattatgggtgcaggccagggagtgggaagacagcgacctctcgtcgctgcgcgtcattcaggcaggcggcgcccggctcgacccgacgcttgctgagcaggttatcgccacctttgactgtaccctgcaacaggtcttcggtatggcggaaggcctgctctgctttacccggctggacgatccgcataccactattctccacagccaggggcgcccgttgtcccctctggatgaaatccgcatcgttgatcaagacgagaacgacgtcgcgccgggcgaaacagggcaattgttaacgcgcggcccttataccatttcaggttattaccgcgcccctgcccacaacgcgcaggcctttaccgcgcaagggttttaccgcacaggcgacaatgtcaggctggatgaggcggggaacctgcacgttgaggggcgcataaaagagcagatcaaccgcgccggagaaaaaatagccgcggctgaagtggagtcggcactgatgcgtttagcggaagtgcaagattgcgcggtagtcgccgcgccggacacgctgcttggtgagcggatttgcgcgtttatcatcgcgcagcaggtgccaactgactatcagcagttgcgtcaacaactgacccgtatggggctcagcgcgtggaaaattcctgaccaaatcgagtttctggcccactggccactcaccgccgtcggcaagatagacaaaaaacgcctgacggctctcgccatcgaccgttatcgccattccgcccaataa

SEQ ID NO: 377531 - DNA, 804 bp, Salmonella enterica
gtgacgcaatctgcaatgtgcatcccgctgtggcccgcccggaacggcaatactgcgcatctggtcatgtgccctttcgctggcggcagcagtagcgcgtttcgccactggcaagctgagcaactggctgattgcgcgctttctctggtgatctggccggggcgcgatcgccttcgccatctggaaccgctcagaagcattacacaactggcggcactgctggcgaacgagctggaagcatccgtatcgcctgacacgccgcttttactcgccgggcacagcatgggggcgcaggtggcgtttgaaacctgccgacttctggagcaacgggggcatgcgccgcaaggactgattatttccgggtgccatgccccgcatctgcattctgaacgccagctcagccatcgcgatgatgccgactttatcgctgaactgatagacattggcggatgttctcctgaactgcgggaaaaccaggaattaatgtcgctgtttcttcctcttctgcgcgctgattttgacgccaccgagagctatcactacgactcgcccgacgtctgtccgccgctgcgcacgcctgcgctgttattgtgcggtagccacgatcgcgaagcctcctggcagcaggtcgatgcctggcgtcagtggctgagccacgttacaggcccggtggtgattgacggcgatcatttctatcccattcaacaagcccggtccttttttacgcagattatccgccattttccccatgcattttctgcaatgaccgctttgcaaaaacagcccagcacttcagaaaggtga

SEQ ID NO: 377532 - DNA, 1101 bp, Salmonella enterica
atgatgtcgtccgcctccccaaaacaacgcgtactgattgtgggcgccaaatttggcgaaatgtacctgaatgcctttatgcagcccccggaggggctggaactggttggcctgctggcgcaaggaagcgcccgttcaagagagctggcccatgcgtttggcattccgctgtatacctcgccggaacagataaccagaatgccggatatcgcctgtattgtcgtgcgttcgaccgtcgccggaggaaccggtacgcagcttgccagacactttctggcgcgcggcgtacacgtcattcaggagcatcccctccacccggatgacatcagttccttacaaacgctggcgcagaaacagggttgctgctattgggtaaacacattttatccgcatacgcgcgcgggacgcacatggcttcgcgatgcgcagcaactgcgtcactgcctggctaaaacgccgccggtagtccacgccaccaccagccgtcagttgctctactccacgctggatttgttgttgctggctctgggcgttgatgccgtcgccgtggagtgcgacgtggttggcagctttagcgattttcactgtctgagactcttctggccgaagggagaagcctgcctgctgcttcagcgctatctcgatcctgacgatccagatatgcatagccttatcatgcaccgcctgctgctgggctggccggaaggtcatctttcgctggaggcgagctacggccccgtcatctggtcatccagcctgtttgtcgcagaccatcaggagaacgctcacagtctctatcgcagaccggaaatcctgcgcgatccgccgggtctgacgcgcagcgcggcccccctgagctggcgtgactgctgcgaaaccgtcgggccggagggtgtcagctggttgctacaccagttgcgcagccatctggcgggcgaacatccaccagcggcctgccaaagcgtacatcagatcgcgttatcacgtttatggcagcagattctacgtcagaccggcaatgcggagatcagacgcctgacgccgccgcaccacgaccggttagccggtttctacaacgatgatgataaggaggcgctgtga

SEQ ID NO: 377533 - DNA, 9495 bp, Salmonella enterica
atggataacttgcgcttctcttctgcgccgacagcagattccattgatgcatcgatgatcgctcaacactacccggactgcgaacctgtcgcggttatcggctacgcctgccattttcctgaatcgccggatggcgaaacgttctggcaaaacctgctggaaggtcgtgaatgcagccgacgctttacgcgcgaagagcttctggccgtcggtctggatgccgccaccattgacgatcctcattatgtcaatatcggtacggtgttagacaacgccgactgcttcgacgccaccctgtttggctattcgcgacaggaagcggagtcgatggacccgcagcagcgcctgtttttgcaggcggtctggcatgcgctggaacatgccggttatgcccccggcgccgtcccccataagaccggtgttttcgcctcttcccggatgagtacctaccccggtcgcgaagcattgaacgtgacagaagtcgcgcaggtaaagggtctgcaatctctgatgggcaatgataaagactatattgccacccgcgccgcgtacaaactgaacctgcacggcccggcgttatcggtacagaccgcctgctccagctcgctggttgccgtacatctggcctgtgaaagcctgcgcgcaggcgaatccgatatggcgattgccggcggcgtggcgctctctttcccccagcaggcaggctatcgctaccagcccggaatgattttctctcctgatggtcactgtcgtccctttgacgcctcggctgagggcacctgggccggtaacggtctcggctgcgtggtgttacgtcgcctgagagatgcgctactgtcaggcgatccgattatctcggtgatcctctccagcgcggtcaacaacgacggcaacagaaaggtcggctataccgccccttccgtcgcagggcaacaggcggtcatcgaagaggcgttaatgctggcggccatcgacgacaggcaggtaggttacattgaaacccacggcaccggcacaccgttgggcgacgcgattgaaattgaagcgttacgcaacgtctatgcgcctcgcccgcaggatcagcgctgtgcgctcggttccgtgaaaagtaatatggggcatctggataccgcggcgggcattgccggactgctaaaaaccgttctggcagtcagccgcggacaaattccacccttactgaattttcacacccccaacccggcgctgaaacttgaagagagcccctttaccataccggtgtcagcgcaggcgtggcaggacgaaatgcgttatgcgggcgtctcctcctttggtattggcggcaccaactgccatatgatcgtcgcctcgctgcccgacgcgctcaacgcgcgcctccccaacacggatggcggcagaaaaagtaccgcgttgctgctcagcgccgccagcgacagcgcgttgcggcggctggcgacggattatgccggagcgctaagggataatgcggatgcccgctctctggccttcacggccctgcacgcgcgccgtctcgatcttcccttccgcctggcagcgccattaaaccgtgaaaccgctgcggcgctcagcgcctgggccggtgagaaatcgggggcgctggtttacagcggccacggtgccagcggcaagcaggtgtggctgtttaccggccagggctcgcactggcgcactatgggtcagacaatgtaccggcactcaacggcgtttgccgacacgctggatcgctgtttttccgcctgtagcgaaatgctcacgccgtcactgcgcgaagcgatgtttaaccccgattcggcgcagctggacaatatggcctgggcgcagccagcgattgtcgcgtttgaaatcgcgatggcggcgcactggcgcgctgaaggactgaagccagatttcgccattgggcattccgtcggtgaatttgccgctgccgtcgtctgcggacactatacgattgaacaggtcatgccactggtttgtcgacgcggcgcactgatgcagcagtgcgcaagcggcgcaatggtggcggtatttgcagacgaagacacgctgatgccgctggctcgtcagtttgagctggatctcgccgccaacaacggtacgcaacatacggtattttccgggccggaagcccgtctcgcgatattttgcgccacgctctcgcagcatgacattgactatcgtcgcctgagcgtaaccggcgcggcgcactccgctttactggaaccgatactcgatcggttccaggccgcctgcgcggggctgcacgcagagccggggcaaataccgattatttccacgctcaccgccgacgtcattgatgagtcaacgctcaaccaggcggattactggcgccgacacatgcgtcagccggtgcgttttatccagagtatccagatggcgcatcagctcggcgcccgcgtttttctggagatgggacccgatgcccagttggttgcttccgggcagcgcgaataccgcgataacgcatactggatagccagcgcccggcgtaacaaagaggcgagcgatgtcctcaatcaggccctgctccagctttacgctgccggcgtcgccctaccgtgggccgacctactggcgggcgatggacaacgtatcgctgcgccatgttatccgtttgatactgagcgttactggaaagagcgcgtctccccggcctgcgagcctgccgacgcagcgctgtctgccgggctggaggtggcgagtcgcgccgcgacagcgctcgatctcccccgtctggaagcgcttaaacagtgcgccacgcgactgcacgccatctacgtcgatcaactggtacaacgctgtaccgacgatgccattgaaaacggtgtggacgccatgaccatcatgcgccgtggacgtctgctgccccgctaccagcagctactccagcgcctgctgaataactgcgtggtcgacggcgattaccgctgcaccgacgggcgatatgctcgcgcccgccccattgaacatcaacagcgggaatcactgctgacggaacttgccggttattgtgaaggttttcaggctattcccgacaccatcgcccgtgccggcgatcggttatatgaaatgatgagcggcgcggaagaaccggtggcgattatcttcccgcaaagcgcctctgacggcgtggaggtgttgtatcaggaattcagctttggtcgctatttcaaccaaatcgccgctggggtattacgcggcattgtccagacgcgtcagccccgccagccattgcgtattcttgaagttggcggcggaaccggcggcaccaccgcgtggctgctgccggaactcagcggcgttccggcgctggagtaccatttcaccgatatctcggcgctgttcacccgccgcgcccagcagaaattcgccgactatgattttgtgaagtatagcgagctggatctcgaaaaagaggcgcaatcgcagggtttccaggcacagtcttacgatctcattgtggcggcgaacgtgattcacgccacccgccatattggccgcacgctcgataatctgcgccccctgctcaagccgggcgggcgtctgctgatgcgcgaaatcacccagccaatgcgtctgtttgatttcgttttcggcccgctggttcttccgctacaggatctcgacgcccgcgaaggtgagctattcctcaccacagctcagtggcagcaacagtgccgccacgccggattcagcaaagtggcgtggctaccgcaggacgacagcccgaccgccgggatgagcgaacatatcattctcgccacgctgcccggtcaggcggttagtgccgtaacattcaccgcaccatcagaacccgtgttggggcaggcgctgacggataacggtgactatcttgccgactggtctgattgcgcaggtcagcctgaacagtttaacgcccgctggcaggaggcctggcgtctgctctcacagcgtcatggcgacgatctgtctgtggaaccgcccctcgtcgccgccccggagtggctgggggaggttcgcttaagctggcaaaacgaagccttttcccgcggtcagatgcgcgttgaagcccgtcatcctgatggtaagtggctgccgctatcgcccgccgcgcctcttcctgcaccgcaaacgcattatcaatggcgctggacgcccctcaacatcgccagcgttgaccatccgcttaccttcaacttcagcgccggtatgcttgcgcgccgcgacgagctggcgcaatacggcatcattcacgatccgcacgcctcttcgcgactgatgattgttgaggagagcgaggatacgctggccttagcggagaaagtgatagcagcgctcaccgccagcgcagccggattgattgtggtcactcgccgcgcgtggcgagtcgaggaaaatgaagcgctctctgcgtcccatcacgcgctatgggccttgcttcgcgtcgcggccaacgaacagccggaacggttgattgccgccatcgatctcgccgaaaacaccccgtgggaaacgctacatcaagggttgagcgcagtctcactatcacagcgctggcttgccgcgcggggtaacaccctctggctcccttcactggcgcccaatacgggatgcgccgccgaattaccggcaaacgtgtttaccggcgataaccgctggcatctggtgaccggagcgtttggtggattaggccgccttgccgtgaactggctcagagaaaaaggggcgcgacgcatcgccctgctggcaccgcgcgtggatgagtcatggctacgcgatgtggagggcgggcaaacgcgcgtctgccgttgtgatgtgggcgatgccgggcaactggccacggttcttgacgatctggcggccaacggcggcattgccggagcgattcatgccgctggcgtattggctgacgcgcccttgcaggagcttgatgaccaccagctggccgccgtttttgcggtaaaagcgcaggcggcaaaccaactgttgcaaaccctgcgcaaccacgacggacgctatcttattctctactcttccgctgccgccaccctcggcgcgccgggtcagagcgcccatgcgctggcctgcggctacctggacgggctggcccagcagttttccacccttgatgcgccgaaaacgctctctgtcgcctggggcgcatggggagaaagcggtcgggcggccacgccggaaatgctggcgacgctcgccaaccgcggtatgggcgcgttaagcgatgccgaaggctgctggcacctggaacaggcggtgatgcgcggcaccccgtggcgactggcgatgcgcgtttttaccgacaaaatgcccccgttacaacaggctctgtttaacatcagcgccacagaaaaagccgccacgcctgtcattcctcctgctgatgacaacgcctttaacggcagcctgagcgatgaaacggcggtgatggcatggctgaaaaagcggatttcggttcagctaaggctgagcgatccggcatcactgcgcccaaaccaggatctgttacaactcggcatggactcgctgctcttccttgaactcagtagcgatattcagcactacctgggcgtacgcatcaatgcggaacgggcgtggcaggatctgtctcctcatggactcacgcagcttatctgttctaagccagagacgacgcctgccgcttcgcagccggaagtgttgcggcacgacgccgacgagcgttatgcgcccttccctttgacgcccattcagcacgcctactggctggggcgaacccacctcattggctatggcggcgtcgcctgtcacgtcctgtttgagtgggataaacgccacgatgagtttgatctcgctatactggagaaagcatggaaccagctcatcgctcgccacgatatgttgcgtatggtggttgatgccgacgggcagcagcgagtcctggcgacaacgcctgagtatcacatcccacgcgacgatctgcgcgcgctttccccggaagaacagcgtatagcgctggaaaaacggcggcatgaactgagctatcgcgttttgcctgccgaccagtggcctctttttgagctggtggtcagcgaaatcgacgattgccattaccgcctgcacatgaacctcgaccttttgcagtttgatgtgcagagttttaaagtcatgatggacgatctggcgcaagtctggcgcggcgaaacactggcgccgctcgatatcaccttccgtgattatgtgatggctgaacaggcgcgccgacagacatcggcatggcacgatgcctgggattactggcaggaaaaactgccgcaactgcccttagcgccagagctgccggtggttgaaacacccccggaaacgccacacttcaccactttcaaatcgacgatcggcaagaaagaatggcaggccgtgaaacagcgctggcagcagcaaggcgtcacaccgtctgccgcactgctcacgctgtttgccgccacccttgagcgctggagccgcaccacggcatttacgctgaacctgactttcttcaatcgtcagccgatccatccgcaaatcaaccagttgattggtgattttacctccgtcacgctggttgattttaacttctcaacgccggtgacgttgcaagagcagatgcaacagacccaacagcgcctctggcaaaacatggcgcacagtgaaatgaacggtgttgaggtgatccgtgagctgggccgcctgcgcgggtcacaacgtcaaccgctgatgccggtggtgtttaccagtatgctggggatgacgctggaaggcatgactatcgatcaggcaatgagccatctgttcggcgaaccctgctatgtgttcacgcaaacgccgcaggtctggctggatcatcaggtcatggagagcgacggcgagttgatgtttagctggtactgcatggacaacgtgctggaacccggcgctgccgaggcaatgtttaatgactattgcgccatcctgcaagccgtcattgccgctcctgaaagcctgaagactctcgccagcggcatcgccgggcacattccccgtcgacgctggccgctgaacgcacagacagactacgacctgcgggatattgagcaggcgacgctcgaataccccggcatccggcagaccagagcggaaatagccgaacaaggcgcgttgacgctggatatcgtgatggccgatgatccgtcgccatcagcggcgacgcccgatgagcacgatctcgcccaactggcgctgccgttgcctgcgcaggtgcagcttgatgaactggaggcgacctggcgctggctggaggcgcgtgcgctacaggggatcgcggctacgctaaatcgtcacagcctgtttaccacgccggagatcgcccatcgctttagcgcaatagtacaggcgctgtccgcgcaagcatctcaccagcgtctgctgcgccagtggctacagtgtctgacggaaagagagtggttaatccgcgagggtgaaagctggcgctgccgcgttccgctcagcgagattcctgagcctcaggaagcgtgcccgcaaagccaatggagccaggcgttggcgcagtatctggaaacctgcatcgcccggcacgacgccctcttctccgggcagtgttcaccgctggaattgctgttcaacgagcagcatcgcgtgaccgacgcgctgtatcgcgacaaccccgccagcgcctgtctgaatcgctatatcgcgcagattgccgccttgtgcggcgcagaacggattctggaggttggcgccggaaccgcagccactaccgcgccggtactgaaggccacgcggaacacgcggcagtcgtaccacttcacggacgtctccgcacagttcctcaatgacgccagagcccgtttccatgatgaatcgcgggtgtcttatgccttattcgacatcaaccagccgctggatttcaccgcccacccggaggcgggttacgacctgatcgttgccgtcaatgtgctccacgacgccagccatgtcgtccagacgttgcgcagattaaaactgttgctgaaagccggcggacgtttgctgatcgttgaagcgacggagcgaaacagcgtattccaactggcgagcgtgggctttattgagggattaagcggataccgcgatttccgccgccgggatgagaaaccgatgctcacccgctccgcatggcaggaggttctcgttcaggccgggtttgcaaacgagctggcgtggcccacgcaggaatcgtcgccgctgcgccagcatctgctgctggcgcgttcgcctggcgtaaatcgcccgaataaagaagccgtgagccgctatttacagcagcgctttggcatcggtctgcccgttttacagatccggcaaagagaaacgttatttacgccgcagcatgccccgtctgatgcgctgattgagccacccaaacccacgccagttgccggggggaatccggcgctggaaaaacaggtggctgaactctggcaatcgctgctgtctcgccccgtggcaaggcatcacgactttttcgaactgggcggcgacagcctgatggcgacaaggatggtcgcgcagctaaaccggagagggattgccagggctaaccttcaggatctgttcagccattcgacgctgagcgacttctgcgcccatctacagacggctacgtcaggagaggacaacccggttcccctttgtcagggcgacggcgaggaaaccctgtttgtcttccacgcttcggacggcgatatcagcgcctggctaccgctcgccagcgcgctgaacaggcgcgttttcggcctgcaagcaaaatcgccgctgcgctttgccacgcttgaccagatgatcgatgagtatgtcgggtgcatccgtcgccagcagcctcacggcccttatgtgctggcgggttggtcgtatggcgcgtttctcgcggcgggtgccgcacagcgcctgtacgccaaaggcgagcaggttcgcatggtgttaatcgatcccgtgtgccgacaggatttctgttgcgacaaccgggcggccctgctgcgcctgttagccgaagaacaaacgcctctggcgctacccgaacatttcgaccagcagacgcccgacagccagcttgctgactttatcggtctcgctaaaacggccggtatggtgtcgcaaaacctgacgctgcaagcggcagaaacgtggctcgacaacatcgcgcatctgctgcgtttactgactgagcatacgccgggcgaaagcgttccggtcccctgtctcatggtgtatgccgccgggagacccgcgcgctggacgccagcagaaaccgagtggcagggctggataaacaacgccgacggctatgtgattgaagccagccactggcaaatcatgatggaagccccccacgttcaggcttgtgcgcaacacattacgcgctggctttgcgcaacctcaacgcaaccggagaacacgttatga

SEQ ID NO: 377534 - DNA, 6108 bp, Salmonella enterica
atgatttctggcgcaccatctcaggattcgctgttaccggacaaccgccacgcggctgattaccaacaattacgcgagcggcttatacaggaactgaatttaacgccgcagcagttacatgaagagagcaatctgatccaggccggcctggattccataaggttgatgagatggttacactggtttcgtaaaaatggctaccgccttacccttcgcgagctgtatgccgcccccacgctggcggcatggaaccagttaatgctcagccggtcgccggagaacgcggaagaagaaacgctgcccgacgaatcatcctggccgaatatgaccgaaagtacccccttcccattgacgccggtacagcacgcctacctgacgggccgcatgccggggcagacgcttggcggcgtgggttgccacctgtatcaggagtttgaaggccattgtctaacggcgttgcaactggaacaggccatcacgaccttgctgcaacgccacccaatgctgcatatcgcctttcgccccgacgggcagcaggtctggctaccgcaaccttactggaacggcgtcaccgttcatgatttacgccataacgacgctgaaagccgtcaggcctatctggaagtactgcgccagcgcctgagccaccgtcttttacgcgtggaaatcggcgaaacgtttgattttcagttgacgctcttgccggacaatcgccaccgcctccatgtcaatattgacctgctgattatggatgcctccagctttacgcttttcttcgatgagcttaacgccctgctggccggagaatcgctgtcggctatcgacacccgctatgatttccgttcgtatttgctgcaccagcagaagatcaatcaaccactgagagacaacgcacgcgcttactggctggcgaaagcatcgacgcttccccccgcacccgtcttgccgctggcctgcgaacccgccacactgcgcgaagtccgtaatacccggcgccgcatgattgtcccggcaacatgctggcacgcctttagcaaccgggccggcgagtatggcgtgacgccgacaatggcgctggcgacctgtttttctgccgtgctggctcgctggggcggcctgacgcgtctgctgcttaacatcaccttattcgaccgccagccgctgcacccggcagttggcgcgatgcttgccgatttcaccaatattcttctgctggataccgcctgcgatggcgataccgtcagcaacctggcgcgtaaaaaccagctcacgtttacggaggactgggagcatcgccactggtccggcgtcgaattactccgtgaactcagacgccagcagcgctacccccacggtgccccggtggtatttaccagcaatctgggacgttccctctacagcagccgcgcagaatcgccgttgggcgagccggaatggggcatctcgcaaacgccgcaggtctggatagatcatctggcgttcgagcatcacggcgaggtctggctgcaatgggacagcaacgacgcgctgttccctccggcgttagtcgaaacgttgttcgacgcctactgccagttgattaaccaactctgcgatgacgagagcgcctggcaaaagccgtttgcagatatgatgcccgcccgccagcgcgcgatacgcgaacaggtcaacgccaccggtgcccccattcccgaaggcttgctgcatgaaggcattttccgtatcgctctgcaacagccgcaggcgctggcggtaacggacatgcgttatcagtggaattattatgagctgacagactatgcccgccgttgcgcgggcaggttaatcgagtgtggggttcagcccggcgataatgtggctatcacgatgtcgaaaggcgcaggacaacttgttgcggttctggccgccctgctggccggggcggtttacgttccggtttcgctggaccagcctgccgcacggcgcgagaaaatctacgctgacgccagcgtccggctggtgctcatttgccagcacgacgccagcgcctggtcagacgatattcccgtccttgcctggcagcaggccattgaggcggagccgatcgccaacccggtggtacgcgcccccacgcaaccggcctacattatctacacctccggctctaccggcacgccgaaaggggtggtcatttctcaccggggagcgctcaacacctgttgcgatatcaatacccgctatcaggttggccccggtgacagggtgctggccctctccgccctgcattttgatttatcggtttacgacatttttggcgtactgcgcgcgggcggcgcgctggtgatggtgatggaaaatcaacggcgcgatcctcatgcatggtgtgagctgatccagcgccatcaggtcacgctctggaacagcgtcccggcgctgttcgatatgctgctgacctggtgtgaaggtttcgccgacgccacgccggaaaatctgcgcgcagtgatgctttccggcgactggatcgggcttgacctccccgcccgttatcgggccttccggccacaaggacaatttatcgcgatgggcggcgctaccgaggcgtctatctggtctaacgcctgcgaaattcacgacgtccccgcccactggcgttccatcccttacggtttcccgctaaccaaccaacgctaccgggtggtggatgaacggggccgggactgccctgactgggtgccgggcgaattatggattggcggcatcggggtcgcggaaggctatttcaacgatcccctgcgcagcgagcagcaatttttgacgcacccggacgagcgctggtatcgcaccggcgatctcggctgctactggccagacggcacaatagagttcctcggtcgtcgcgacaagcaggtcaaagtcggaggatatcgcatcgagctgggcgaaatcgaaagcgcactcagccagttggcgggggtgaaacaagcaaccgttctggcgatcggcgaaaaagaaaaaacgctggcggcatacgtggttcctcagggcgaggctttttgcgttaccgatcatcgggacccggcactgccgcaggcgtggcacacgcttgcgggaacgttgccctgttgtgctatctcgccagagatctccgcagaacaggtagccgatttccttcagcatcgcctgttaaaactgaagccgggtcacaccgctggcaccgatcctctccccctgatgaactcactcgctatccagccgcgctggcaggccgtggtggaacgctggttagcatttctggtgacgcaacggcgactgaagcccgctgctgaaggttatcaggtctgcgctggtgaagaacgcaaggatgagcacccgaatttcagcggacatgatttaacgttatcgcaaattcttcgcggcacccgcgacgaactgtcgttactgaacgacgtgcagtggtcgccggaaagcctggccttcaaccatccggccagcgccccatatattcaggaactggcgacaatttgccaacagcttgcacagcgcttacagcgcccggtacgcctgcttgaggtgggaacccgcaccggccgcgccgcagaatcgctgttagtacagctcaacgccggacaggttgagtatgtcgggcttgagcagagccaggagatgctcctgagcgcccggcagaggctcgtcccctggcctggtgcccgtctgtccccctggaatgcagacacgctggcggcgcacgctcactcggcggacattatctggcttaataacgccctgcatcgtctgctgccggaagatcccgggctccttgcgacattacaacagcttgccgttcccggcgcgctgctctacgtgatggagtttcgccagttaacgccgtccgccttgctcagcacgctcctgttaaccgatggacagccggaggccctgctgcataacagtgccgactgggcggcgttatttagcgcagccgccttcaactgtcagcatggcgatgaggtcgcggggttacaacgcttcctcgtacaatgtcccgatagccaggtgcgccgcgatccccgtcaacttcaggccgccctcgccggacgcctgccggggtggatggtgccgcaacggatcgtcttcctcgacgccttaccgctgacggctaacgggaagattgactatcaggcgctgaagcgtcgtcatactcctgaagcagaaaaccaggccgaagcggatttaccccagggcgacattgaaaaacaggttgccgccctctggcagcaactcttatcgactggcaatgtcaccagagaaaccgacttcttccagcaaggcggcgatagcctgctggcgacccgtctgaccggacaacttcatcaggcaggttatgaagcgcaattaagcgacctgtttaatcatccccggctggcggattttgccgccacgctgcgtaaaatcgacgttccggtcgaacaaccattcgtccacacccctgaagatcgctaccagccctttgcgcttaccgacgtgcagcaggcttacctggtggggcgtcagccgggctttgccctgggcggcgtcggctcacatttctttgttgaatttgaaattgccgatctggacctcacccggctggagacggtctggaaccgattaatcgcccgccacgatatgcttcgagccgtcgtacgtgatggacagcaacaggtgctcgaacagacgccccactgggtgataaccgcacacaccctccatacgcctgaagaggcgttgcgggtgcgcgaaaaactggcgcatcaggtactcaaccccgaagtgtggccggtattcgatctccaggtcggatacgtggacgggatgcccgcccgcctgtggctgtgtctggataacctgttgcttgacggtctgagcatgcagatcctgctggcggagctggagcacggctaccgctacccgcagcagttgcctccgccgctgcccgtcaccttcagggattatctgcaacacccctcgctacagtcgcccaatccagattctctggcatggtggcaggcgcagcttgatgatattcctccggcgcctgcgttgccgctgcgctgcttgcctcaggaggttgaaacaccgcgcttcacccgcctgaacggcgcgctggacagcacgcgctggcatcgtctgaaaaaacgggcggctgacgcccatctcaccccgtcggccgtactgttatcggtgtggtcaacggttctctctgcatggagtgcgcagcctgagttcacgcttaaccttacgcttttcgacaggcggccgctgcacccgcaaatcaaccagattctgggcgatttcacctcgctgatgctgctgagctggcatcccggcgaaagctggctgcacaccgcgcagtcactacagcagcggctgagccagaacctcaaccaccgcgatgtgtcggccatccgcgtgatgcgtcaactggcgcaacggcaaaacgtgccagccattccgatgcccgtcgtctttaccagcgcgctgggctttgagcaggataacttcctcgcccggtgtaatctgctcaaaccggtctggggcatctcccagacgccgcaggtctggctcgatcaccaggtttatgaatccgaaggcgaactgcgctttaactgggattttgtcgccgcgctgtttcctgccgggcaggtggagcgccagtttgaacagtattgcgcattgctaaaccgaatggccgaggatgaaagcggctggcaactgccgctcgccgtgctggtgcctcccgttaaattcgcagggcaatgcgcagagcgctcaccgcgcgtatgccctgagcactctcagccacacattgcggcggacgagagcaccgtcagcctgatttgcgacgccttccgcgaggtggttggcgagtctgtcacgcccgcagaaaacttctttgaggcgggcgcaacgtcactgaatctggtgcaactacacgttttgttacaacgtcacgaattttccaccctgacgttgcttgacctcttcacccacccttctcctgccgccctggccgattatctggccggcgtcgccacggtggaaaaaacaaaacatcctcgccctgttcgccgtcgtcagcggcggatatag

SEQ ID NO: 377535 - DNA, 960 bp, Salmonella enterica
atgacggagtcaccgcaaacgcaatctgaaatctctattcaccagttggtggttgggaaacctgcaaacgatggcaatattcctgctcagtgtgaactgctgcgctgttcgttgcaggaaggtatggatattttgctctggaggggccattttgcgcggcctgagacgttgcagctacacgacgatctgggcaggattaacttctcgtgcatcctggaaggcacatcacgctttgcaattcagggactcaggcgccacaccgactgggagcttgcgcgcaatcgccattacattacccatacaccagactgccgcggcagcgcctcctattgtggccgattcgagagcattaccctttccttcagtcctgaaaccctcgcgcagtgggtgccggatattaacgcggtcattaagaataagatcgactcccaatgctgttgccagcagcagcgttgtaatgctgaaacccacttaacggctcagactttgcgtcacgcgctgatgcgcatgcacggcggcttcagccatgaacaaaagccgtcgacgctatggttgcaggggcaaagtctggtcatgctcagtctggtgctggatgaacatcgcgaagacgccagttgcctctcctgccacttcaacccgatggaacgccagaaactgctgcgggcgaaggatctgctgctggctgatctgacgcaagcgccgggcgtcgcggagctggccagagagtccggtctgagcgttctcaaaattaagcgaggcttccgcgttctgttcaacaacagcgtctatggcctgtttcaggctgaacgaatgcaggaagccagaagacgcctggccaacggcaatacctccgtcatgacggtggcggccgatctgggctatgccaacgccagccatttctctaccgccttccagaaacagtttggcgtaaccccttcgacctttaaacgcgtgatgtaa

SEQ ID NO: 377536 - DNA, 1803 bp, Salmonella enterica
atgtcatctcaatcatccaacactgaatcgctgtcccgatttcctctctggcaggtgattacaccggttcgccggaaggttattttagctatggcgctggcggggctggcggcattaaccagcctgggagcgctcctttttctggcgtggagcctgcgcgaccttcgcgcgacgcctgacgctattccggcctggccgctgggcggcgtgatcggctgcgtggtcttaacttttgttctgcgcttgcaggcgttcaacacctctcattacgcggcttttcatctggagaatattctgcgcagcaggttagcccgtaaagcattgcagcttccgcctggcgtgttacagcaaatggggagtgggtcagtggcgaaagtgatgctggatgacgtgaagtcactgcatatctttgtggccgacagcacgccgctctatgcccgcgcgatcatcatgccgctggcgacaatcgttatcttgttctggctggactggcggctggcaatcgcgacgctgggggtactggcgtttggctcggttgttctcgtgctcgcccgccagcgttcggaagatatggctcagcgttatcataaggcgcgcgagcaggtcagtgcggcggttattgagtttgtgcaggccatgcccgtggtgagaacgtttgatagcggcagcaccagttttttgcgctatcaacgcgcccttgaagagtggggcgatgtgctcaaaacctggtatcgcaaagccggtttttcagcgcgtttttccttctcgattctgaatcctctcccgaccctggttgtcctgatctggtcggggtacggcctgttgcactatggcagtctcgattttactgcgtgggtggccgttttactgttgggcagcgggatggccgaagccgtgatgccaatgatgatgctcaataacctggtcgcgcaaacgcgtttaagcattcagcgtatttatcaggtactcgcgatgccggagttatcgctgccgctgtccgaccagcagccgaaagaggcgaacattacctttgagcaggtgagctttcattatccgcaagcgcgtactggcgccgcgttgcaggaggtaagctttcatgtgcctgccgggcaaattgtggcgctggtcgggccaagcggcgccggaaaaagcaccgtggcgcgcttgctgctgcgttacgccgatccagacaaaggccatatccgtattggcggcgtggatctgcgcgatatgcagacggacaccctgatgaagcaactctcgtttgtgtttcaggacaacttcctttttgccggcacgatagccaataacattcgtctgggcgcgccggatacgccgctggaggcggtaatagcggcggccagagtggcgcaggcccatgattttattagcgtgttgccagaaggttacaacacgagagtcggggaacgcggggtatttctctccggtggccagcggcagcgcatcactattgcccgggcgattttgcaggatcgccccatcctggtgctcgatgaggcgacggcgtttgctgacccggaaaacgaagcggcgcttatcaaggcgctcgcggcggccatgcgcggccggacggtcatcatggtcgcgcatcgtctttcaatggtgactcaggccgatgtgatattgctgttttccgacggacagctcagggaaatggggaaccatacgcaactgttggcgcagggcggcctgtatcaacggctctggcaacactatcagcaggcgcagcattgggtgccgggtggaacacaggaagaggtggtggaaaatgaaagacaataa

SEQ ID NO: 377537 - DNA, 1803 bp, Salmonella enterica
atgaaagacaataatcctgcggataacctggcctggcgcgtcatctggcgccagcttatctccagcgttggcagtcaggccaggatgctgaggcgcagtatgctggcgctgttgctggcagcattcatgcaggggattgcctttgcctgtctttatccgatcattgatgcgctgttacggggagacgcgccgcaactccttaactgggctgtggccttcagcgttgccactattgtgacgctggcgctacgctggtatggcctgggctttgaataccgtggtcatctggcgcaggccacccatgagttgcgcctgcgacttggcgagcaattacgccgcgtgccgctggagaagctccagcgcggcagggcgggcgagatgaatgccttgctgctgggcagcgtggatgaaaacctcaattatgttattgcgatagccaatattttgctgctcaccattatcacgccgctgacggcgtcgctggcgacattgtggatagactggcggctggggctggtgatgttgctgatcttccctctgctggtgccgttttattactggcgccgcccggcgatgcggcgacaaatgcagacgctgggggaagcgcaccagcgactgagtggcgatatcgttgaatttgctcaggggatgatggtattgcgcacctgcggcagcgatgccgataaaagccgggcgctgttggcgcatttcaatgcgctggaaaacttgcagacccgcactcaccgtcagggcgctggcgcgacgatgctgatcgccagcgtcgtggagttgggcctgcaggtggtggtgttatccgggatcgtctgggtggtgacgggcactctgaatctcgcctttctgattgccgccgttgcgatgattatgcgcttcgcagaaccgatggcgatgtttatcagctacacctcggttgtggaactgatcgccagcgccctgcaacggattgagcagtttatggcgatagcaccgcttcccgtcgcagcgcaaaacgagatgccggaacgttacgatatccgctttgacaacgtcagctatcgctacgaagaaggcgacggtcacgcgcttaataatgtttctttgacgttcccggcagccagtatgagcgcgctggtgggtgcctccggcgcaggcaaaaccacggtcactaaactgttaatgcgctatgccgatccgcagcaagggcagatttctattggcggcgtcgatattcgccgcctgacgccggaacagctcaatagcctgatttctgttgttttccaggatgtctggctgtttgatgacacgctgctggcgaatatccgtatcgcgcgcccacaggcgacgcgacaggaggtggaagaggccgcccgcgcggcgcagtgccttgagtttatttcccgtcttccgcaaggctggctgacgccattgggggagatgggtggccagctatcgggcggcgagcgccagcggatttccattgccagagcgttattgaaaaacgcgccggtcgtcattctcgatgaaccgaccgccgcgctggatattgaaagcgagctggcagtgcaaaaagcgatcgataacctggttcacaaccggacggtgattatcatcgcccaccgtttatccaccatcgccggggccggaaacattctggtgatggaggagggacaggtggttgagcagggtactcatgcgcaattgctctcccgtcatggacgttatcaggcgctgtggcaggcgcaaatggccgcgcgcgcgtggcgcgacgaaggggtttccgcgtctggagagtgggtgcatgagtga

SEQ ID NO: 377538 - DNA, 1281 bp, Salmonella enterica
atgagtgatgttcagtcgaatgttaaaccgctgacgttgacgaccgggcgagtgatttttgctattgccggcgtctatgtgacgcagagcctggtatcggcgctgtctatgcagtccttacccgcgttggtgcgcgttgctggcggttcgctggcgcttgccggtgcgacaaccctgtttatgctgccctgggcgctgaagtttatttgggcgccgtggatcgaacgctggcggcttccgcccggtagcccggaacgccgttcccgcatgttaatcctgcgtggtcaggtcgcgctagcggcgatcctgacgattgccgcagcgattggttggtttgggcgagaacggggatttcccgatacgcaaatcgtcgcgttatttgttctgtttatggtggcaggtacggtcgcctccaccatcgatatcgccagcgacggcttttgcgtcgatcaactgacccgtgcgggttacggctggggaaacagcgtgcaggtcggcggcagctatctgggaatgatgtgcggcggcggggtgttcctgatgctgtcggcagcatccggctggcctgtcgccatgctgatgatggcggtgctgattatggcgctgtcactcccgctgtggcgcattacggagccgacgcgaacagagactatcccgcatgttccggcgttaggttatgcgctaaggaggaaacaggcgcgcctgggcttattgctggtattgatgctgaattcaggcatgcggtttgtgctgcctcttctggcaccgctgttgttggatcatgggttaagcatgtccgcgttgggcgcgctgtttagcggcggcaatattgcagcgggcatagcaggaacgctggccggtggattgctgatgaaatacacctcacccggcagagcgctgttgacggcttatggcgtccaggggatcgcgctgctggcggtggtgatgacgctcatgatggcgccgggtcatctgttgccgccgattctccagtgtctggtcattgtccagtccatttcgctggcctgcgcgctggtctgtctttacgccacgctgatgtcgctttcatcgcctttgcaggccggtgtcgacttcaccctctttcaatgtactgacgcggcaatcgccattctggcaggcgttatcggtggcgttgttgctcaacattttggctatgcggcctgcttcctgtttgccggggcattcacgttgttggcggcgtgggttgcttatatccggctgcattcggcaagagaactgatgacaagcgcaattgattga

SEQ ID NO: 377539 - DNA, 1317 bp, Salmonella enterica
atgaaaatcagtgaatttttacacctggcgttaccagaggaacaatggctgccgacgatttctggcgttttacgccagttcgcagaagaagagtgttatgtctatgagcgccaaccctgttggtatttaggcaaagggtgccaggcacggttgcacattaatgccgatggaacgcaggcgacatttattgatgataccggggagcaaaaatgggcggtggattccattgccgactgcgcgcgtcgttttatggcgcatcctcaggtgaaaggacgtcgggtatatggacaggttgggttcaactttgcggcgcatgcgcgggggattgcctttaacgccggggagtggccgctactgacgttaaccgttccccgtgaagaacttatttttgaaaagggaaatgtcaccgtttatgcggactccgccgacgggtgccgacgtctgtgcgagtgggtgaaagaggccggtacaacgacgcagaacgcaccactggcggtggataccgctctcaatggtgaggcgtataaacaacaggttgcacgcgccgttgcggagctccgccgtggcgagtatgtcaaagtgattgtctcgcgcgctattcccctgccatcgaggattgatatgcccgccacgctgttatacgggcggcaggcaaacacgcctacgcgttcgtttatgttccgtcaggaaggacgcgaagcgctgggctttagcccggaactggtgatgtcagtgacgggcaataaagtggttactgaaccgcttgcgggcacccgcgatcgcatgggaaacccggagcataataaggcgaaagaggcagaactgctgcacgacagtaaagaggtgcttgagcatatcctttctgtcaaagaagctatcgtcgaactggaggccgtttgccagccgggcagcgtggtggttgaagatttaatgtcggttcgccagcgcggcagcgttcagcatctggggtctggcgtgagcggtcagcttgcggaaaacaaggatgcctgggatgcgtttaccgtgctgtttccgtctattaccgcctcaggcatccctaaaaatgctgctctgaacgcgattatgcaaattgagaagacgccgcgagagctttattccggcgcaatcctgctgttggacgatacgcgcttcgacgcggcgctagttctgcgttccgtatttcaggacagccagcgctgctggatacaggcgggggcgggaatcatcgcgcaatctacgccggaacgcgaactgacggaaacccgggagaaattagcgagcattgcgccctatttaatagcggcagagcaggggtag

SEQ ID NO: 377540 - DNA, 1305 bp, Salmonella enterica
atgcagtttgtatttcatattggaaatcatagctgtcatatatcggaaaaccatctaagagatattgttgataataaaagagaatacattttttcaacatgtgagcgatttatagattttttcaggaatatattcaccaatcgcagtttaatttctgagtataaagaaatatacaatcttttgtgccaaaataaagagcatcccgatattaagggacctttctcgccaagaccattttcaacacgagatgaagactgtacacgatggcgaccccttctcggatatgttaaacttattgatgcctccagacctgaaacaatagataaatacactgtagaagtattagcacatcaagaaaacatgtcactgttaaaattatattacgatgggatattaatttccgagacagagtgttctgagcgttgtctcggttttttaaaagaaacgatgtttaattacaatacgggtgagattacgcttgctgctttgggtaatgatagcctgacgctgagcgaagcaggtgggaatgggcgctatgacgcttttgagcaacgtttgatagagtacttgtcaacgctgcctggggcgtcaggcgatgatcgcggcgctattgatcaggtggattcccaacaaccagcgccgatagaggtgtttattacctcgcaagagtttaagaaaaagatttgcatatctgatattgaaaaaaataaaataggtagcggaagctatgggacagtttatttattaaatggtaaatatgttattaaggttccaattaacgaacagggggtaaaaatcgattttacctctccagaacattgtaattgtcatccagagcgtgttagtaagtatttgaatatagccaatgacgataagaatttttctcggtctgccaccatgaatattaatggcaaagatgtcatggttttagtttcaaaatacattcagggtctggagttcgatattgaagatgacgagaactataatagggctgaggcacttcttgaatccagaggtgtttatatgcatgatatgaacgtttttggtaatattctggttaaagaaggggggcttttctttgtagatggtgatcagatcgtgccttcaaaagaattccggcatcagcggagagtttctcttgcaacagcgcaactggaagaacaaattaaggcccgtcacatggtaaaattaaagcaggccgagaccgaaggaaatgctgaagatattgaatattatagttcacttattacggatattaatgaattaatcggagagaaaacgcgccaggaagacgttttaaactag

SEQ ID NO: 377541 - DNA, 708 bp, Salmonella enterica
atgcgctattttttcattgcagaaccgataaggggaatggaaggggatttactgggcgttgaaattatcactcgttttgcatcgtcgctctctcgtccgctgcaccctgagtttgttatttcgtcatgggacaatacgcagaagcgttattttctgctcgatctactgcggactatcgctggcaaacgtcgctggtttctacgccacggcttgttttgtaccatcaatatcgatcgggatatggcgaagcttgtccttcaggacaaagacattcgcgcgttactacacgccatgctatttatggggctgcaggtcgcagaacatttttcatgtcaagataacgcctcagtcgaaccctggattaacatgcttcataagcaacctaacccattatggctgggcgacctgggcgcagggaacgcgaccgcggcaccattagtttgcgggtgttttagcggcgtaaaacttgatcgtagttttttcgcctcacaaatcgaaaaaacgacgtttccactgcttgtcaaacatatccggagctattgtgacaaaattgttgtggacggtctggaagactcacgctattttccgacgttaaaaacggcaggcgtttgggcaatccagggcacgttgtttccttccgttgcgttagaagaggttgaaacactactgttgggcagtcgcgtgaacaccctcagagagtcgatctga

SEQ ID NO: 377542 - DNA, 375 bp, Salmonella enterica
atgattgtagatcagacaaccaaggctcactggcttagtctttttgatggaatggggagaaggggcgttaccgggcaaatgcttggatcaatgcagcgtacattccgcttctgttctaatagaggagtaattaatgtaaaccctattgagaacctgaggcactcaggcgtggggcttactgcagcagttaaagatcgcaaattgagcgatgaggaaagtaaggcggtttggaatgcgctgtcagaaatgaaagaccggcagcaattgataatgaggttccttatccttactggttgcaggagtacggaaatcagaacggcgaagtgggagtggtttgattttcaggataaaacatggacccattccggccagtga

SEQ ID NO: 377543 - DNA, 993 bp, Salmonella enterica
atgaaaatttcatctcctacgccttgtttaaactttgctccacagaaagaatattctgctgccgttgttccgcatccttcaaagaatgcctatgcggattacgttttggagacaggtaagcgaataccgttttccgccgcagatttaagcaacctctaccaaagtgtcatttacgctgtccacagcagtcgtagcaggctcatcgatcagcacacggccgatatgatcggtaacactgtacttgatgccttaagccgatcacagacctttcgtgatgccgtcatctatggcatccataataaggaagtgcaacttggctgcattacatacagaaacgaatacgagatcaacgaagattcccccgtcggggttgattctattcacttactgacgcatagcgaattgtatgaatacgaggttggtcaagagccaattttgcctatttgcgaggcgagaaaagatgaacacgaggaagcctatatcagttttagtgtggcgccagacagtgactcgtgcgagatgccgtcatggcaggaaggactgattcacgagatcattcatcatgttactggagccggcgatccattagaagatggtaatattgagccaggacccactgaaattctggcacgtcgtgtagcacaagaattgggatggttaatccctgaattcacagggtatgcttccccggatcgtgtagctcatcttaggacgcgcgatcttaatacccttcgccaaacggcaacacggcatgaagataatgaggtggcttttttcgaaaggctggatgtgattagcgatggatacgaggcaagcgctgatttcacagagtatcctgttatgtctgacatggtgaaagagctgaacaaaccacatgattttcccgggttagttatcaatgataatacaatggatgcagacccagaccagatccaactttatcatggtcaaccttatattttcaccttcgtagacaaacataatcagcgctga

SEQ ID NO: 377544 - DNA, 216 bp, Salmonella enterica
atgagaattgagcttgttatcagccggacaaaacagcttgcggaaggtgctgttcctgtacttgaaaaagaattaatgacttgtctccagaatttaaccatccgtcgaggcagtcaggatggtctgagtatcgtcggtgctgctgatggcgataaaaaacgtatacagagcattctgcaggaaacgtgggaaagcgctgacgactggttttattaa

SEQ ID NO: 377545 - DNA, 231 bp, Salmonella enterica
atgactgaaaacataaagacatatttttcatcacagactgactgtccgtattccagaacgaaatatatcggttgtggggagtacaggacatattgcgtaaaatcagctaatgcagacagcagtaacaagtattgggatggctcacacactaatatactgcatgtcggttcgcatgatcatactgtatacctgaatacagaatatttatccggaataaaaaatgacgcttaa

SEQ ID NO: 377546 - DNA, 144 bp, Salmonella enterica
atgacgcttaaaatgagtgataccatacagataattaaaatttataatctgcgttcagatacaaacgaatttattggcgcaggtgatgcatatatcccgccgcgcactggattaccggcaaattgtccttatagcccctcctga

SEQ ID NO: 377547 - DNA, 1554 bp, Salmonella enterica
atggatattgtaggcggacaacacttacgtcagatgtgggacgacctggccggaatatatgaagacaaaacggcgttaatttttgaatcctgcgcgggagaaggacaacacttcagctatgccgcactgaatagagagatcaatcgcacggcaaaccttttctattccttaggcgtacgtaaaggcgacaacgttgctttgcatctggacaattgcccggaatttatcttttgctggtttgggctggcaaaaatcggcgccatcgtcgtgccgattaatgccagattattgcgcgaggagagcgcctggatactgcaaaatagccggacatcgttactggtcaccagcgcgccgttttatccgatgtatcgtcagactcaacaggaagggcacacgccgctcaggcatatttgtctgatcggcgcgacgtttccggtcgaagaaggcgttagccactttcacacgctgaaagcgcagcagcccgacgtcctgctttatacgccgccgttaacgcctgaggataccgcggaaatcctttttacctccggcacaacgtcccgcccgaaaggggtagtgattactcactataatttacgttttgctggctactactccgcctggcaatgcgcgttgcgcgaagatgatgtttatctaaccgtcatgcccgcctttcacattgactgccagtgtacggcggcgatggcggccttttcagcgggcgctacgtttgtgctgatcgaaaaatacagcgcccgcgccttctggggacaggtgagaaaatattgcgcgaccgtcaccgaatgtatcccgatgatgatccgaacgttaatgacgcagccgcccgccgctgacgatcgtcaccactgtttacgcgaagtgatgttttacctcaacctctccgtgcaagagaaagaggcatttatcgaacgcttcggcgtccgactgctcacctcttatggtatgacggaaaccatcgtcggtattatcggcgaccgccccggcgataagcgacgctggccgtcgattggtcgtccgggtttttgctatgaagcggagattcgcgatgagcaaaatcgtgcgttgcctcccggcgaaatcggggaaatatgcgttaaaggcattcccggtaaaacgctttttaaagcctatttcgaacgcccggacgctacagccaaagcgcttgagcctaacggctggctgcataccggcgattccggctatcgggatgaggaagggtttttctatttcgtcgatcgtcgctgcaacatgattaagcgcggcggagaaaatgtctcttgcgtcgagctggaaaatatcatcgccgggcatcctaaaattcaggatatcgtggttatcggtattaaggatgatattcgtgatgaagctattaaagcgtttgtggtactcaatgaaggtgagacattaaccgaggaagatttttttacgttttgtgaggcaaatatggcgaaatttaaagtaccgtcatatctggaaataagaaaagatttgccccgtaattgttcagggaaaatcattaaaaaaaatctgaaataa

SEQ ID NO: 377548 - DNA, 495 bp, Salmonella enterica
atgatgcgccggatattatcggtattactggaaaacgaatctggggcgttatcgcgggttatcggcctcttttcgcaacgcggatataatattgaaagcctgaccgtcgcgccgacagacgatccgacgttgtcacgcatgacaatccagacggtaggcgatgaaaaagtgcttgagcaaattgaaaagcaactgcacaagctggttgatgtgctgcgcgtcagcgagctgggacagggagcgcacgttgagcgggaggtcatgctggtgaaaatccaggccagcggctacggacgagaagaggtgaagcgtaatacggaaattttccgtggccagattattgatgtcacgccaatgctgtataccgtccaactggcgggcaccagcgataaactggatgcttttctggcctcgctgcgagacgtggcgaaaattgttgaagtggcgcgttcaggcgtcgtcgggctttcgcgcggcgataagattatgcgctga

SEQ ID NO: 377549 - DNA, 141 bp, Salmonella enterica
atgaaagcagcggcaaaaacgctatacgcgaaagcattcatggtgcatcaaagcggcaagcgtatgaatcctcaggagcttactcaggtaagtgacaggggcgagtatgcgcaggcaacgcagaggcagcttgaaggatga

SEQ ID NO: 377550 - DNA, 1275 bp, Salmonella enterica
atgatgattttctctctaatatctgccgtaaacgatggtgtgttattacctgcgcgcgctcattttcctttagatgagaataagttcgttgagcctgttattattggaggcgatgaagaacgaacagtgcaatttggtatgttacttgaccagcttaaactttatccacatgaaacagcagatccattgtgcgtttctataaacgcggtgaccccatgctgcggtgagagtaatgcctaccaattggcggtatctacagggcagctccctttgtatgtctctgagattagtgaattgatgaaagattttctttatcaacatgtcgttgatgccaatggttatgtaaaaatgactttccccgatatatgtaatgggctgaattcgttatggagaacgttcgctgaagaaaatttaagtggaactttaaaagctgaaaaggttctgtgttcgccttatatcatgcctgtatctgtgctgggagaaacgagttctcttgaagaagagaaaatgacgttgaaggatgtgatgaatttcaagaaaatacaatctgccttcaagcacgagttgcactccattcagaaatcgttaaacgtgcttaataaccatgaagctgttgagcgttttaaagagaataaaacgctcgaactcttgttgcaaacgggggtacacactgggattggtatcgctggtggcgtgttgggcgctgtcatcggcacggcaatcgttcccggcttggggacgttcatcggcgcggggattggcgcaggattagcgtgggcaggtaaaaagctttacgattatgccgcaggcgttgtaagcaataaaataaatcctaacccgcatttaaaaaaccaggaaattgaccggaaaataaaatctgccgagaaaggtaccgtctgggagtgtggggcaaaaataaagtcactcgttgtggaaccctcgcgggcgggcggtatcctcgtggctagccttatctcttcagtaataaaaggggtctcgttacctattcatgatatagccactgcttgttatgattatgaaagagccagtgaaggattaacacctgaaaaagcgtctaagattgaagccttactggtaaagtatcatagcaagctgaataaagaatatgaacaggtgctcgggtatctcgaagagaatccgacaccggataaccagcgacgtaaaaataagatccttgaacgggatgcagtgatttgcgagcgattagctgctatccgcgaaagtattaaggacgctgtggaatctcgacgttag

SEQ ID NO: 377551 - DNA, 177 bp, Salmonella enterica
atggaactcataagcaacacgccgcacgatgcctttttcaaacagtttttaatgcaccctgatacggcccgtgattttctggatatccacctaccggcggaaatacgggggatctgcgatctggatacgctgcgtctggaatcgagtcactctgttgaggagagccttaaagagtag

SEQ ID NO: 377552 - DNA, 1473 bp, Salmonella enterica
atggacagattgacccccattcgctgttggcctgccatcatttcgatcgtgattactctgaccatctggtttgttatcccttgtcctgcgaatgtgactccacaggcatggcaactgctggcgttgtttatcggtactatcgcggcgattatcgggaaagccatgcctattggcgctattgcgattgtggcgattatgctggtggcaatgaccggcgtcacccatcccggtaaaccttcagcggcgctgaacgatgcgctgagcggtttttctaatcaacttatctggctgattggcttatccatcatgctgtcgcaaagtttgttgaaaacgggactgggcgcgcgtataggctatgggtttattgctctgtttggtaaaagaacgttggggatcgcctgggcattaacgctggcagaaaccctgattgcgccggtgacgccaagtaataccgcgcgtggtggcggcattattcacccggtgatgcgggcgattgcggaaagtcttggttccgagcctggaaaccgtgagaatggcgcgacgggccgttacctcgcgctggtgaattacaatattaatccgatcagttcggcgatgtttatcactgcaaccgcgcctaacccgttaattgtcagtttcttgaccaaagggacggacggggtactgaatatgacctggggaatgtgggctatcgccgcgctccttcctgcggtggtatcgctggttgtgatgcccattgtgatctggtggctctacccgcctgccgttacgcgtacgccggatgcgccgcagttcgcccgacaaaagctaactgcgcttggccctctctcgctggcagagaaaatcaccctcgcggtttttattttgctgctttgcctgtgggctggcgttcctgccatgctcatggggagcggctggaccgtcaatcctaccagcgccgcattaattggcttatcaattctgttactgacgggagtattaagctgggacgacattctgaaatgtcgtggggcgtgggatactattgtctggttcgccgcgctggtgatgatggctgattttctcagcaagctggggttggtcggttggctggcgaccagcgtcggtagcgccatcaaccatctcggcgtgcactggagcatagcaacgctactgctgatcctgctttacgtttattcgcattactttttcgccagtaccacggcgcatattaccgcgatgtttgctgcgttcttcgccgcgggattgggtctcggcgcgccgccggcgctgcttgggctgatgcttggtttctcttcctcgttgatgatgtcgctgacgcactatggcacgggcaccgcgcccattatctttggctctggctatgttacgttggcggagtggtggaaaacggggctggtgatgagtgtagtcaacctgactatctggggcgtgaccggtgccttctggtggcactggttgggatattggtga

SEQ ID NO: 377553 - DNA, 138 bp, Salmonella enterica
atgagcggtaatatgtcgggagggagtgacaatatgccgttgagttacttctcaattttgcggagtgtcacacactatacggcattgtataaccctgatgaatttttccatgtcagggttacgatgggttcaatgtaa

SEQ ID NO: 377554 - DNA, 1071 bp, Salmonella enterica
atgaacattgatttacttcagcagctatgcgaagccagcgccgtcagcggcgatgaacaggaagttcgctcgattttgatcaatacgctggacccctgcgtggatgaaatcacctttgacggcctcggcagctttgtcgcccgcaaaggcaaccgcgggccgaaagtggcgattgtcggccatatggatgaagtcggctttatggtgacacatatcgacgatagcggttttttgcgcttcaccacgataggcggctggtggaatcagtcgatgctcaatcatcgtgtcacgattcgcacccacaaaggattgaaaattcccggtattatcggctccgttgcgccgcacgctttaacggaaaagcagaaacaacagccgctctcgtttgatgagatgtttattgatattggcgcgagcagccgtgaagaggtggaaaaacgcggcatcgccatcggcgattttatcagcccggaggcgaatttcgcctgttggggcgaggacaggattgtcggcaaagcgctggataaccgcgtcggctgcgccctgatggcggagcttttacaggcggtagataaccctgaaattacgctttacggcgtcggctgcgtggaagaagaggttgggctgcgcggagcgcaaacctcggcggagcatatcaagcccgacgtggtgatcgtgatggatacggcggttgcaggcgacgtgcccggcatcgatagcatcaaatatccgctgaagctgggcgccggaccggggctaatgctgtttgataaacgctatttccccaatcaacggctggtcgccgcgttaaaagagcgcgcgcaaagcagccaggcgcttctgcagttctgcaccatgaaaaccggggcgacagacggcggacgctacaacgtgatgggcggcggtcgtccggtggcggcgctgtgcctgccgacccgctatctgcacgccaacagcggcatgatttcggcgacggattacgacgcgctgttcactctggtccgcgaactactggcctcgctgacggcggataaggtcagtgccttcagcgattttcgtcaggtgagataa

SEQ ID NO: 377555 - DNA, 1746 bp, Salmonella enterica
atgttaaacgaacgccagttaacccttgtcgagctccttgaacagcagcgatggtcgttgagcgaactggcgcgacacactggcgtttcgagccgcaccattctgcgcgatattgattacctgaacttcacgctcagcgataaagcgcgtattcagcctggcggtaatgcgggttatcaactggacattgtggacagacgtcgctttttccagttgctgcaacggcatgataatgacgatcggttgctggcattcctgttattgcaggccttttccacccgcgcccagctcgcgtcggcgctcaatttaccggagacgtgggtgacggacagattgccgcgcctgaaacagcgttatgaacgcgcattctgcatggccagccgtccgggcgttgggcatttcatcgatgaaccggaggaaaagcgcattattctgctggcgaatctgctgaaaaaagatccgctgctgattcccttaccgggcattacgcgaacagttattgaacagttgcagcaggcatgtgaagaggtggatgattttcccctcgtgcctggcgagtatctcgccagcctgacgctggcggtttacgccctgcgcaatcagctcactaccgcatggccggaatgtcggcatacgtcactgaaaaaggcggtggcgcagggagggatcgacatgggcgagaacgcgttcggaacgcttatcggccttctggaaacacagcaacagcaggcaatgaccctctccgctgacgccgtatgttctctactgcaacgcgtccccggtgccgcctcgttgaacattattgatacccaactcattgataacattaccggtcatctgctcagatgcgtatccgcgcccatatggttaccggagcatcgtcagagcagtatgaataacctgaagtccgcgtggcccgccgcgttcgacatgagcctgtgctttatcgcccagttgcgtgagcaggtagagattccgctgttcgatagcgatctgatcggcctctattttgcctgcgccctggagcgacatcagaatgagcggcgtcctatcgttttgttatccgatcaaaatgcgattgctaccattaatcagcaggccattgaacgggatgtgctgaattgtcgggtcatgattgcgcgaacgcccggcgaggtgaaggcgataagtcaggagattgttccggtccttatcatcaataacagccactatttgctcgatgaggggcaaaagaatgtactgtcgttcaggaatatcattaccgcctccgctaccgagcagatcaaaaactttcttgccacggcctttattcgccaacagcctgaacgcttcttttctaaggcaggaagttttcattacccgaatatcccaggggaagactggaataccatcaccaggcaaatttgtgaccggttagtgagccaggcccacatcaccgaggatgacgcgctgcgaatctgcgccagggaaaacgaaggcgagaacctgattatcaatcacctcgccatcccccactgctggagcgaacgggaatcacgtttccgcggattttttatcaccctggcgcaccctgtgcaagttaataatgagcccgttgaccgcgtgctgctcgcctgcgctgccgctgctgcgcgtcacgagctgaaaatcttcagttatctggcgagcgttatatgccgccatccggccgacacggttcgcagattagacggctatgaagcatttattgcgctgttaaatcagtga

SEQ ID NO: 377556 - DNA, 213 bp, Salmonella enterica
atgaaaacaatcaaaaattttgtcgcagttatcgcccttgctacctctttcggcgcatttgctgcccagtctgtgaccgcaaccggtacgacgctggaaaacaccgaagcgaagattgccgctcagcctgaacaagcaggcgcaagcgcttataaaattacccaggcatataccggcaaccgcgtacatatgaccgctaaactgctgaaataa

SEQ ID NO: 377557 - DNA, 927 bp, Salmonella enterica
atggcactggaaagcgggattgcgcagttagtggaggaatttatcgcggcgggacgcccctcttctcgcgaacagaatattgatgaccggagggcgggctacatcgccagcacgacactggcaggagaaactgaaacccgcgtccaggttgaagatattgaactcaatgccatgacgtttcgcgtggtttcgccgctcaatgccacagggaaattaccctgcatcatttattatcatggtggttgctttgtcagcggcggttttgccactcacgataaccagttaaggcagttagctttttacagccgttgtcgcgtgattgcggcgcagtaccgacttgcaccagagcacaccttcccggccgcacataacgatgccgaaaccggagccaatactatctggaaatatgcccagaaactggggatagatcgcgagaacattacgcttgccggtgacagcgcgggtgggcatctggcgctggtcactgcgctacgcctgaaagccgcccgtcaatggcaacctgcacagctgattctgatctaccccatgctggacgcaaccgccaggtttgcgagctacacctgtaatgggctggattacattatcacgcgtgacacgctgctttcaggctacgagatgtatatgccgcgaaccgatccactgcatcctgaagccagtccgctctggcgtgaggacttcgccggtctgccatccacgcacatcattactgccgaattcgacccactgcgcgatgagggcgaggccctgtatcaacggttccaggaacaggatgtggaatgtacttgccagcgctctcggtgtcattcatggctttttccagctcggaggcgtgagccaggcggcacgaagcgccatgcgagatatggcctggcgtgttgtaagccatcaacaggcaaaatgacctaa

SEQ ID NO: 377558 - DNA, 897 bp, Salmonella enterica
atgattcgtattgcttgtgtaggtattaccgtgatggatcgcatctattacgtggaaggattaccgacagaagggggtaaatatgtggcgaagcgctatacggaagtgggcggcgggcctgcggcgaccgctgccgtggctgcggcgaaattgggcgcgcaggtggactttattggccgtgtgggcgatgacgacaccggaaacagtctgctggcggagctggagtccctgggggtaaatacccgctatacccgccgctatacgcaggcgatgtcgtcgcagtcagcgattatggtggacgccaaaggagagcggatcatcgttaattatcccagcccggatttattacctgacgccgactggcttaacgacatcgatttttcgcagtgggatgtggtgttggcggatgtgcgctggcatgacggcgcgaagcaggcctttacgctggcgcgtcaggctggcgtcatgaccgttctggatggcgatattacgccgcaggatattagcgagctggtggcgttaagcgaccacgccgccttctccgagccgggactggcacgtttgacggggatgagtgaaaccatggatgcgctaaaaaaatcacaaacgctcacaaatggacatgtctatgtcacgcaaggcagcgaaggttgcaactggttggaaaaaacgacggtacgccaccaaccgggttttaccgtggaggtggtggatactaccggcgcgggcgatgtttttcatggcgcactggcatttggcctggcaagcggatacgccatcgaagaggctgtcagattcgccagcggcgttgctgcgctgaagtgtacgcgcccgggtggccgggcgggtatccctgattgtgagcaaacccgatctttcctgtcactttttgtataa

SEQ ID NO: 377559 - DNA, 873 bp, Salmonella enterica
atgcatagtggtggaaaaacgattttactcacagcgggtgattaccgtgcacaaatcgttaccgtcggcgcgggcctggctgggttaacgtatcaggatcgtcatttagtcattccgcatgacccagcggaaatgccgatggctcacctgggaaaagtacttattccctggcctaaccgtatcgcgaacggctgttatcagtatggcgggcatgaatatcagttgccaatcaatgaacacgcttctattcacggtttcctggcgtggcgtaactggcaggttagcgaattgacgacgacaaaagtcacgctgacggcgtttctaccgccgagttatggctatccgttttcgttaatatcgcaggtgatttactcgctgaacaacgaaagcggactctccgtagaaatcatcagtaaaaacatcggggacaaatccgcgccgtatggcgtcggcatccatccttatttgacctgtaacttagcgcctgttgatggctatatgctgcagcttcccgctaaacaagtttttgctattgatgagcattctaatccaacccatttacatgctgttgacgaactggatttgaattatttaaaccagagattcctcggcggtaagcagattgaccatacattcaaaactgacaggaccgaatgggaaatgcacattactgacccgcaacaagccctgtcagtaagttcacgctccaatcaaccgtggctacagatttatagcggcgaaaaattatatcgtagaggtttagccgttgaacccatgagctgtccgccaaatgcgtttaactcaggaatagatttaattcagctctccccggaacaacagcatcatctgttttttaatattcgaggggaataa

SEQ ID NO: 377560 - DNA, 876 bp, Salmonella enterica
atggatttttttaatttattcacaccagacggtgtgatgttagatgcaggcgttgtgtatatcgttattgctttaatgtttctttatacctttgtggggatatgtgctggttttggtggcgggctaacaaccatgccgctcattactctgatgttaccggtaaaaatggcaaccccattatccgttattgtcggtacggcaacggccatttatgcaacctggttgtcacgtaaggaaaccgactggcggtctgccgccgtgcttatcttcttttcatttttaggtattccgctagggttatatgccctctcctatttacctgatcatatgatgaaaataggtctgggcggattcttaatcctctactcgttttacagtatgtttattcctcgtctacccgtctacgaccgccgttggatcgccgcgcctttaggcgctgtcgccggagcactgggggcagctttttccaccaacggaccaccggtggtcatgtatggcatgttacgcaatttaggcccggcagcttttcgcggtacgctgaacgccttttttacggcaaataacattgcggtagttggcggcctggcatctagtggaatattaacgatatccacctttaagctggtcattttctgtattccgacaatggttctgggatcgctggttgggcaatatgttcataagcgtatatcagttaaggtattccgcgttcttgtatttttactattgattgcctcaggtgcaatgcttattaaaggcgcaatgggtatttctacccttaccgcaatcctgccgccgtttgctcttttggctgtattacaactgttatttggtaaaaaaatagctgaaattcgtaaggcggacgaaggcaaataa

SEQ ID NO: 377561 - DNA, 1422 bp, Salmonella enterica
atgtctaatcatgatccactaacgctaaagttgagcctgcgggaaaaatgcgcctatggcgtgggcgatttcggttcgaatctgatgctgtgtatcggtacactgtatctactgaagttttataccgatgcactcgggatgcctgcatattacggcggaattatctttctggtagcgaaattcttcaccgcttttaccgatatgctcaccggcgtattgctggattcacgccgtaatattggcgcaaagggaaagtttcgcccttttattctgtatgcgtcatttccggtggctctggttgctactgcgcaattctttgccactcactttactttacccgttaaaacagcattcgcgacgttgctgtttatgttgttcggtctgttctacagcctgatgaactgctcatacggcgcgatggtccccgctattaccaaaaatccgcatgagcgcgcccagctcgccgcatggcgacaaggcggcgctaccattggccttcttctttgtaccgtaggttttatgcccattcaggcgctgtttacccgttccccttcgctgggttatctggttgcagcagtcatcttttcggtctgcgggctgttcagcatgtggtggtgctttagcggggtgaaagaacggtatatcgaaaccgtgcctgacacgcataaacccagcatattgaaatccttctgcgcgatttttcgtaatccgccgctgctggtgctctgcatcgccaatttgtgcacgctggccgcctttaatatcaaactggctattcaggtttattacactcagtacgtgctgaacgatattcatttgttgtcatggatggggtttttcagcatgggctgtatcctgattggcgtcttattagtccctgctgcggtaaaacgcttcgggaaaaaacaggtttatcttggtggtctgatactgtgggccgttggcgatatcctgaattttatctggggtggtacgtcattcctgtttgttattttctcttgtgtcgcgtttttcggtactgctttcgtcaacagcctgaactgggcgctggttccggatacggttgactacggcgaatggaaaacgggtattcgcgctgaaggctcggtttatacgggttatacctttttccgcaaaatttccgctgcgcttgctggctttttgccaggtattatgctgacgcaaatcggttatatccccaacatagctcaaggtgacaccacgttgcttggtttgcgtcagctcatttttttatggacttgcggtcttgccattatcgcagcactaacgatgggctttttttataagctcaatgaacaacgtttcgcttttattatcgaggaaattgcccaacgaaagaaaacaggtaatcaaattgtcgcgactaataataaaaaaagtatttctactgtaaataattaa

SEQ ID NO: 377562 - DNA, 1320 bp, Salmonella enterica
atgtcaacatctaaagttaattatgcattatttgcttttgcatcgcttttctcaatgccatcgttttcttcagggcaaaatatctatgcgctatcaactttgattaaggatgggattacttcatcaagttctgtggcctcagcaaaatggggttctgaagcaaaaagagaagatattaatatcgcaaagtcatcattatatccgacattagatatgacatcagaggttgctcgtgcatatgagaaaggctctacgcgcaccactgaagacaatgtaaaaaatcagatcatgctaaattatcgcatacttgattttggtgtaagagatcagttaatcgatgagagtaataatgaatggagttctgcaaattatatatatctggatcgtgagagtgaaattgcagggaaagtgacgaaaagtttcttaaccgtgaataaacaaaaagaactactggatattatccaaaatgaattgagctactatcatgaccgcttgcatgattttgaatatctcgtgaaatctggcgagtcgaccgagtcagatctaaaaaaaatacaggcttcaattgattcattaaatgtccaaaagataaatgttaacgaaaagcttgatgatgaacttaatacgctaaatatatatactaatgatcggatatccagaaataatctgactagtgtaccatcggcaattagtaaatacaggtttaatatggatggtgaagcatttttatcacttatattgaagcagaattctaaagttcttagtgcagataaaaaaattgatgctgcaaaagcagagtatatagcatcaaaagataaattctttccaacagtggacttccaggctggctatacagacaacacaccatcaaatgattctgatattgatgactataaagatgaatttcgagttggagtaaaagttggctggaatatttttaatgggtttaaagatgtttctgatgctaacaaaagacgcgatatgttgaataagactctcgcagaccgggatgatttacttaaagaagttacgctgaaaataaaatctaatgccgcgcagtatcgatctggtattgaatctttaaaattggcaaatcaatcatgtcgcaatgcccgagatttgacatctctttatgagcaggagtttaaaattggtcaaaaatccttacttgatctggtcactagccgtagtgaactctttcgcgcatgctcagaaattattgaaagccaatatcaggtatacacagccaatttggaccaaatgttattaggcgatatgctaataaaaactattaatgaaaatgaaaatgtataccgttga

SEQ ID NO: 377563 - DNA, 1254 bp, Salmonella enterica
atgatttcaataaagaataaattcagcatacttataattccaattttatctttggtcgttgcattaatttccgctatgtttttattttctccttatctaagaggatatatattctcaacatacagagcgagtgctatattcaatactgcaattcttactatttatagcattggtgcttttgttagtttctactcgatagttgaagttggacgtgccagatttattttaagtagtggggatggagataaaaactgtcgattgatctctaatcttaataaggttttttattccgctgaataccccaatgcaggttcattgatatcaagtgccaatgaaagcgcctttaagacaaaaacgcaaaggttgtcattgattcacacttgtatgaatacatcaaccatgatggggctgcttggcacgttttttggtttgtctgtaacggttgcatctgttgttgtcttattagacaaatcaggccttggaggtgggggcggaaacagtagcgagatattagatgttatcgttaatatcatgaaatccctttctgccccacttcgtgggatgaatattgcttttgtggcttctatttatggcgtagttagtgccatcctcttaggcgtacagacaattatgtgtcggagcgcctacaattcacttttttattgtttaagagagatgtcaattgaataccttaagagaaatgatgagcaaatagatttaaataataacaaagttaatacaggcagaattattgcaaagggtattaatagtattcttgaacaggtaattaatctaaataacacaactgataaacaatataatattactgctgaggtattgtctgggattgatatgaatatgtcccgtatcaactcttgcctttcaagtattaatgatgttttggtaattttgagtcaggaacaggttatccttaagtctggtattgattctgcaaaaaaaatgattagcgaaggtatttgtttgcagatgaaaaatcaccaggaatatagcaataaatgcaatgatatcctcaaaggaaatttatcgatagcggcagaaatagaaagtattagtgggcaacaagaaaaaaaccatcttgaacaccttgacatgctaaaagaaaatgcaactgaaaataaaatgtatgcagatattctcttaaaagaaatggagtcaagtcattcaacattttatcctttgtttgaaaaattagtagaaatgcataaagctttaacaagtaaggttactaaataa

SEQ ID NO: 377564 - DNA, 552 bp, Salmonella enterica
atggaagaaagcaacccatggccaacatttgttgatgcattttcgacagtattaagtatctttatttttctgacgcttctattcatattgaatagtatggtcgtaatgtatgagagttcacaaaaagtttatgctcagtttaaagctgaagtgcagcaaaacagccagtctgaaactgtaagcgttgaaaataaaaaagaatatagcgtctcaaaggatggtgtttttattaaggacgcaactaatcactcatctttaatttttagtaaagataaagtcattattagttatgatcccaataagtggcagatatcagaaaatgaactaaagcagatagttgactggattggtagtgaagatcatgtcagcattgtggcgacaaacggcaataacttgcctgtatctgatgaaattaaaattgcctatgagagagctgtcttgctggcaaaatctcttgaaattaataaacatgaattgaagctttcaattgaagtggcaccaggctcaaatagcagtaatggacaaataataatctacaagggaacgaaatga

SEQ ID NO: 377565 - DNA, 978 bp, Salmonella enterica
atgagcgccgcaacgttggttgcgctgggcctgttatgggtgatgtggctgatgctgcgtaataagttgctgtatccgttggataacgtagtggaacagctagagcggttggcgaccggcgatttaacgcctgttgactatcaacctgcctgcgtcgagtttaaccgccttaataccgcgatggcggatatgcgcgccgcgctgagcaattccgtgaggcgcgtgcgtgatgccagttcacagattgacatcggtagccgggaattaacggcaggtaatgttcatcttgctacgcgaaccgagtcgaccgcgacatcgctcgaacagactgctgccagcatggaagaattgacggcaacggtgaagcagaatgcggaaaacgcggaacaagcacatcaactggcgaaaaccgtgtctgataccgccgatcgcggcagcgaaatggtgtgctacgttatcgaaaaaatgcgcgatatatcagggagttctaatcgcatcgccgatattctcagtgtgattgacggcattgcttttcagactaacatcctggcgctgaatgcgtcagtagaagcggcgcgcgcaggtgaacaagggcgcggctttgccgtggttgccggagaggttcgtcatttagccagccgtagcgccgaggcggcaaaagagattcgcacgttgattagtgattcgcaaacacaggtgggcgaaggaagcgagctggcgcagcaggctggcgaaaccatggatgaaattgcgaccgaagttttacgcatgactaaattgatgcgcgaaatcgctaatgcgtcccgcgagcagagccggggtattgagcaggtcaatattgccgtcagccagatggatgaaacggcgcagcagaacgcagcgttggtacaacaatcatccgccgcaacgcgctctctggaggaacaatcgcacgtattagtggaggctgttgccacgtttaaactgcaaacggcgtaa

SEQ ID NO: 377566 - DNA, 135 bp, Salmonella enterica
atgccaaaaatcctttctattcgagccagcttgctggcgttattgtcttctctgacgctgcttttattgctaacggggagtatgggactctatgcttcagcgcgtgttatcacctcctggcatactatggcgtga

SEQ ID NO: 377567 - DNA, 420 bp, Salmonella enterica
atgcggagatcccggtttttctactcgatcgttctcggcgaatttgatgggaatctccatgcgaagcgtcatgattcgtatttatatgttgtcgaccggtttagcgacgctgccgggatcgtattttccatttatacccaggcgggcgtcggggtggaactggacgccattacgtcggtggtgatcggcggcacgctgctgagcggcggggtaggtacggtactggggacgttatttggcgtcgctatccaggggctgattcagacctatattaactttgacggtacgctaagttcctggtggacaaaaatcgctatcggcgttctgttatttatttttatcgcgctacagcgaggattaacggtactgtgggagcatcgccagagttcgccggtgaggcgtataaccgacaatagctaa

SEQ ID NO: 377568 - DNA, 351 bp, Salmonella enterica
atgtggaagcgcttacttttagtgacaacagtttcggcagccatgccgtctatggcgttcgccgctcccttaaccataggattttcgcaagttggatcggaatccggctggcgcactgcggaaacgaatgtggcgaaaagcgaggctgaaaaacgcggcattacgctgaagatcgccgacggtcagcaaaagcaggaaaatcagatcaaagcagtacgtttttttgtggcccagggcgtagatgcgatcttcattgcaccgatagtggcgactgtctgggagccggtactcaaagaggctaaggatgcggagatcccggtttttctactcgatcgttctcggcgaatttga

SEQ ID NO: 377569 - DNA, 276 bp, Salmonella enterica
atgcgagcctggataatgctatttctggctgcgctcttgcttagcataacagcaacagcagctaccagaataaataatcgcctggccaaaaatatggatgatgtgcacagcttaggcgtgatctacatcaaccataacttcgccacggaaagtgaagccaatctggcgctgaatgaagaggctgaggcacgaaacgcaatctattatcacgtcatacttatccgggaaccgggtagcaacggcaatatacacgccagcgcggatatttatcgctag

SEQ ID NO: 377570 - DNA, 537 bp, Salmonella enterica
atgttgaccattaccactgagagattaattctacgcccacaaaccatcgctgattttgcaatatggtatcctatgtatgccgatcctgagatatttcgtctggataatgcgcctggattcacaccagaagagggatggaatcgcctattaaggaatgtgggtcattgggcggcattcggttacggcatctttgccattttccagaaatctgacggcgctttccttggggaaacggggctggctaactttcatcgcggccttgatgataactttgcgcgttgcgctgaggcttcctgggttatttcacgcccggcgcaggggcggggaattgcaaaggaagcggctgttgccgcgcatcagtggtttgtgcagacattctcgccagcaaaaacggtctgtctgattgccaaaaataaccctggctcggtcagcgttgctgaacatgtggattatcatatttacgacgaatgtttatacaaaggcgccgagtgtttaaagcttgcgtgtttatgggataaatcagtcggctcgccttga

SEQ ID NO: 377571 - DNA, 534 bp, Salmonella enterica
atgcgcttgctgcccgtcgttgctgcagttaccgcggcatttttggttgtcgcctgtagttcgcctacgccgcctaaaggcgttaccgtggtaaataactttgatgccaaacgttacctcggcacctggtatgaaatcgcacgcctcgatcatcgatttgagcgtggactggagcaagttactgccacctatagtctgcgtaacgatggcgggcttaatgtcatcaataaaggctataacccggatcggggaatgtggcaaaaaacagaaggcaaagcgtattttaccggtagtccaaaccgcgccgcgctcaaggtctcttttttcggcccgttctacggcggctataacgtgattgcgattgacagagaataccgtcatgcgctggtgtgcggcccggatcgcgattatttgtggatactctctcgcacgccaacgctctctgaggaaataaaacagcaaatgctggccgtcgcgacccgggaggggtttgacgtcaataaattaatttgggtaaaacaatcaggttcgtag

SEQ ID NO: 377572 - DNA, 135 bp, Salmonella enterica
atgatgaaacgccttatcagccttgtcgcgctggttctcctcatcggcacattattaacggcatgtaataccgctcgtggtttttgcgaagatattcagcatctcggtcacaccctctcccgcgcagccagttaa

SEQ ID NO: 377573 - DNA, 447 bp, Salmonella enterica
gtgatagctattattcacgctattaacaatgccggaatgcgtgagctcgcattgcgtatttcttcaatgctggactttttaccattatacgatgctgattgtctggaaaacggtaatctgcaattcgatacctataaccagcccgactggaaacataatctgtataaccattatctggcgctcgtttatcgttacacggatgaagcaggaaaatcttatgattgcggcaccatcattaaaacccgcagtcagtcaggctctaaagaagccgaagcgatatcacgccgtttgctgaattacagcccgcgtcttaaaaagctggagggaagaccatgtaaggtttttgtcagaacgccaggaaccggtaaagcaacgcgtctgacgcaagatcaatgcctgcgcgcgttgcataatctacgcatggggtcatcgcaggaaaaacactaa

SEQ ID NO: 377574 - DNA, 165 bp, Salmonella enterica
atgtttaagggtaaaagtcttaccctaaagggtaaaaggcttgacctgctgttgagatttttcgactacgtgaaactgatgctggtgggcaggtctcaatactggagcaataaaaagcagttccgcttaacatcgggagagctgctttttagtactgtacgttaa

SEQ ID NO: 377575 - DNA, 309 bp, Salmonella enterica
atgaatgacatgctaagacaggatcatccactggttttggctactgtgctgaaggctttaaatgacccaacacggttaagaatcatccaggagctaatcaacgatgagatcggcgcagaaaggcactgtacatcgttcagcggtctgtctgaagtagcccgtgcgacaagatcgcatcattttaaagtcttgcgcgaagcgggtcttgtttctctggttgaccggggaaatttgctgttagcccggctgaggcgggatgaaatcgaaaaagcttatcctggtttactcaacattcttgcccgtggctaa

SEQ ID NO: 377576 - DNA, 1644 bp, Salmonella enterica
atggattctgtatatcagtctcaggaaaataagttatcttttgatggctcgattgatagaagatatgttcaccggcaggctatcaacgaggttttcatcactgactcacaacaagtggacagtaatcattttatattttccgccatgttgccaaaatcgcacatgtattttaatgatctccccgaactcactgatggtcaccgatgttatgacgcaatgttactgttagaagtcttccggcaaacatctatttatgtgacacacaaatactatgatgtccccctcaatgcaaaatttatctttaataatgccgaatttaaaatccttaattatcctcttttggagataatgcagcagccattacattcggtaattcaggtcaaaatcaccaacctaaagtatcgcaaaaagatcctggctggttataccttagaaatgacactcctgattaacaatatcgcctgtgcacagaaaataatggggattggctggatggatgataccgtctggaaaaaattaagagcgaaaaatgagaatctcccccccttaaattataacaatattaaaccagcgcaatgcacatctgttggccggatcttcccgcgcaatgtcgttattggtgatgtgcagataaaagatagcatgctctcagccacacttattgtcgatcaatcctactcgtctatttttgaccacccattagatcatattcctggcatgtttattatcgaggcctgccgacaagcagctctgttggcagtcaattcatataaaggtacaccagcaaaccaactgatactctataattgcaatatgtctttccagcaattctgtgaattaagcagcacagctcaatgtatcgttgacctgcatgaaatcacagtcactggcactttaattaatgtgccaatttctgttttacaaaacggtactaaaaataccattgggactatcatacttaaagttgtaaatgatgctgaatacgaacataaagaaaaaacggatttctactggttcgactttggtggcgtattatctcctcctatttcttcattattcgacctttattatgaaaaaaccggaattccgactgaccagctacaggccgcaatgaaatcggtcgctgatgatatgaacctgcccacgctggccccggttgaaaatgccatattaaccgagctggaatggggatcgcgtctcagggaaacaatggcacgtctttttcctgaaacagatacccgccgggcacagttagaacatttcggccagcaatggtttgctcacgttaccgccaacgctgcaatggtaaagcaaattacagatatgcggaacgctggttatcgggtcggtatcctcacgaataatgtggtcgagtggcggccctactggcagtccatggttggtctcaacgatgtcgtcgaacatattgtcgattcctgtgatgtccgatgtcggaaaccagacccttcgttttttgctcttgcggaacaggttgccggagttacgcctgagcagtgtgtactcattgatgatttggtcgaaaactgcctcgctgctgaaaagcgtggctggcggacgatccagttcctcaacaatgaggattgtttaaacaaactacacaccttaacttatggagaggaataa

SEQ ID NO: 377577 - DNA, 1197 bp, Salmonella enterica
atggacaacagaacatatcgtataacggatatacctcattacgatccccaaatgggatatgaaattataaaggccgccacttatcaggagatcggagttattcgtctgctgagtgggcacgaggcgtttcatgtcatcaattatcaggatgtcaaaaaaatcctgatggataaaacctgcctccgcagcccctctaacgaaataggtgggcccagtgtgttgccaacgctaacaccaaaggaactgttgctgaatctggattttcccgaccacactcgcgtaaaacaatttgtcgccagagactacagcagaagcggattgaaatggctggaacccgttattacgcgcctggtacagggatatgcagaaaagatggcgctaaaaaaacagcccgatctgtttactgatctgctggatcacgttgccgctgatacaaactgtaccttgctgggacttccccttgaagataaacactattttcgcacgctgagtcatattgtacaggtagcggctcctgatgatgttgaagatctggttcatcgatttgaattactttacggatatgtcatggagcatgttcaggacaaaagacaccatagcaaagacggcctgattgccagatttgtgcaaaacagggaaaactgccagccaccacttaatgatgcagaattaacagctatcctgctgggttcggtgctgggaggcgatcaaaatactctgacggttatgaccaaaatcatctatggtctgctttacatgcctggaatatggagacagttacacgacgaaccgacactcgttcctgcgatggttgaagaaatgctgcggctaaccaacctgggaagcacatcgacctttccccggattgccacacaagatatccaactggatacaggcgttatcccgacaggcgcagcgattcacgccgatgtatttctggcaaaccgtgaccccgcagtgtattacgcccctctgttaataaatccttatcgtgaaaataaccagcacctacagtttggttacggcatgcatcactgcatggggcaggagcttgctcgcctggaaatcaacacagtcattaccctgctaactcgtcagtatccgcagatgagactacgccatgacaacctaaacgacctgccatggtgtgaaggtatcgtactacgccgtcctgacgcactgcccgttattatttga

SEQ ID NO: 377578 - DNA, 1524 bp, Salmonella enterica
atgtctcagccaaatagcaggttacttttatttgccattttactggcggtatttgttgtgcctggttcaatttccggaacggcaattgcgttgccatttattagcgcagacatgaacgccaacctgtcagcgttacagtgggtcgtcaacgcctttaacttaacgtttgcctgctttaccttattctggggaacgcttgctgatgcctgcgggcggaagaaagcctttttatccggaaccacaatttatgccgtagcttcagtcatgtcggcactctctcccggcgctttgtatcttgatatttcccgtgctctggccgggatcggaggtgccgctattttttcatgcggcagcgctattctgatcgcccggttcgaaggcagtcaacggactaaggctttcgccctctttggcaccactgccgggatcggtattacttttggcccgacaatttcaggttttattcttgattttatcaactggcgcgccatttttgctgttcatgccatcacgctggcggttgtgttaattctggctaaatctattcccggagataccgcgacgaataaacggtttcgttttgatattgccggaaccgtactctttatcaccgccctcctgctgtttatgctggcgatggtacagggggctcagtggggctggacagatatcagaacactgtcattattgatacttgccgccgtgataactgttggtttttatctctatgaaaaccgtattgataacccaatgctgaattttaacctgttgaagaatcgtaccttcgtcggactgatcctgatcccggtggttgccagcgtcatcttcgtgacactgctgacgtattatcccagctatctgacaggagtgatgcagctcacaccgtcaaaagccggtctcatgatgatcgcactcactctgcccgttcttttctgcccggtgattgcaggcaggctggtctcaggtggggcatcagcccgtatgattctgtttatcagcctggctgcatttatcgctggcggtataactttaatccttttcagccagccagaccgtgaactatggatattgaccataccattattattaattggtacgggtatgggattatccgccggtctggtcgatggcctggcattaagttgcgtggatccgttacaggcaggcatggctgccggattgcttaatacgctcaggctgggtagtgaagcgctggcagttgcattatatgcttcattactgacctctcatctgacagggtctttgcctggtctttttatgcagttcagtctcccggcgaatcaattgacggagtggattaacgcagtcgcctcaggcaatctcaccgccccgctgaaacacgcacctggcggtaatctgttagcattgataattgcccagtatcatgctgcgtttatttatgttgtagatattctaaatatcatcaccgttgctctgagcctttggatcctcagattactgatgaataagcgggccatgaccagacagcaggttaaagaatag

SEQ ID NO: 377579 - DNA, 351 bp, Salmonella enterica
atggaactaaaacgggtctatttacagcaccacctcaatactggcgcagtcagaaaggcactggataacgccattgcggtggcggaaagccgaaatggcagactgattgataaacctgacctgaaaacggccatgaaatactggcacagccaggcgtcgcgaattggcttaaccggggcatactctcctcactcgctgcgctatgcctgggcacaggatgcgatccgccattatctggcacagggattcagtgataaagaagcactggcacagacggcaatggatctggggcatggtgatgggcgtgggcaatatgtccgtctggtttatggtcgggagatagtattataa

SEQ ID NO: 377580 - DNA, 885 bp, Salmonella enterica
atgtcgggcgctgaaagacgttatcgaaaaaaagctttaaaaccagcctctaagcgtgagctggtcactcatctgataacgacattcggactcagtatccgtcaggtctgccggagtctgaacctgagcagaacggtttaccattaccgcccggattctacgcatgacgaacccgttattgccgcattgcaggcagcggctgaacgatacccgcgatacggttttccgaagcttttccaggttctgcggcggcagggataccagtggaatgacaaaaggatccaccgtatttactgtctgctgaagctgaattttcgccgtaagggtaaacaacggctgccggtgcgtaatccctcgccactggccataccggaagtgctgaaccagagctggtctgtcgattttatgaatgatgctttggtctgtggccgtcgttttcgcacgttcaatgttgttgatgactttaaccgtgaggtgttgtcgattgaaatcgatctgaatctgccagccccacgagtggtccgggtgctcgacaggaacgcggcaaaccgcggctatccggccatgcttcgcatggataatggaccggaatttatctcgctggcactggctgaatgggcagagaaacatgcagtaaaagtggagtttatccggccgggtaagccaacgcagaacgctttcattgagcgttttaaccggacataccgtacagaaatactcgatttttatctgttcagaacactgaatgaagtgcgggaaatcacagagaaatggttatcagaatataactgtgaacgcccgcatgaatcgctgaacaatatgacgccggaggaataccgacaacaccattatctggccgggatctcaaaaaatgcatggaactaa

SEQ ID NO: 377581 - DNA, 273 bp, Salmonella enterica
gtgaatggcacgattatgcgggatacttacaaagatgtcgttaatgcttccgatggatgcaccacagaggaaagattagtaacatttactaagcttattattgatgaccgtatatatcctcaaagatttatttcatttatttttccaattttcagttcatttgcacagggccatttccttgatattaattatatgaacacactaataaatgacgttgaaaaaacagaaccagtcggggtcatcccaactatggcaaatgaagtctctaattga

SEQ ID NO: 377582 - DNA, 1143 bp, Salmonella enterica
atggcccaatttaagcattttgagctgtcgcttctgaaccccagttttgactcccctttggtcgatgcgctgacggagctggagttactccggcacctgcggctggaaaccgatgttcatccaatcctgtttgcgcagttgaaggcagttttccacatgctggagagtcttggctctgcaaggattgagggaaaccacaccacgcttgctgattatgttgaaagtaaggttgaaggaacacagagttcgacggatcagctcaaagaaatcaacaatattgaagctgcgatggagtacatcgatgaatacctgagcaacggagatgagataacggaatattttatccgcgagttgcatagtctggcagtagtcgggttgcaacaggaaggagacagaacgcccggcgcatatcggcaacataacgttagcattgctcagtctgagcatttgccgccggatcacatccgcgttgctgattatatgtcagaactgacagccttcattaaccgtgccgataagccaaagtacgatctgatgaagattgcgctggtgcatcaccgctttggctggatacacccctttggcaacggtaatggcagaacagtcagactgctgacctatgcgttgcttatcaaatatggttttaacgttcaggcgggtggtcgggttctcaatccgacagcggtattctgtaatgatcgtgaacgctattacgccatgctttcgttagccgataagggaacagagcaggggctggaagaatggtgtttatatgtgctttcggggatctcctctgagctgaagaaagttgatcaactgacaagccatgcttttctgagtgaaaaaatcctgtatccggctatcgatttttcgtcggagagaggactgacaaacccgctggaatcgaaggttctgaaacgtgccgtcgaactggggacgataaaagcgggcgatctacgcactgttttgcccgatctgaaaccgacgcaggtgacttatcagcttggtaagctgattgataggggattgcttcaaccagtagaggagggggcgcgtacctatacagcgaagttttctaactcgtatctgatacgaggggtgattaaggttctgcgggaagaagggtttattccagatttgtga

SEQ ID NO: 377583 - DNA, 291 bp, Salmonella enterica
atgccagtgaaatataccgataatgcaaaattctttattagcttcattaatattggaattgtaggttgcacttttctactcttttttattttatatgaacctgatacggaagttgtaacccatgtttttccgggtgagtattcatcttctacgtgtgatgcgcgtaattttatcggctacgtcgatgcaaatgattttgcaggatatataaaaatagcagaatcgacacgctacagtatgtattgtctgaaaaaaacgggggctggtcagtggggtatttatgcaaattaa

SEQ ID NO: 377584 - DNA, 153 bp, Salmonella enterica
atggtcgctattgccagcatgaaggtgctggctttcctttatttatatactcgtcatacttcaagcggcatgtgcgttggctttcctcgtttccccagccacttaattatgtcccccctctgggattcgccgcgccgcctgcctgcaacctga

SEQ ID NO: 377585 - DNA, 336 bp, Salmonella enterica
atgataattttggtacgtacaaccggtacgccggccagccgtgcggcctcctcattgccgcctatcgtcagcgtgttacgcccgaaagtgttttgttcagaaaagctcgtcttcaatgcctaccgatttaccctcggagatgatataagccagactgcgcacaatctgcattgtggcgagtgcggcaatttccagatgcgcaatcacaaagccactgaccagtccgcacagtacgcccagcagcagcccggcgccaacaccttagtaaatttgtgcatggttaactccagctttagcattcttttatgtagggtaaaatcgagcgattcttgttag

SEQ ID NO: 377586 - DNA, 5229 bp, Salmonella enterica
atgttgaatcaggataacaaaacggatgcattaatcaattctgcgattaataatggatctgcttacgccactaatgcagtacaaaactggcttcagcaatttggtacggcgagggtaaatctgggtctcgataacgatctgtcgctggaaagtgctagcctggatatactgttgccgctttatgatgacaagaaacacaacctgttatttacacaattaggcggaagacgcgatgacgatcgtaatattatcaacgcaggcgtgggctaccgctatttcgccgaccactggatgtggggcgttaacgcattttatgatcagcaaatctccagtgttacccaccagcgtctgggtttcggcggcgagcttggctgggattatttcaagctgagcgccaacgcctatcagcgtctttctggctggaaagattcgaaagaccatactgattacgaagaacgtgtcgccaacggctatgatgtgcgagccgaaggctatttaccagcatatccgcagctaggcgctcagttgatttgggagcagtattatggcgatgacgttgctctgtttggcgatagcgacgacgaccgtcaacgtgatccttatgctttgaccgcaggcgttaattacaccccggttccgctgttttccgttggcttaaatcaaaaaatggggaaaggcaatcataacgatactcaaattgagatggcggttaactggatgctcggctcgccgctcaatgctcagctcgacgccgataatgtcaaaaaccgccgcacacttctcggcagtcgccttgatttggttaatcgcaataacactatcgtgctggaataccgcaagaaagagttaatttcgctgaaagtgccggaaaaaatgaccggcgtggaagatgaaaccctgcctgtcaacgtaactgtgaagagtaaatatcctctcgatcatatcacctggcaggatgatagcctgatacagaacggcggcaacatcaccgaggaaaatgggacgtggacggttacgatgccgcactacgtgcaaaatggtgccgagaagaatatgtatgttgtcgccgccacggcatacgacaaccagggtaataaatctgacgtcagccatatgactgtcgccgtgagcggctttaaccctaatgacattgttaccgcaaccacagcggccagcacaactctgccggcagacggcgtcagcaccacgcaggtgagcgttactgttacgtccggtagcgggcaaaaaattaccggcctcgccagtagccttagcgcccagctcattcgtaacacgcagattcagggggcatcggcggcctcgccggtagcggaaaaaatcagcgagtttaaagagcaatcgccgggcgtgtacgtcagtaccttcaccgcaggcacccagcctggcgcggttatcgttcagcctctctacaatcagacgaccaagctcaacacaaccaccattaaccttacggcagtgaaagacaccgcgcatttcgccacacttgatgcgtccaaaaccacagcgctggcgaatagtcaggatgcgatttcaatgactgcgcacgtggtggatgcgatgaataatcctgttcagggcgtgaccgtgcactgggaaagcgacaatgctggcgcgatgctaaacacaccatcaagcacaacggatagccagggtaatgccgtcgcctctgtcaccagcggtcaaatcataagcacaacggtgagtgtaacgctggataacggcgaatccatgcagagtaaaacgctgcagtttacggccgacgccagcagcgcaaaagtcataaaaattgatgccgataaaacccttgctcgcgccgataatcaggacgctatcaccgtcagcgcgatggtcactgatgccagccagcacccgctggtgaaccagcccgttaactgggcgatcgattcggccagcggcagcgctcacctggcggataaacagagtaataccgatgaaaatggcatcgccaccgtcacgctgaaatcagcgaaagccggacagggcatcgtttcggcctcaacaggcgacagcgaagcgttaaaaacagatacgctaaccttcctgccagacgttaaaaccgcgacattgagcagcgtaacggtcagcaaaacgtcagctctcgcgaacgggcacgatcctgtgacgttcagcgtaaaggttgaagatgctaataaaaatccattaaaaggaatacaaattagctgggcaaccagcagtacccaggccagtctgtccgccacctccaccagcacggacgcgcagggggaagcgacagtagatctgacttccaccgccgtagaaaacgtgacggtgaccgcgacactgggagaacaatcgcaaacttcgcccacggttaatttcctcgccgatgacgccacagcatccgttcagtcagtgaatgccgacaaaacccaggcggttgctaaccaaaacgaccggattacgctgacagctcacgttatcgatgccaatgagcaccctgtcgctaacagcgcaattgaatggaaaatcgtggaaggacaaggcacgctgagcaccacgcaaaacagcaccgaccagcaaggtgatgccattgtaacgctggtctcatccgtgcagggtaaggtcgtcgtctcagccagcgccgcaaccggcggggcggttaattcgcccgaccttctgtttaccgcagataccgcaacagccaaagtgactgacattactgtagataaatcgacggctatcgccaatggtaaagaccagattacctacaccgccaccgtgacggatgcaaaaggcaatccagttaaggaacaggacgttaactggaaggtaacgcctgccacggcaaaactgtctgcagtaacgacccaaacggacgtgaacggaaccactacggtgactgtgacaacgctgaaagcaggtgacgtaaacgtcaccgcccaggcaactacgggcgcggcgtggaatgcgccggtaaccacatttaccggtgataccgctaccgcacagataggaaacatcaccgtgagtaaaaccaccgccatcgccgatggcgtggatagcattacctataccggcaccgttatcgatgccaacagcaatcctgttgcaggtgttactgcagaatggtcggtcagcccggctacgggcaagctgtcagccaccaccagcacctctgacatcgcaggtaaagtgaccgtcgccttaacatctaccgaggtagaaaattacgtggtgaccgcagaagtcaatggtaaccctgaaaacgccgaaaccgttaactttaccgctgacgccggatcggccgccatccgaacgcttacggcaaataaaacggacgatatcgccgcaggaagagacactatcactcttaccgcaacggtacaggatgcgtcggggcaccctattgcgaacgctaacgtgaactggtcatccgataatacttcgggcaacttcagcgaaaccaccacggccacggatgcccagggtcaggcgattgtcacctttagtggcacactcgcacaggtcacaactgtgacggcgagtagcgtgaatgacagtgagaaaaccattcagctcaacatcgtaccggatcagttgagcgcgaaagtggtctcgatcacctctccggaacatgactacgatgccatagccaatggaatggacgcgattaacttaacggccaccgtgaaggatcaatacggcaacgtcatcaatcagggcgacgtagcctggagtcttgacccggcgagttctgcacagctctctgccgacaccgtacccaccaataccgagggcaaatctactgtatccgttacttcagagaatattgtctcatgcaaagcggtcgccacgttcaatggcatcagtacacactcggtgacgatgcgttttatcgctgacagcacgacagagaagctctcgcaaatcactgccagcaaaacgacggatatcgtcgccggaaaagacgtcatcacgcttcaggccgccgtcaccgacgggaataacaatcccgtcgctaacgcgacggtaaattgggggactgatagcagcgggggggcattccagccagccgacagcagcgtcaccgacagcaatggtttagccagtgtgacttacacagataccaaagccggtacaacgactgtcggggcgggtatcaacgattctcagaaagaattacagttgaacgttatcggtgatgttgacaccgcaacgctctcaaacattaaggccgataaaacccaggccgtagcggacaacaccgacacggtcacctggtccgtcaccgtgaaggacggttacggcaacgttctgccgtcaacggcgattaactggagcagcgacgacccggatctgacgcttacggccaacagtagcgtaaccaacgagcagggtatcgcctccatttcaggccatacgctgaaagcacgtgatgcggtggtgacagcaaccgttccaggtaatggcaaaacgctgtcagccgctaaagtgacctttattggcgacgcgaaaacggcaacgctgctttcactgacagtggataaaaccaacgcactcgctaatggctctgatactgttacctataccactcaaattgaggatgtgaaccataacagtgtgcctaatgcagccattaactggcagaccacgctgaacaagctgtcagcgtcaacaaccaatactaacagttctggcgtcgccacagtgaaactaagtggtaatgatgttggtcaggccacggtaacagcatcgatcaatacgtcgtcattaaaaaatgaccaggtgaagtttatcaacaccattgaagatacatggtatgtcacaacggattcatcaacctatacgtcttcgtcaatcaaaggttattccgatttaggttttgtcacctctgcgcccacaacgggcccgacagaactggtctgggcgccttctggcgattattctaaagtctcaacgcccgtgacgctggtagataacagtgggcagcagtatacggttaatctcaaaggctatcgtaaatcggattgttcacaacgtcctcttaacgctgccgtgggatgtagcagctcaggcgggtaccaggccagatttacatggagccgcagcgataatcaggctatcccaccgggtcattacactggactgatccatttctacggacaagactggcataccagttgggcgtttgaataccgattaacgttggatttaactattaactga

SEQ ID NO: 377587 - DNA, 1077 bp, Salmonella enterica
atgcagcggaaaaaatacgatcccaatttgcctaggaacttaacatatcgaaggagggacaaagcatattactggcgcaaccctctgacgaaagaagaatttacactaggtaaaatttcaagaagagatgcaatcgcgcaggcaattgaagcaaatcattatatatacaaaaactactctcctgctgccttaattgaaaaacttaaagggttcgactcatttactatggcagactggattgaacgttacaaaacgattcttataaggagaaaagtgtccagaaatacttataaaattcggggaaatcaactggaaacaataaaagaaaaattaggagggattttactgacagaaataaccactcgccatattgccgagtttcttgatttgtggattgaaggagggaaaaacacgatggcaggatcaatgcgttctgtgttatctgatatgttccgcgaagccattgttgaagggcgtatatctcaaaatccagtaacgccaacaagagcaccgaaaatagtagttacaagagaacggctgaaactaaagacatacaactgcatcagggaggcagcagatcaacttccgacatggttcccattagctatggacttagcccttgtaacaggacaacgtcgcgaagacataacgaatatgcggttcagtgatatttatgatgatcgtctccacatcaggcaaattaagacaggaatgatgattgctatccccctgtcactcagccttccggtcgctggtttacggcttggtgcagtagttgaacggtgccgcatggtaagtcggggggattatctaatcagtgccggaattagaaaaaacagccctgacggcagcattcacccggacggcctgacaaaaaaatttgtcgcagccagaaaattaacaggtatccagttcagtgaaaacccaccaacttttcacgagatcagaagcctggctggacgattgtacaaagaaacatgtggggaagaatttgctcaacgtctacttggccacacatcggagaagacaacaaaaatgtatcttgatgagagagaaaaaacgtacttactgctctga

SEQ ID NO: 377588 - DNA, 282 bp, Salmonella enterica
atgaatcttgtgacactcaaaacgtggggaaaactcagatatccggataacccaccatcaatatcaacgctgagacgatgggcaaggaatggaaacatttatcctgcacctgaactacacgggaggagttacagggtggttccggaggctttctatatcaacccaaataaggttgataccgatataacacaccatcagcctaatgggcgacaagggagagacagtccgttactggagaagttaaaacatgcagcggaaaaaatacgatcccaatttgcctag

SEQ ID NO: 377589 - DNA, 456 bp, Salmonella enterica
gtgtataccccggacgaactggaagagccacaggaaaaaatcatcaatcctgtgccggtacagaattatagcgaggtaagcgagcagcgaacagaaaccatcgaacagcgtattgacgaagcgtggattgatgaattccggcagcgtgtcgaaagcgcggccacgactgaggaaaccactgcattacgccaagagatagaggatcagaaaaaccagatcggcgaattctttgccgagcttaaaggaaaagtggttcggcgtcatcaccgtctcaatgctattgccagtatcgagaagatgataaatgaccttccttcatcaggtgatccagaagcagaacaaaaatttactgctctggaaaatacgctgaatgctgcccggccacatctgggtgaattatatgaggcgtataaaacgacactgacagatatgaaaccagaatatatcggctcctga

SEQ ID NO: 377590 - DNA, 2130 bp, Salmonella enterica
gtggcgttgacagtgtacaagcccgacgagcaggatgaatcctcctggctgacgctgtaccagctttacatgcacatcgcaccattatcagaatttccgaaacgccccctttaccgcgtcacgcaaaaaggccacggggtgcgaatgcgtaaacattcccgccacgatgataaccgtgaaatcgtgccggacgtgctggcaaataaacacggcaacgccagaacgctgatgcaaggtgaaacgctggccgtgctgcaacaaaaatcgtttctgctggatcaacggctggagccgttcgccctggtgcagcgtcttcagaacggtaaacccgcaggcgatctgttctgggtctcgatgcgcccggaatatcttgagctggacggggaatgttacgtgtgtctgcctgactggatgcacagcgccctgaatcacggcgtgtttgatgatgtggtagtgcctcctgtgccgctgaaagtgacggtgaaagcaggggatgcggtcgggttcctcggcgctcaggatctggccgacgaagataaccatccgcagattatcaccacggactataaagcccatatcgagttgctgagtctcgacgagcatgtgacggatgtggtggcaaacgtgaaggggatcaaaacgggcaaacagttcattaagctgaagctgaaacgaccgctgtacctgcgaaacggggagggcgaggaaagtacctttgagcagatgagcgccattacccgcgctgatgcagggaaaattattccgcgcgatgccacatacccgtttacggataaaaccggggtcacatactttcagatccgcccgcatacgtgggtgcaccaggacgatgtggaacagctcagccagcacgatttagccgggctaaactttgactgtattaaagctgaacatacaaccgattttacccgcacgctggatgaacgctgggttattgatgccctgaaaagcatcagctcgcactttgacagcgaaaaaggacccgcatcggcacaggcaaaaatgttttatgacagcctgatccacaacgctgaaaacagaagaccgcccgacccgtatcccgataaatctcaggacgaactgctgttcggcgcactgcatacgaaccagatgaacatcccggaatatgcgcggcggctgatagtgaaacacgacagcgactggcacagtacccgcgaagatacgcgctggtcatcggtatttaaggccagggatgaaagtccggttgtgcagctggctaacgggggatttctggacgccacgcgctggatggataaggttccgccgttcgccagtcagcggtcagtatggcattttcatccgcttgaattcctggaggcgattaacccaaaaggaaattgtgcatgtggcagggatatcactttagatgaattgtgtgatattgccccaaaagccgataaggacattttggctcagtatttgccagcatttaatgatggtttccgcgagtttggcattatatcttgtagagaaaaagctcatttcctggctcaatgttgtcatgaaagcggcggtttaacacttactaaagaaattggaggaacaagagccagttatgctccctggtatggtcgaggattaattcaattaacatggcaagaagtatatacaaagtatggtgcatatgttggtgaggattttgaatcagatgacgcctccagaaataaaatagcacaatatccacattgtgtccggtctgccttttggttttattgcgtgaataaaaatgtatccaaacatgctaagaatgatgactttaacatggtcacagcacttattaatggcgggttcaatggatacaatgacaggcttaaatattttaatagagctgtgagcgtttttaaagctgaacatcttaatattcttaagaaagaggctaacttctcttttgaagatagcgaaatatataactatcgcgtatatgcctatagttgggggcgataccacgatccgttaagaaatgaaagcggtaccgataaggataagacggaggcgctaaaagcttacagaagggcggtaacactctatgaacggcgtggagacgcagggaaagtgactgatatagaaaataaaatcaacgcacttggttaa

SEQ ID NO: 377591 - DNA, 462 bp, Salmonella enterica
atgaaaaaagtggttttgtttttagctattgtatctttctcttctgtggctggaattactgacatcacaacaaagccagttgcattaatagcattgaaaaaaaacagtgctcaatatgttgatgtttgtaaagcggccgatgattcctgtaaagaagggacttctatctggaaagaaaaaaatgcggatggcatcttttatttaacaacatcacatcttcagctaacgaagctgaaaaaagatggtgatacatattctaaaatagtttcatgggattttactaaagaaactaaaaatgagtatattcctgatgatgaacttaccaaaaatgatgtatatatatatccagctttatatcctttaagtaaagttaaaatggccgttgcgttagtatcgaaatggtcaacaaattattccgggggggcgcgaggaagaatacgcaaatttcatgatgataaatga

SEQ ID NO: 377592 - DNA, 447 bp, Salmonella enterica
atggagaaaaattatgatttagtggtgttaattgcaatgtttctatgcggctcatcgtttgcaaacgatgagtatttttcatgcgatacagcaaagggaatcattaaattagatgtaaacaaggatgaactacagtacaccttaacgaaaggccgcaaaagtgaatttacctatgagtcaaaaggtaatgatttttcaggatttaaatacaatcattattcgcgatttcaaaccgattacttaaacgtgtcgtttgtgaatgccgggtataaatacacgatgttcagtaattatgaagatgagaatgaaagtcgtggggttagtgttacgaatctgaaaaccaaaaaagaatctgtttacgattgtaagtccgttggtattgaccgccttagtgatttgtcgtcaaaactagcctgtgataaagactctgctcttggttgtgagtag

SEQ ID NO: 377593 - DNA, 882 bp, Salmonella enterica
atggagcttttgttcgtcaaatctgagtccacgttttcttacttcgaagccacatgctattatattgataagcatggcaagccgctggcgctgtacagtgataaagccggtgtttttcgcgtgaacaataagcacgccaccggtggcgaaggacatacccagtttgggcgggccatgcacgagctgaacatccagactatctgcgcggaaaccagtgaagctaaaggccgtgttgagcgggcgcatctgactttgcaggatcgcctggtcaaagagctgcggttacagagtatcaactcaatggaggctgcaaatgcctttgctgaagcctatatagctgactataaccgtcgttttggtaaagcgccccgacatgactttgacgtgcatcgtgcggttgaacatgacgaagatctggatcttattttcacggtacgggaacatcgcaaagtctcaaaatcgctgacgatacagtatgataaaatgctgtacctgattgaagacagcgagctgagccgtcgtgctattggtaaatacatcgacgtgtatcactaccctgatggtcgtaaagagctacgcctgaatggtgcagcacttccctactctacctatgaccggctgtcagaagtcgatcagggcgagattgtggataataaacgacttggtcgtactctggagtttatcaatctggtgcagagtaaacgggataacactcgctctaagtccgttccttctggtgatggcccttcccggcgacggcccagagaggaagggaaaaaatctcagcgttcattgaataacgacgacatgctcgaagcgcttaaacagctccagtcgcagtcagaggagatttttggcaaaagagccagaaccggacgataa

SEQ ID NO: 377594 - DNA, 162 bp, Salmonella enterica
atggttgatgacgtgactaccctgcccgtcatgttcgtcacaatttatggaatgaatgagctgagcaagaagcatctggggacacaggaaaacattctgacttgtctcgaatctggtgtaactacgagatttagttctcacaatgaggctatgtgtaaatag

SEQ ID NO: 377595 - DNA, 261 bp, Salmonella enterica
atgaaaattaaatatattttgtttacttcatattctgcggcaagtgttgccgcattttctgaggaagaaaatagccaactagcgagtattaatcagaaatctagtaagatactaccaagaggaaatgaagtatttcgacgcgatgctcccgtaacaacagctccagacacgcatctttttttggtagcacgcgttatgttgaataggccgctgcgagaattgagcaccacagcgacctatttacacatagcctcattgtga

SEQ ID NO: 377596 - DNA, 786 bp, Salmonella enterica
atgaaaaccttaccgctggcactctttatcattccttttctgaccggatgcggcgccaataatacgccgcctaaaacgcctgtcccgggtgaaaaaacctctaccaaattacgtaccctggaaacaggcgcggcggctattcaatcccgacctcctgtcgatgccatcagtacctaccttgacgggttccatttttatagcggtgataaaaacggacagatggaggcccaccattacgttaccgtcctgaatgaagatgtaatgcaggcggtaatttacgacggcaatactaaaaacgcgcgcctgatgggggtggagtacattatcagcgaacgtttatttaaaacgcttccacccgaggagaaaaaactgtggcacagccaccagtacgaggtgaaatccggcagcctggtggcacctggcttaccgcaggtcgctgataaggcgttaatgagtaagattgttaatacctacggtaaaacctggcacacctggcatactgaccgggataaaaccctgccgatgggtatccctgcgctgatgatgggctttactggcgaagggcagcttgatccggcactgttggccgatcgcgatcgccgtctggggattgatacccaggccattaagcacgcgcggcaggatctgccagcgcaccccgtcattaagggcgctaacgcctgggagcagggggaaattatccagctacaacgtgttcagggttctggcgaacacgggcgaggcgataccgcgcatttcggcaaatctgagcaatcccgacaataa

SEQ ID NO: 377597 - DNA, 330 bp, Salmonella enterica
atgctgatgactaccggggcaatagtgtttggtttagccctgctactgttcgccagcggcgtagacgccgcaagccgttttggcctggggctggtgattgcttccgggatgctgacaggcactctgtttacgatgtttgttctgcccaccgtttatgtctggctggcgcgcgattgcgccgttgcgacggcatgtcagcgcgaagttccctttcatcagctcaacgcagtgcataccacgtcatttgctgttgtcgtggtatactttttcgtcctaagatctgctcgccatgttgctttattcatcaaacatcaaaatcagtcaacgtaa

SEQ ID NO: 377598 - DNA, 894 bp, Salmonella enterica
atgaaaccgcagatttatcatgttgacgccttcaccagcgaaccctttcgcggcaactctgccggcgttgtcttacatgcggatacactaagcgacgcgcagatgcaactaattgcccgtgaacttcgtcactcggaaaccgcctttttgctaaaaagcgaagagagcgatgtacgcatacgctactttacaccgacagtagaagtccccatctgtggtcatgccaccgtggccgcgcattatgttcgggcaacggtactggggttgggaaacaccaccgtctggcaaacctcgttagcgggtcgtcatcgcgttgaaattcatgccgaatacaacgactatcgcatcacgctggagcaaggtaagccttcttttgaactaccgtttgtcggagagattcgggctgccatcatcgccgcgctgaaccttactgaagatgatatcgtgccgggagcgccgattcaggtggcttcaaccggacatgcaaaagtgatgattctgctcaaaccagacgttgatattaatgccctttctccggatctggcagccctgatggcaattggccagcaaattggctgtaacggcttttttcctttccagattcgtccgggaaaaaacgaaaccgatgggcggatgttttccccggcgatggggattgtggaagatccggtaacgggaaatgccaatggtccgatgggagcatggctcatccatcatggtctgatggcgcatgacggtaaaacgctgcagattaaaggtcatcagggacgcgctttaggcagagagggaacggttgatgttactatcaccattcgcgataaccagccggaaaacgtcaccatctccggccaggcggtcattctgtttcatgccgaatgggccattaatttttaa

SEQ ID NO: 377599 - DNA, 234 bp, Salmonella enterica
atgccccacgttgatatcaaatgttttccccgcgatctgaccgacgaagcaaaattggcgctggccgccgacattaccgatgtcatcatccgccatttgcaaagcaaagagagttccattagcgtagcgcttaaccacgtaccgcccgaagagtggcaggcggtatgggataccgaaatcgccccgcagatggaaacgctaattaaaaaacccggttacacgatgtcgaaatag

SEQ ID NO: 377600 - DNA, 960 bp, Salmonella enterica
atgccattaacatcagctggaacctacgcgcgggcatttaaagcagaaacgaatcttcctcaggctgcgggaaactatgaaaataagctggcgactaaattcgccaagggaatggtgggcgtattcacgctgggaattggctatggaatttttcgcttgattgagcattattgtaatgttcgacctaaagttgccgagttctgtgctaatgcagagggtatacacgctaatctcatggccgcgtctgcgttacaaaaaaagacggtggaatgtaatcttaaaagcggcggccagttgcgactggaagaaatttctgtcggccccaatggcgagtcggtagtaagaatatccgacgacaaccacacggatgaggttcccggtacgttcaaagagatctgcgtaaagctggaacaggaatttgaaacagcgccaggattatatgctcttagcgaaagttataagactctggcggcattttcagaaatgaacgccttcaaaatagcgccaattataaacggtccggagccgcagttctatggtgagaacttatatgtcagaagtatgtataacatacataggcaattaagccaggctgcggctgaaggtaaaaccactgtgagaatgaccgtatgcgaagaggcaggcgaacagtaccctcttgagtttatagaatttccggacccggtaacggagcagataaaggtaatacttacaaacgaggccacccaagaggacattaccattgagggcaattttgtccagttttctgaggagtttgagagaatatttactgcccttgactcaacaaatgagacgtttaaaccgctggaagagagaatcattgacgttgccagaagcgctattgcaacaggggtaagacctgctgacgatgccagttccatcatgtcgacgattccactgctgagggaggaagactcgtctcgtctagatccaggttaa

SEQ ID NO: 377601 - DNA, 378 bp, Salmonella enterica
atgaggaagtcagacaactatacgcatagaaaaacgccactttggtatgtactggaatcagatttgataaataatcctttgcggtttttattgctgctattgtgccgtttcgcgatcggatggctgctttttcagttggttgcgattattgttttgggaatcttattgctgggcgttttgctcttcaaccctacggctttcatacaggctattgcaaccaccgagaagttaaaccatgtctcgattgtattatggaatacgcttaagttatgtacatggcattacggtgttatagctggttttgtttttatgttaggatgtactgtaaacaaagggataagacaggctcatcgcctaacaagaaggtatggctcataa

SEQ ID NO: 377602 - DNA, 378 bp, Salmonella enterica
ttgtcttctggtaattggtgtgatgctgttggcgataaacatccctacgtttacataacgaatggaaatgcgcgttgtagtcctgcagaaatcgtaacagggccagacaatattacttatttcgatttatacacaataacagatgacgatcctcatcatccaaaagccgaaaaaatccgtattttaatgaatgttaccgactatgacacatttgatgtaacagttgctggttatcgcgttgaaacttttcgagcggtagatacagatgaaaaaattgctgagatttctgaatttattaaaaatgatatcataatgtcattgaataactcatcacttgttggttacaaaataaaagatcctatctatctgtgggattga

SEQ ID NO: 377603 - DNA, 135 bp, Salmonella enterica
atgattacgtatcaagacatcaaagcgaaacagcagttagcaacagaatgtacgcaagcatgcctgaataaagtctgttatatggcaaaaaagttaattgatatatgtcaggtcactcaaattgtcttctggtaa

SEQ ID NO: 377604 - DNA, 969 bp, Salmonella enterica
atgccgatcacatcagttggaacttatgcccgagcgtttaaagcagaaagcaatcttcatcacgccgcaggaaattatgagaatacattggcaacaaagtttgcaaaaggaattgtgggcgtatttacgctgggaattggctatggaatttttcgattaattgaagattgtcgtaacgttagacctaaagtggctgagttttgtgctaatgcagagaaaatttatgccgcacttgctatacgggtcgccttacaaagtgtcgataaaactgtagaagtctggcttaatgatggtcgtcttttaacgttagaagaatttaccgcctggccaagcgacgaaagacatgtcagaatatccgatggcgaacacacggaagaatttgtcggtaccttccatgatatttgtgcaaaactggaaaaagactttgaaatgatgccggggctttatggtcttagcgagcatcacagaacgcttgcctcattgtcagagatgagtgccagcaaaatagcccctgttattaacttttctgagtccgacgttcgtcccaaaagtatatataccagtaatatgcgtattattcatcagcgcctgagtcaagccgttgccgaaggcaatacaaatgtgatagttccgttgcatgaggggctgaacgatgtaggagaggttgaatttatagaggcgctaagtcgaaatagtgtactggttaaaaacagagaagctactaaatttgttgaaggggggctgcgcgatctttgtcaggagtttgaaaccatatttcatactcttgacccaaacgatgactttaaatccgttgatgactggattaagcagttaacggacccctgcgaaatagtcgatgatgtaaacttaacgggggctatttctccgagtgaaatcatagaggactatttttctgacgaatcagcgccgcggctgaaattcgttgatgaccattacagaaaagtgtga

SEQ ID NO: 377605 - DNA, 138 bp, Salmonella enterica
atgaaatggtatatctggttatttctactgacgtgttttctggggggattgacgatgtattacgtgggaattgatcgtctggagcaggagttgatttttattggggggatcaggattgatcttgtctggccattctga

SEQ ID NO: 377606 - DNA, 291 bp, Salmonella enterica
atgcctggatattataaaatcaatcacagttgggctgacgggagacggcataccgatgacgatgtcctccttgaagcagtgattacctcatatgctgatattaatatatcagaaacactggctcgatggttgaaggacaaaccaaaaagtactaccgatattgattataaaaataccatctgctggtactgtggtggagtatggttacattacattacgaacaaaaacactctgtttttatatatgcactcaagcggtgaagacgcttttgatttacaggtaaaattatga

SEQ ID NO: 377607 - DNA, 735 bp, Salmonella enterica
atgaaaagctattacttactctttttcctgccattacttatagtgaaacattcaactgctaacacagtagaaccatttcatgaacctgaagagtcagtgaacagtcagttttatttacctccccctccaggaaatgatgatcccgctttccgatacgacaaagatgcgtatttcagaggttatgccatgaaggactctccccgctggaaacaagcggctatagatgcagatgtgagcgtggagaatatagccagaatattttcaccagtcattggggttaaaattaataaacatgacaccccggagacatggaaaatgttacaaaatcttctgaccatgggtggctattatgccactgcttcggcaaaaaaatattacatgcgcacacgaccttttgtcttatttaaacactccacctgtcgcccccaagatgaggatactttacgaaaaaatggctcttacccttccgggcatacagcttatggcacacttttagccttagttctatcacaggccaaaccagaacgagcccaggaacttgccagacggggatgggaattcggacaaagcagagtgatatgtggcgctcactggcaaagtgatgttgatgctggccgttatgtgggagccgtagaatttgcgagattgcaaacaattccggcatttcaggaatcattagcaaaagttcgtcaggagctgaatgataaaaataatttattgagtaaagatgaataa

SEQ ID NO: 377608 - DNA, 243 bp, Salmonella enterica
atgaattacgcctatgaaaaagaactacatgatgtggagcagcgctggttactgggggctggtgaatcctttgaaactaccgtgagtccgaaagatttcaacctttcagaaggcaggagagtcatatgtcttaatctggacgatactgatgaggattcatatcctgagtattatgaaagtaacgaaggtccacaaccttttgacgcaaaacgttcatttatccatgaagttgtcatgcgctga

SEQ ID NO: 377609 - DNA, 891 bp, Salmonella enterica
atgccaataactaacacgtctccagaaaatatattaaaatatttacatgcggccggtactggtacgaaagaagcgatgaaaaattcaacttcaccacgcggtatactggaatggcttgtcaatttttttacctgtggtggagtaaggagaagcaacgaaagatgctttcaggaggtagtggaaaagctgacttcagcgttatcacatgtaaataaagatgctttttatagaggtaccaaaatatttatggagggtatcaacgggtgtactacatgcctgtcatgtgtcacagtccctgaatatgaaaataaagcccccatggtcactatagaagtgagtaaagatggaaaaacgatagcaagtgaagttgatggtgatacattttggaatgtctgtcaaatgttaaaactgattcgtaaatataatatacaacatgaggattcacttttaaccgaggaaggtaagcttaacctacgtggagtatacctggcttataaagatttgcgggatgaaaattttgaaaatatagatgcatcctctacagatttctatggttcaaatctttctggcgtaaatttttctggcgcaaatctacacgacgcaacaatggcttacacaagtctagttagcgcaaacatggcaaacacagacatgtctggtgcaaatctgactaatgcagacatgaccaacgctaacatattctgtgcagacttaactgatgctattctatgcaacgcaaagctaactggtgttaatctaaaggatgcaaaggcagtttcaggaaaacgattacccgaagccggcctaccagatgttcaacatcgtcttgacacccaggataacactaatgaaacgcctccctctcttttgccaatttcagattggttgtga

SEQ ID NO: 377610 - DNA, 396 bp, Salmonella enterica
atgaaaattgctcgcatctatgaaaggggccgtacatcagagcaggatttggcccgccaagctgacatcgaaaaaacgaccatcgccagtggtttttatattgccggtatttatcgggaaaaagcatcgggtgccagggctgacggacctgagcttctccgcatgatcgctgaccttcaggttccattgataatggatttggaatcatatcgtttggcggaagtggcgagggtaaacactaaagtgaatgccacatcacttgtgcaggccataggccaccttcagacaatacgtaacctgggagtgacattaccagcaattacgcccgtttcggatacccgtattgctgtcttttttcataacagtttttctactgtcgtggggtcagtcccttaa

SEQ ID NO: 377611 - DNA, 351 bp, Salmonella enterica
gtgtattacctttgtgaacataatggatgcgtgatccgtcagtcggaacttgatcagaaagcgggacgctggatttgcgataacacaggcatgtggacacgtgatggactgacttatttcagcgcgtccggtgaggaggttccgccgccacgatccattacctttcatatctggacggcttacagtccctttaccacctggatacagattgtttatgactggctggatgcgctgaaagatccaaatggtgtgaaaacctttataaacaccaccctgggcgagccttatgaagaggcggtagccgaaaaactcagccatgagcttttgctggaaaaagtgattcattattaa

SEQ ID NO: 377612 - DNA, 318 bp, Salmonella enterica
ttgttctggtgcctcggcggtgcagtagccaaaaactaccgtgaaaaatcggtggatgtggtctgctatgacgaattgtcatcttttgagccggatgtcgagaaagaaggttcgccgacgctgctaggggataaacgtattgaaggttctgtctggcctaaatccattcggggctccacaccaaaagtcaaagggtcatgccagattgaaaagggggcaaatgaatcggcgcattttatgcgttttcatgtaccgtgtccgcactgtggcgaagaacggtaccttaaattcggtgatgcagtacgccgttcggtctga

SEQ ID NO: 377613 - DNA, 390 bp, Salmonella enterica
gtgtacgtgggggcagaaatgaaccgcataaccacgggcgtaatagcctcattgttgattgtggtcgcggcgctggcgaacgcgacaattaccgacatgacgaagcgccagcgtgacgttgccgccctcgatgcaaaatacacgaaggaattagctgatgcacagaccaggaatactgatttgcagcgccgccttgctgctggtggccggcgctgtacagtgcccacctggaccgcaaccaccagcgccagccgcgtgggcaatgctgccaccgtcgaactctctccagattctggacggaatgttctcgatatccgcgccgggatcatcagcgaccaggaaaaactgaagtatttgcaggagtacattcggacgcagtgtctgaaataa

SEQ ID NO: 377614 - DNA, 204 bp, Salmonella enterica
atggcgctaaggacgaaagttaaagcccttctggctggtggcgcgagtgtaatagtgatagcggcggcgcttttgggcggtaatgacggtctggaaggcaggcgccacgaaccctatcgggatgtggctggcgtacttactgtatgtgatggacatacgtacctggcaagcactacaccgatgcggagtgtgatgcactgctga

SEQ ID NO: 377615 - DNA, 189 bp, Salmonella enterica
ttgaatatcgaaaagcacactacgtggctggcctacctgtgggcgtttattagtagcctttttgctcaatggacgctgaatgactacggcgcgttgattggcatcatcctcggcatcggaacgtttctggttaatcgccactacaaacagcaatccgcgcaggcgcagaaagccaggtggcagcgatag

SEQ ID NO: 377616 - DNA, 147 bp, Salmonella enterica
atggcaagtttaaaggacagattttttcctgataaatatcagaatttatcttatattatcagcctgttcaccatgcaacgtatgacttttcctttcgagcaagtcagctatattgcctgtcgtaacccttttgccattctcaagtaa

SEQ ID NO: 377617 - DNA, 258 bp, Salmonella enterica
atgccacaacaaacaccaaaagccagccgtgttctagattgccgcaataccaccactgatcagtcaggctattgcgaacaacacaaaagcgaaggctggaagcagaaccggatcaccaaatgcgcacagtggtcatcgcctgccagcgctgagtgtcctttccgttgcgatcgtgagaccaaacagaatcacagccaaagcaccaaagaaagcccttatctggtgccactgcgatatggcaatggcatctccttctga

SEQ ID NO: 377618 - DNA, 2157 bp, Salmonella enterica
atgttgtatgttcgtaactctcagcttaaaattgataacaaggctatattgactgcgggttctcaagtggtaagccagttagataactctcatattattgtttctggtaattccaagctgaatacaaatacattagttcttaatgccaacacaaactcaacgatgctggttagtggtggttctgaggttattgcaaatactttttttatgtcatctgctgatgattataaaagttcatatattaaaattgatggtgccgatagccgtttaaatgtcagcgacgcttacctgggatatattggtaatgcctcactggttgtctcaaatggtggtgaggttaatgtcagaaatgaaattgaactggccgaaagagcagggcaaaatgcaaccattacaattggcggtcttgatgagtcagcgccagaagcaccagggtatgtaaacgcatcagaaattgtattcaaatcgggaacgggggagataaggtttaatcacacttctgataattatgatttttcaacaccaatctcagggatgggtgatttaacatttattaacggtacaactaacctgacaggtgataataagaagatgtcaggcaaggttaatgttggtgcgggaagtattcttaatgttttaaatgataacgctttgggtgatagttctgtaactattgcttcaagtggccaactggcattactaacagcaaatgattttaaatttaataataatctggttaatgacggcactattaccttatcagatcaaaatacttacggtaagttggtgactgtttctggtaattacaccagtaataatggggcgttggtttttaatggtgctctggctgatgataatacagtcatagataaactgttaatcaaagggaattatgacggaaccactaatgtggcagtgaataacattggtgggattggggctgaaacactaaacgggattgatattatttccattgacggaaatgttaatggatcatttaaacaggctgggcgtatagtcgctggtgcatacgattatagtctggttagaggtgaaggggctaatgaaaatcattggtacttaaccagtcaaaaacaaccgacaccgggaccggatccagtccctacgccggaacccacacctacacctacaccggagccaactcctgtaccgaaacccagtttcaatattctgcgtccggaagctggtagctatgtagccaataattatttttccaatactatgttcctgaatgattttcaggacagaagtggggaagtaaagtattttgatccgatatctggtacttataagttctctagcctatggatgcgacaagagggggggcataatcgcttcaatgacagcaccggacagttgaagacacaaagcaaccgttatgttctgcagctaggtggagacttatttaaatgggcaggtcgtgacgatgagtcaattcgtattggtattatgggtgggtatggtaataaccatagccgtactcattcgtcaattactgattattcctcaaaggcatctgttaatggatacagtgctggtttatatgccacctggattaaaggctacgatgataaatcatggacttatgtagatgtttggggccaatatagttggtttgataactcagtaaaaggggagcagatttctgaagaatcatattcctcaaaaggttttactgggtctattgaaggaggttatgcttacaaggttggtgaaagtggccgtacttcctattggcttcaaccagtggcgcaacttgcactgatggatgtcagaaccaggaacctcaatgaaaaaaacggcactaacgtttcattcaacggaagcggcaatatcatgtcacgactaggtgtaagagcttatactaacggacataataaaatagatgataatagtggccgtacttttgagccgtatgtagaggtaaattacattcataacaccaaagactttagcgtcaaaatgaataatgagacagtaagtcagtctggcgccagaaatgcatttgaggcgaaagtgggtgttaatggacagctttcagaaaacaccaatgtttgggtgaatgtatcccagcaagtaggtagcaacagcttttctgattcccaggccacgttgggtataaaatacgcattctaa

SEQ ID NO: 377619 - DNA, 474 bp, Salmonella enterica
atggatcccgaagttgaaattgatgatgatacctatgatgaatgccgtgaggtgctatcacgcatacttgaagatgcatacactcaaagcgggacattccgcagactgatgaattatgcctacgatcaagaattgcatgatgtagaacaacgttggttactgggagccggagaaaactttggaactaccgtaactgatgaggacctggagagttcagaaggcagaaaagtgattgccctcaacctggatgatacagacgatgattcaataccagagtgctatgaaagtaatgatggcccacaaccatttgatacaacacgctcatttattcatgaagtagtacacgcgttgactcatcttcaggacaaagaagataacaatccaagaggcccggtagtcgagtataccaatatcattttaaaagagatcggtcacacatcaccaccaagaatctcctacgaatttagtaattga

SEQ ID NO: 377620 - DNA, 615 bp, Salmonella enterica
atgcttcatactaacaatcccgtcatcaaacacaaagccggtttgctcaatctggctgaagaactcagcaatgtatcgaaagcctgtaaaatcatgggcgtttcacgtgatacattttatcgttaccgcgaactggccgacgaaggcggcgtggaagcgctgataaatcgcagcgctcctgaccttaagaaccgcaccgatgcagccactgagcgggctgtggttgattatgccgtcgcattcccggctcacggccagcaccggaccagcaacgcgctgcgcaaacagggcgtttttatctccggcagtggtgttcgttccgtctggttacgccataaccttgagaacttcaaaaaacgcctgaaagcgctggaagaaaaagtggcccgtgatgatattgaactgactgacagccagatcgcagcgctggagcgtaaagccagtgatgacgaggcctgtggtgaaattgaaaccgctcatccgggttatctggggtcacaggacacgttctacgttggcaatctaaaaggtgtcgggcgtagttatcagcaaacattcgttgatacgtactcccggaatcagctcatgccctcccccggacaatccgtttattaa

SEQ ID NO: 377621 - DNA, 318 bp, Salmonella enterica
atgagtgatgattcgatcattaaaaactcttcgatgcttttggcctatttaggtggtttgggatggggaagcgcctatttttatgggtggggagtctccgcatactatggtttcccatggtggtatgtaggcgttggtcccgacaacattgctcgaagtttattccacgctattagcccgatggctatatttatagtggcatgggggattggtattttattgttttttgtagtaaagcgaaaagcacacattaatgatcttagctttttacgtctttttttagctgcggttttgttctttattccaattgttatttag

SEQ ID NO: 377622 - DNA, 1227 bp, Salmonella enterica
atgccattcagtgttggacagggttatttcaaatcttctatcagcgctgaaaaatttggcgctataaaagagagttcacgccttccggaaatgaatttgtgggaaaaaataaaagcatatttcttctccacataccatgcagaggcactcgaatgtatctttcaactttaccactatcaggagcttaatttaacagcggtacaggttcgcggagcatacatcaagctccgtgaattagcctctcagggatgtaaggaacagtttattatagaatcacaggagcatgccgatgaattgattattaaggatgataacggtatgattcttttatctattgaggttgaatgtcatccggaagcctttggtcttgccaaagaaatcaataaattatacccgaaggaaaaaaatatttctttgggcgatattaccagatttgtgatttttggggacagtttatctgactcgatggggcgtatgtttaaaaaaacacatcatatcttaccttcctatggtcaatactatggaggaaggttcactaatggatttacctggcctgagtttttatcatcccctctatttttaagtaaggagatgattaattttgccgaaggaggaagtacatcggcaagctattcatgctttaattgcataggcgactttgtatcaaatacggacaggcaagttgcatcttactccccttcccaccaggacctggtcatatttctattgggccccaacgactatatgacactacacaaagataatgtagcagagattgttgagcaacaaattgatgatattgaaaaagtaatttccggcggagttaataatgttctggttatgggaattccaaatttgtctgcgacaccttatggcaaacattctgatgacaaaagaaaacttaaggatgatagtatcgctcacaatgccctgctaaaaaattatgttgaagaattaaaagaaaaatatccacagcataagatatgttattttgagaccaccgatgcatttaagcagataaccgatgtggctaatggtattggttatgatacggaaaatccttttactcaccatggctatgtgcatattcctggaactaaagatccccgactagatatatgtccgcaatacgtttttaatgactatgtccatccaacccaggaggttcatcattgttttgccataatgctagaaagttttatagttaatcattattctaacgaataa

SEQ ID NO: 377623 - DNA, 357 bp, Salmonella enterica
atgaccaatgatatgtatctcaaccgcttttgttatttactcctgatctccgccgtggtcggaagcatttttacatcgcatcccatcgtgatgtggtttctgctcgccaacgtgatgacgctgatgatctacggtatggacaaaatggcggcacgtaaggcctggcgcagagtgccggaatccactttgctggtttttggagttatcggtgggtggcttggtgctattgttggccaacaacttttccgtcataaaacgcaaaagcagccattcaaaacatatttcatcgtcagtgtgatagtgagtatttcagttatagcggcgatttatcaactctatccatttttgtcttactga

SEQ ID NO: 377624 - DNA, 159 bp, Salmonella enterica
atgaccgtctcgccctggggattccgctatctggacctgctgcaatgtaataccattagtgcgttctatgcccgacttgccgtcgtgacgacatgctatctgcaggacgttcaacagaaacaggggctacagcctgagactaaccgattgtttttctga

SEQ ID NO: 377625 - DNA, 255 bp, Salmonella enterica
atggacaatacgtatatttgtgagcagaaactcgtctccagacgccatacgaataatttagaaaaatggcgtgataatgatcacacaagtcacattctgtatgatttatacgctgacgagacgcgaaaactaaataaaatatacctgtttttcaaacagatatattttaacctcctgctctcattcgtttcacctgcccatcgccagagggtgattcccactgaacatcaccatcgtaagaaaataattacttaa

SEQ ID NO: 377626 - DNA, 1986 bp, Salmonella enterica
atgaataacgagacgttattccgtttaagcaggacgtttattgctattaccgccgcatctggtttttttattcataccgctttcgcggctgagcctgcgaaagaggcgaccgcctatacccaacaggttaatcaacaatacacaaagaacctgccgttcagcgatcgacaggactttgccgatgcgcagcgtgggtttatcgcccccctgctggatcagggtattctaaaaaccgccagcgggaagccattctatcgtgccgaagactacaaatttgatatcaacgcgccagcgccggaaacggtcaaccccagcctgtggcgtcaggcacagctaaatggcatatccggcctgtttaaagtcaccgaccgcatgtatcaggtacgcggccaggatatctctaacattacttttgtcgaaggcgataccggtattatcgttatcgacccgctggtgtctccggcagcggcaaaagccagcctcgatctttacttccagcatcgtccgcagaagcccatcgtggcggtcatttatagccacagccacgtagatcactatggcggcgttaagggcatcgtctcggaagatgacgtgaaatccggcaaagtgcaggtgatcgcccccgccggatttatggatgaggccgtcagtgaaaacgtcctggcaggcaacattatgagccgccgcggttcttattcttacagcgccctgctaccgcgcaatgtgaaaggcaatatcggcaacggtctgggcgttacgctcaccggcggtgcgccaactattatcgcgccgaccatttctattaccaaaacgggcgaaaaactgactatcgacggactggaatttgacttcctgatggcgccgggcagcgaagcgcctgccgaaatgcatttttatatcccggctctgaaagcgctgtgtaccgccgaaaacgccactcacacgttacataacttctataccctgcgcggcgcaaaaacccgcgataccagtaaatggaccgattacctgaacgaaacgctggatatgtggggtagccaggccgaagttctgtttatgccgcacacctggccggtgtggggaaatcagcacatcaacgactatatcggtaaatatcgcgacaccatcaaatatattcatgaccagactctgcatctggccaaccagggttacacaatgaacgaaatcggcaacatgattcagttgccgcccgcactggcgaataactgggccagccgtggctattacggctccgtcagccataatgctcgcgccgtttacaacttctaccttggctacttcgacggtaatccggctaatctgaacccctacggccaggttgatatgggcaaacgctacgtcaaagccctgggagggtctgcgcgtaccattaatctggcgcgcgaggcataccagcagggggattaccgctgggcggccgaattacttaaacaggttatcgccgccaatccgggcgatcagatcgccaaaaatttgcaggccgacaccttcgaacaactcggttatcaggcggaatccgcgacctggcgcggtttctacctgacgggcgctaaagaactgcgttccggcgtggcgaaactgccggtcggcgcatcggcttctcctgacacgcttaaagggatgtcggtagaaatgttgtttgattatatggcgattcgtctggatagcgccaaagccgccgggaaagacatcagcctgaacttcaacctggacagtggcgaaaacctcaacctgacgctgaatgatagcgtgctgaactatcgccagacgctgcagccgaaagccgatgcgtcttactatatcagtcgcgccgatctgcacagcgtcctgactggtcaggcgaaaatggccgatctgctgaaagcgaagaaggtgaaggtgattggcaacaaggcgaagctggatgaaattatcggctgtctggatcaatttgatttttgggtcaatatcgtgacgccaaattaa

SEQ ID NO: 377627 - DNA, 669 bp, Salmonella enterica
atgaaagtcaaagcgaataaaaatatccattctgctaccagcagtcatactctcaaggtgggtctgaccgcgaattctactggatacacaagatccaataaaatagttgttgttggccccagtgaagcggaagtaaccggtataatagcattattacaacacgatggctttcaggtatgtcagggaaaaggggttaagttggatgctgacgatttacttatcgtcactttgagcaccgttccgctactaggttggtggagacatctggaataccttcatatgttaaaacgtaaagggaaatatcagatgctggctattattccaactgctttgaaagaaatcatgttacgtcagagtatctgcccaataattgagggaggaggaacgctggcccaactacataatgctttactcgcagcagcagaaacatggaaaaaaggaatcctcccaagaataaaccgaggcaaaagcactccagaccgcaagttaacggcagggcaagcccgtgcaatatataaacttcttgaagggaaatatattgatagtaaaactcaatatagccaacgttatctagcccttgaacgtcttggcttttctggaacagcgcaattttcattatttacagcaggaattggtaacgtaattcaacatcaaaattttattttttaa

SEQ ID NO: 377628 - DNA, 2610 bp, Salmonella enterica
atgcggggtatcggggccgtcactcatctttcctcaccgacaggtagcagcgccccttgccctgacttcagcgggatgtggaatagcatcagggactggttctcactgcccgttcaggatgaggccgcactgtgctttcacgttttttatcagccggatgaaggaacgtcgctgccggacaggctgaagcactttttaagactgaaggcgctggcgtctccgggacggcaggataacttcaccgcagagcgaatactcggtaccggtgaaaccatctgcatgatagcctccggtaaaagcagcgaccttccctccgtcacacttcacctgagcgaccaggaatggcacacggcgcagcctcaggaagcagtagccccgttagcagaggcaacagaaagccccggaagaggcccaacaggcccccccattacacgtacgcagatacagacatggctggacctgccgcaggaggcaaaaagcgacgctggcggctggagaaaatgggcccaggcgcagggggttactctcggaagtgccgcactctatctgaccaacactgggctgaccccctatggcagggagcgattacaccctcccaaagagagaggccgccctatcactgtcggccagatccagacgtggcgtgacctctctgaggaggcgcgcagtgcggcgggcggctgggtaacatgggcacaagcccaggggatctctatcaccagcgccagaaaacatctgacaaacatgggactgacattctatggcatggaacggctacagcatcctaaggagaggggggcccccatcactaaggcgcaactcctgacgtggtttaacatgtcacaggaagagcacaacaaagcaggcggctggataacatgggcacagacgcagggaatagcaaccagcagcgccaggagctgtctgacaaacacagggctgactacccgcggcatggaacgactgcaacttcccgaaaagagagggctccccatcacggaccgccaaattcaggcatggaaggacctgccgcaggagaagaagcacgaggcaggcggccgaataaagtgggctcagacgcaggggatagctatcagaagtgccgaaaactttctgaccaacaccgggctgactctttttggtatagagcgcctgctaccgccagaaaaaagaggaacgcctattacaaatgcacagattctggcgtggcaggagctgtcgcaggaagcaaaaaacgaggcaggcggttgcataaagtgggcacaggctcaggggataaccatcagtagtgcctgcagctatctgacaaacacaggactgacccaccatggcaggaaacggctgcagccacccgaagagaggggctcgaccatcagccaggcgcaactcctggagtggtttaatatgtcacaggaagagcgcacaaagacaggcggctggagaagatgggcggaggcacggggaataaccttcagaagtgccgaaacctttctgaccaacagcgggctgaccctctttggtatagagcgactgaaaccgcccggagaaagaggcgctcctattacaaatgcacagattcggacatggcgggacatgtcgcaggaggcgaaacgcgaggcgggaggctggataaagtgggcgctggctcaggggatagccatcggcagcgccagtggttatctgacaaacacaggactgaagtataatggcatattgcgactgcagcagtcgctgtctgctaccgtcacgagtgacagtcaacaaacatcgatgtccgcaggcgcaagcgatgagataaccgccagcgtgggtatcctcccggagcgcagcggggaaaaacggtcgcttccctcgaccaaagaggatatctcagccccgccggcaaaacagatcaagaaagaggaagacgccgtgacctggcgaacacaccagataaacaataacctgcccattctgcagcactggcgtgacccgacgatatcggtgatggcgcaggcggaaggcaagattgaaaccttgcaggttacacggtgggggcctctttttaacccattaccccggcagataaaagccagaattaatcaggatattcgctggtttctgcaaaatgaaggaagtcatgatgcgcgaatgaatgccatgatgtccgtcgctattccccttgatgacagcgacggttacagagggcgtacagtctacgcgcgaaccgatctggcggcgtttaccgtactgggcccctactccggccgcctgctggacagtgaaaaggtacggtgtgaatacgaaaaagaatatgggaaggaagccggtaattattattttgccacgcgaagccaggaacgcattgtatccggcttcccgcagggaaatctcctcagcctgcttaacagtccggtatttacccatcggacggcggaagcagaagtaagacagaacgtcagcgcggtgcttgtcgggaagaatatcaactttttcctcaccacacgcgacgtccacgccggggatgaactgtggtttgattacgggccggactaccagcattttgagccaggtgaaacgctacgcccaacgcaggtaaaggaggagccgccttcttcggaaggagaataa

SEQ ID NO: 377629 - DNA, 753 bp, Salmonella enterica
atgtctgcaaaaacaattgtgatcactggagcactttctggtattggcgaggaatgtagctaccagtttgcatatgaaaaatataaccttattttttcaggactagatattaaacaaggtgaggcattgcaaacaaaactgcggaaagtccaccctcagtgccattttatcatggcggatgtaactgacgaaaagcaggttataaatctgataaagttcaccataaaaatatatggaagagttgatgtagtgatcaacagcgcaggaacagaaggccatccctcaacgcacgaaaacaccactgttgatgattttcatcatgtatttaatactaatgtacttggaactcagcttgtaatgaaacatgccttacccattatgtgtaaacagtgctttggtagtctgataaatatctcctcacgagccgggcaagcaggtgtttccggagggggtatttatgctgccagtaaacatgctgttaacggactaacccgctctgcggcattagaggttgcagctaaaggcgttagagtaaatgctattgcaccgggccctgtagatacagatttattcgatcgctttgttgggcgcgacaaggtgaaaaaggcagcctttctcaacaggatgccttccggagaaatcataactacaaaagaaattgctggtatagcgttatttttggcttctgatactgcccgctctatcataggtcagataattactgtagatggcggctattcagttggaatataa

SEQ ID NO: 377630 - DNA, 264 bp, Salmonella enterica
atgaaacatcatgcttttatgctttggtcattgattattttttcattgcctgttttggcccattcataccgttccgtcagtttacaacaggcatcatgggaaatttttatctacgattttggtagtaagaccccgcaaccacctgcaaataccgataaaaagcaaaccaggaaaatcagttcaccgtcctgctctactacaaaacccatgatgcccacgccaattaacggatctaaaaaagagaatactttctccagaacgtaa

SEQ ID NO: 377631 - DNA, 162 bp, Salmonella enterica
atggcagtgaccaacgcccttctccattatcagacccagcgccgccttcgggcggccttttgggaggaaatatggtcgccaaaaataaaattcacggtcggcgcatgtgtcaacctctacaacggttacacaaacattgtttttttcagcaactggcggtaa

SEQ ID NO: 377632 - DNA, 240 bp, Salmonella enterica
atggtgttaaaaaatctgcgccagatgttattgaatacccattttctcattcactatctgagtgcgaacaacggttggtttcacgattatgcatataatatgatgcccttcggtatcaacatgaatatcatgttgtattcttttaagctcattttcttttatgattttaatgtttacctgttattaatttttgctgtggtagagttgtccttaatgatgaggtcacttaacgactggtag

SEQ ID NO: 377633 - DNA, 141 bp, Salmonella enterica
atgctgcaaaaaccgttactggtcatcacaatttttgtggtgatagtcctcacattctccatgctgcatggatcgttatgtgaagtgcgtatgaagttttggggagcggagtttgcggcgttcttacaatgtaagcagtaa

SEQ ID NO: 377634 - DNA, 492 bp, Salmonella enterica
atggcagaaattattcagcgtatagataaaaacaacgctgaggctccggagatgcggcgacgcatatgggctatcgtgggggcatcttccggaaacttagtggaatggtttgatttctacgtctactctttctgctcgctctattttgcacatatcttctttccttctggtaataccaccactcagcttttgcaaacggcaggtgtctttgccgcaggttttttaatgcgacctatcggtggttggctatttggacgcattgccgatcgacgcgggcgtaaagcctcaatgttgatttcggtgtgcatgatgtgcatggggtcgctggtgattgcctgtttacccggttacgataccatcggcacctgggcgccggcgctgctacttattgcaaggttatttcaggggctctcggtagggggggagtacgggaccagcgcgacatatatgagtgaagttgcgcttgaaggtcgtaagggatttttcgcttaa

SEQ ID NO: 377635 - DNA, 264 bp, Salmonella enterica
atgactcaggtccggtgggaatggtccctgaccggtgtactgggagccacccgggggattccgtatgtgggtgcgataatatccgtgctgtatgtcccgtctgcgggtgaaggcagcggcaatgcccccgaacgagatgaattctggtacgaggaaaagctgcggcagaaagcgctgaccggggcaaaagccacgacccgggtgaattacatcggattaaaaaagcagaaaatgatggaaaaaccccaatatcagaagaggtga

SEQ ID NO: 377636 - DNA, 477 bp, Salmonella enterica
atgaccgccccggaagggatggcgctgaccagcggtgaagatatgcaactggccggggagaagctggggctctttgcccacaccggacaactgagcctgaaatccggagaaggggcaatagatgtccaggcgcaaaacgccagcctgcggttgtttgcagagaagaagctgaggctgagctcagcgagtgacatctcttttgccgggaaaaaacgcatcacgctgatcggcgacgggagttacctgcgactggaggcggggaaaatagagtacgggacaacgacgatgtacctgcgccggacgaaaaggacgatggctgcgacacgaagcgctttacctctggataccccccgcgccctcctccggcaactatgcgggaacttaaccccgccccccctgggtaacgccggtgtatgcacaatcctgcctgaaggcgaaaggctgcacggatgccggtactgccgaagagcccgttga

SEQ ID NO: 377637 - DNA, 324 bp, Salmonella enterica
atggaccgaaaaacaccttcattgtatgaaattcttacttgcaactttacaggggatcttccccttgaagttattaacgaagaagaccaggtcattttatctgtattggataacatccagcgtattttgaacgcccgggtcgggaccatatcccatttaccagattatggcttacccgatatgaccaaaattctttttgtgcctgtatttaattcagattttagagaatggcaaaaaaaacacaacactggtggagattacatcgttttttctgatgtattatggactcctccacttgataaagatagggtgattgagttatga

SEQ ID NO: 377638 - DNA, 297 bp, Salmonella enterica
atgattgatattaataatgttaaagagaaattggaaagttataccgaaagtgaatttaagaaaatattggatgaattttatgcaaatcatagatcatcgccatcactcaagggtgacgagctagaactttatttggataatctccttgattttctgactgtactggttggaaccggagaagttagtgactttatatactatccagatacacctgaaaatgattcacctgaaggtgcattgaatgaagtaattaaatggaggaaatctcaagggcttcctttattcaaagactcatag

SEQ ID NO: 377639 - DNA, 993 bp, Salmonella enterica
atggtgaattaccgtcttatatcactggcgctgacaaccacgagtgaatccactcacgtcgtgagtatcaccacatcaggaacccccggttcatctaataataattcagatgagataactgaaaccgtcggctccacgggaaatgattccaccgacaatacggggatacctgcaattagtgaaactagcggaactagcggaactagcggaactagcggaactagcggaactagcggaactacgttacagaaagagcctgtaatatcaacgccgtccagtgagactcgtattccagaggctaagtacagctcaggcaccatccttacccgtacagtaaatgatacggactccaaaatacttcatagaaatgatgtagtaagcaatcctgatgcctttactctcagaatgaaagacggtgaagttgtcgtggatgtcaaaccaataaataccggcgatccggctgactaccgtgagctggtatcaaaaaatcttaatatcctgagggataaaagtggtgaggctgtcggtttttacggcatcgtggaaacgtatacgagtgaaactacccgaaatctgtcaggcaaagaaaaatatggcagaatggattatatcgttgccatgaacggagaagaaaagaaactcccttctgtcgcggctgactataccggtaaactttactacgatcaggagcaggccgcaggaaaagaagccgatatcagccttcgttatgaagatcgtcaggttaccggggccatactagataaagatcgcccacatttcagcatggaaattgatacccgaaaacctcacgaagtggacgaagatggcagtttcatggccgtgttagtggggacgaataaccgtgcagacaccaacatgcacgggtacatttatggcaatttttacggaaaggacggtgaaatcgtcgccggttcggtccactctaaagatgatgacagctggggtggcgtgttcgggggagaaaagcagtaa

SEQ ID NO: 377640 - DNA, 1050 bp, Salmonella enterica
atgaaggcgttgccggctaaaatgcgttacttcattgtacttctttttcttttccagtctgggcagagcgcagcggcccgtttctgcaataacacacctaaaaattttattctcagaccggatatacggttcagtaatcttgatgctcccgctgatgcgtcttcctatccgtaccaggtgggtaaaagtgcttattacagtgaaaacgtcttgtttgattactgctggccatattatctcagagggcaggctgtaataacccgtccggtcgtgggccagtataacgggcaggatatttacgatattggtgtgcctaacatcggggtgacttttacgatagcggacagtcaggaaagcgggtttggcgaaggagtggagatgaaagggaataatctgatggacgttataccgcctaatggccgatggtatcttgtcccaagaatgggggcatcgataaggattggcgtcattgtgttgggcaggcttgcacccgggtggattaatgtcccccctgttcatgtgggaaacttttcagtcacatcaagtaacagtggggtcaacaatctgggaggcacctcatttattattctgaacggttttaatttctttgttaaaacaaaaacatgcagtctttcgcaacgtaactatactgttcagttagctgccgcctataaaaaacagttcccgtcagtcggctcagaggtaccaggaggaaaactcaatttacagttaaaatgccaggataacatagatgtttatgcaacactgacggatgccacggacccggcaaaccagagcccggtactttcactggataacgcatcaacagcacgagggatgggtctgaagatatataaagacggacactctgaagccttaagattcggcccagattcctcagtaaaaggaaatacaaaccagtggcgattttcgacatacaggggagatcctgcccctgcggtcagtcttaaagttaattatattcgcaccggagacattcaggcaggcacggttcaggctatatcaacaataacattttcatatcaataa

SEQ ID NO: 377641 - DNA, 2547 bp, Salmonella enterica
gtggaaaacaaatgccggttacaaaggacaacaacaggcaggccatcggtattattgcttttcattatattgccgtgtctggtaaacagggatgtactggcggcagccgatgtcgaatttaatccggtatttttacaacatatacccggagaaaacattattgatgtgaagcgtttcagtcatggacaacctgttccgccgggtgaatattactccgatatctggcttaatggagaatggaaaggaagagcggtactgcgttttaatctttcatccggtatggacagaactctcctctgcctgacacccgagctgttatcattactggatttaaacgaagaagcgctgagtgacaggataataaaaaatagcagaggttgtacggatatttcttctgtcataccggtatccagaatacggtttgaaccatcagagttgcgtctgaatatcgatattccccaggcgctgcttatccatcgtccccgcggttatatctctccggcacagtggcagacgggggtacctgccgcgtttgttaactataacctgaataattaccgttaccgggttgccggtacacaggaagacaggacgtatctggggatcagagcaggattcaattttgccggatttgctttacgacacaggggaaactggtccggagggcgtaccggggggtaccgtagcacagaaaccaacctccggcatgatgttgcagccctgcgtggtcagttgacggtgggggatttcagtacgggaggagaattgatggaaaatgtcagcctccggggagtgagactggcatccgatgaccggatgttaccgggctccctgagaggctatgcgccggtggtacatggtatcgccagcagcaatgcaaaagtaaccatcagacagaacgggaatatcatttatgaaacaaccgttccggctggaccgtttaccgtcaatgacctctatccttccggatatggtggtgacctgacggtcagcgtgacagaagcaaacggacagacacgcctgtttactgttccgtttgcttcagtggcgcaacttgtccgtcccgggtatacccgataccaggtatcaacaggccgctaccggtatgcagacaataatctggatgaaattgtttttcagggaactctgcagtacggattagtgaatgatgtgacggtaaactccggggtgatggcaacaccacattatattgcagctcttgccggcgcggcatttaacaccccatttggtgccattgcatctgatatcacgttctcggagacgaaactgagccgtaatgaccgtacgcaaaaagggtacagtttgcacgccagctacaatgtgagtatgccattaacaaacaccagcctgacactggccgcctatcggtatatgtcaaaagacttttacaacctgcgggatgccatgtgggctaaccgggtggattatttcaaaaacagccaggccagaaatagcatgttctttcgcccgagaaaccagtttcagttatcagtaaaccaggaactgggagcaggaaggggcaacctttatctgacgggttcaacatacagctactggagccgtaaagggacccgcagcgaatatcaggcagggtacagtaacgtatatcggcggctgaactaccaggtgggttattcccggtcatttgacactgacaatttgcgtgatgatcgtcgtatttatgtgaatttctccattcctctgggggaaagtcagcagagtccgctcttatccaccacgctgaatggcagcaaaggtgccggaaacagcctgcagacctcggtcagcggggttgccggagaggacaatcagttttcatatggcctttctgccagcgcgatggaaaaaggcggttccggatattcagccagtaccggttaccgttcgccttacgcttatttaaccgcgacagccggtaacgacagtcttaatcaccgccagacctcgcttggcgtttccggtgccgtcgtggctcatccatttggtatcaccctgagtaacgatctgagtgacacattcgctattatccatgcggaaggcgccggtggtgcaaccattaataattctccgggcaatcgtctcgatccatggggaaacggtatcgtcccttctgtcacaccttatgaaaaaaatgcggtcagtatcgatcccgaagcgttgccgatgaatgttgagctgtcagcgacagaacaggaaattattccgcgggcaaacagtgcgacgctggtgaatttcaccacgcagtcaggtgaagcaatgttgtttgatatacgaatgtcagacggaagcatccctcctatggcatccgaggcctttgatgctcagggtaaatctgttgggtatgttgttcagggaggacgactttttgcccggggtctgaaggataaaggaaccataaaggtgatatggggacggtatgctgctgatcactgcatcttttcttatcactctgttgtaaaacgccagacggataaacccgtagtcaccatactgccagtccgctgtatgaaaccgcaaaaacaataa

SEQ ID NO: 377642 - DNA, 732 bp, Salmonella enterica
atgcccggactgatactcttgattatatcaggactgctgtctttttctgcctgcgccagcgttgttattatggggactcgggtggtatatccggagcagaaaaaaagtattaatgtgcagctccagaatggtgataattcaccgtcactggttcaggcatggctcgatacaggggatgcgtctggttctccgggatctgtcagggttccttttgtcatcacccctccggtctccagaatagaaccgggaacaggacagactttaagaattatgtataccggggagcctcttccccgggacagagagtcggtattttatctgaatgtacttgacattcctcccaggcctgaattcggaggaaaaaaggcggatgtcggtaatgtaaattatctccagcttgctgtccgcagtcgtattaaactttttttccggcctgcaactttaaatcaatctgtagcggatgccgccagacaggttacgtggtcacgggtaaacagaggaaaccagatcttcctcagggctgataatcagacaccttattttgttacctataaaaaaattgcactgaagtctgacagagatattcagtcattaacgcagccggggatggtttcaccttattctgttaaagagttcaccttgccggggaaaaacctttacggtgccagcgtcatctggactgtcattaatgattacggtggttatgaggaaggcaagtcatcaattaagtaa

SEQ ID NO: 377643 - DNA, 537 bp, Salmonella enterica
atgaaaaagactttcatcgccacaggtatgttgtcgtttattttttccgccagtgttctttcctatgacggcacaattaattttgtgggaaaaattctggaccagacatgttcggtgacaaccggcagtaaaaatttaaccgtgacgctaccggctgtttcaaaaacacttctggacactccggctaaaacagcggcgttaacaccatttgtgattgagttgaatggatgtgataccggatcgtcttccggtggtcaaagtgtaaaagcctattttgaacccaacgccaccactgattttactaccgggaatctgaataatacgggaacggcaactaatgtgcaggttcagttattaaacgccgatggaaatactccgattaccctgggtaaagatgtctcctctcagaataccacagcaacccggattgacgcttcagatgtaaaactgcgttataacgccagatattatgcaacaggcgctgcaacagccggggatgtggccgctaccgtgaattacacgattgcatacgaataa

SEQ ID NO: 377644 - DNA, 183 bp, Salmonella enterica
atgttaaatctccttaacattcagttgctactgcccgctttattccccgtgagcgggactttttactcgcaaatgtctctgatatcacaaaggttgccatgcccggatattacagaatcccccccggatgggaaaacagaagacgaagacaggatgacgatgtgcttctggaggccacggtga

SEQ ID NO: 377645 - DNA, 339 bp, Salmonella enterica
gtgcttctggaggccacggtgactgtagataagacaatacaaatacaggtagaaaatacgttcattcgatggctaaaaacgagggaaaagggggccgtttctcttgataataaaaagataatatgctggtactgtggcggagtatggcttcattacactgtcaatactaatgtgatgtctttatacctgcactcgggaggcgaggatgcctttgactctctggctgactgtgcaaatgaaatctcccggcttttatatcaaaaccactctgacgtcagcatcaaatggactgagcatccacaccggcgcaaataccttaaggatacgacgggcacttaa

SEQ ID NO: 377646 - DNA, 888 bp, Salmonella enterica
atggctggagttcagggctaccgcctgttcaatgttcaactggtgcgtaagacggagctttccccttcgctgctgagcctggttttcagcggacaggaggtgtcgcagatgaagtgcgactcgccggatcagcgcattaagatactgtttccgtccgaagacggtacaccgccgtcgttacctgcggaagggcactggtatcagcttgtgcgggggatgccaaaagagaagcgcccggttatccgtacttatacgctgcgacatgtcgatcctgtttgccaggaggtcaccgtggagtttatcaatcatggtacagaaggcgcggcttcggcatgggcgattaatgccagacccggtgatgccattcagatggtggcgcctgatgcgacgcatgttgaagacagcggcggctatgaatggacgccccctcatggactgcggaatgcattaatcattgctgatgagacggcgctccctgctgcgcgaggaatcctggaaatgctggcggaacagacgaacccgccacaggttcaggcgttctttgaagttcctgaacagggtgactgtgcgaatttaagcgagtttaatttcgccaaaattttttggttgccgcgtaattcctcggcggtgaagcacggtgaatgtctgattcaggccgtgaaaacgcatgcgagaatacccgaaagtcgccatcacgatacggtgcgagaagaagccgaaggggatattatctgggataaagccacaaccagcaacacagagttttatggatgggtagccgcagagtccacagtcgtcaagcgactgcgccgctatttaattggtgagtgtggcgtcgagcacaaagcgattaactttatggcatattggtctaaagggcgcgcgtga

SEQ ID NO: 377647 - DNA, 954 bp, Salmonella enterica
atgatgataaaaaaaataccattaagaaaaaaatatattatgtttgtacttttctgcataatatggtctttgttatctggctgtagtcataaaactcaatataaactcccgttagcgcaatgcggtaggattattgcccatgaaatgggggccactgataaaggcgtattcgatggaaaagcattcaactttagagcatttgaagtttgtaagcctacgaatagtgcttttaatacttgtcctggacaggtaactgcaatcagtaagtacaatactattgttaaaagtgataaagaaaagacgataaggtttttgaaaatgtcagtgcgtacattatcagaccacacttgggttgtggcgcataatgatagtcaaagatcaaatggtacattcttcttattgagtaaaataaactctgagcaacttaatgaatacaggaaaaaagatccaacacttggtgtttacagaatagatgactatgttgctatggataaaaataaagaattctgttttatgtttaacacaaaaacaacaccaaatgagaagttaattgataatattaataaattagatcttgctcagcgtacattgatagaatccggtagccaaaatgacgctaactggctaaacgatcatcaaaaatcagtttattttaccaccagggttaattctcaatcatctcttgataatgccttgaaggatataaagagtaaaggatataaaaaactttattcaattgaagttgatcctaaccccaaaaatatagatgaaacaaaattactggtgcaacgcattcaaaaacaaggatttactgctgaagttgactccatgccctacgatccgttacgagagtttattataactgcttgtcgtattcctttagaaagaataggcgcagatgttaccatgacaagtcgccccgttgagtgtatagaaaaatttccgaataattaa

SEQ ID NO: 377648 - DNA, 960 bp, Salmonella enterica
atgccagttacgttaagttttggtaatcatcataactatgaaattaatgcttcacggctagcccatttgatgagttctgacaaagaagaagcgctatatatgggggtatgggatagatttaaggacaacttcaggacacaaaaaaaacaagaggcactggaggcattatatacactcatccatggatgtagacgtgaaaatcaagctgaacttaatgttgatacagacggcatggataagatacatgcctttgtacaattaaaaaaatatactaatccatctcaacaagaccgctttgttatgcgttttgatctgagtcagacacaagttttatttgagattgatggcaaggttattgagaaatgtaatttgtatcgtctcctcaatgtttcagaaaactgtatttttaaagtgatggaagaagatgaagaagagttgttttttaaaatatgtattaagtatggagaaaaaatttctctctatccagacttattacaaaactttgcttttaaacttagacaggaagttaatgaggatgatgaaattaaggatgaagtttataagcttatgcggtctggagaagatcgaaaaatggcatgtgttgaatggaatggtacgcttactgaggatgagatggataaactacgctgtcttcaaatggggtcttttgagatttctacccaattttttaaaataggttactgggaattagagggggaagtcctgtttgatatgtttcatccaacacttatctatctgctacaaggatatacaccgtcattgtcatgtgattttacagaagctaacaccatgctgttatctgatgcattaaataaggatgatgatgattatcacaataataaaagagaaattgattctattctggaaaaaatatatagatcacataataacactttatttataagtaaaaattctggttgtcgtaatatgcttttataa

SEQ ID NO: 377649 - DNA, 627 bp, Salmonella enterica
atggccagaccttatgttcgtctcgataaaaataatgccgccgtgctactggttgatcatcaggcgggtttactttcgttggttcgggatatcgaaccggataaatttaagaataatgtgctcgccctcggcgatttagcaaaatactttaacctgccaaccattttgaccaccagttttgaaaccgggcccaacgggccgctggttccggagttaaaaacacagtttccggatgccccttatatcgcacgccccgggaatattaatgcctgggataatgaagatttcgtcactgccgtcaaagcaaccggcaaaaagcaattaattattgcgggcgtcgtcaccgaggtatgcgtggcatttcccgcgctgtcggccattgaggagggttttgaggtctttgttgtgaccgatgcttcgggcacatttaatgaaattacccgccactccgcgtgggatcgtatgtctcaggctggcgctcagttgatgacgtggtttggcatcgcatgtgaattacaccgggactggcgaaacgatattacaggcctggctacgctgttttccaatcacataccggattatcgcaatttgatgaccagctatgatacgttgacgaaacagaaatag

SEQ ID NO: 377650 - DNA, 324 bp, Salmonella enterica
atgataaagaaaaaggctgcttttagtgaatatcgcgatttagagcaaagtttcatgcagctaaatcactaccttaaaaaatttaatcaaatcagggctaaggtgagtcaacagctttctgaaagggcgcagtatcccaaaaaaaacagtgagacagatcctatccttgataagttatttccacaaggcgttaccggggttaaccaggaggccgagagagacttaaagaaaatagtaactttgtttaaacaacttgaagcacggctgcaacaacttaatactcaatccctggtggagataccgccaggcaaaacaaaaaggtaa

SEQ ID NO: 377651 - DNA, 591 bp, Salmonella enterica
atgtcttcaggaaatgtcttttggggaaatcataaccctattgtatttaataatgattttggcgtcagcaatacagataccgggagtcaggatgacttatcccagcaaaatccttttgccgaagggtatggtgttttacttattctccttatggttattcaggctatcgcaaacgataagtttatacagatccagaagaacgctgaacgtgccagaaatacccaggaaaagtcaaatgaaatggatgcggttattgctgaagcagccaaaggagatgccaaaaccacagaggaggtgcctgaggatgtaattaaatacatgcgtgaccatggtattctcgttaatggtatgaccattgatcaatatatagctaaatatggtgttaaggggaaactggataaaggcggcctgcaggcagtcaaagcggctctggataatgacgccaaccggaataccgatcttatgagtcagggacagttaacaattcaaaaaatgtctcagcagcttaatgctgtccttacccaactgacggggcttatcagtaagtggggggagatttccagtatgatagcgcagaaaacgtattcatga

SEQ ID NO: 377652 - DNA, 1458 bp, Salmonella enterica
atgaatcgaatccacagtaatggcgatagcgccgcgggagtaaacgccttattacatcatcatttaagcaatgtcagttgtgtttcctcgggatcgctgggaaaacgccagccgcgtgtagattttacttgtgacaatgccagagtagcgtgtgaggcagcagggaaaattagccttccagaggcaaacaacgcgttgaagcaactgcttaatgccgtccccggagatcataatagcccatcatcattgcctgactttatgcagatgaatcccacggttttatcaatgatgatgacgacattaataattagcgtcttcggtagtagcgctcaatcgttatgccaacagcttgatcgagcaactgaggtgcaaaatacagtacgtgataagcaggtgaaggagtatcaggagcagatccagaaagcgatagagcaggaggataaagcacgtaaagcgggcatttttggtgctatttttgactggattaccggcatatttgaaaccgtgcttggcgccttaaaagtggtggaaggttttctgtccggtaatcctgcagaaatggctagcggtgtagcctatatggccgcaggttgtgcaggaatgattaaagccggagccgaaacagcaatgatgttcggtgctgaccacgatacctgtcaggcgattattgacgttacaagtaaaattcagtttggctgtgaaactgtcgcgctggcactggatgttttccagattggccgtgcttttatggcgacgagaggcttggctggcgccgctgcaaaagtgcttgactccggtttcggcgaagaaatcgctgagcgtatggtaggtgcaggcgaagcagaaatggaggcgttggctgaagagtttggcgacgcggtgagcgaaaaattttcccaacaatttgagccgctggaacgtgaaatggtgatgacggatgagatggcacaggagtctgccgagttttctcatgacgtagaacaaaatatgacgcgaagcgcaggaaaaagctttaccaaagcaggggtgaaagccatggcgaaagaagcggcaaaagaagccatggaaaaatgtgcgcaagaaggggaaaactttctgtcaaaaagttttcgtaataaggtcctcttcaatatgtttaaaaaaattatgaatgcattactgagggattgttcatttaaaggcttacaggctatcagatgtgtaaccgagggaggtaatcagataaatacaggcgtgattaaagtagaaaaagcgaagctcgaaaaaaaaatagagcaattaatggctcagcaatggtttctggatttcataatagaacaaacggaaggccaaaaaaagatggaacaaaaacgcttacaggcgctttataaaggtagcggcatagcgcttaaagatgcattagataccattgataattatggtagcgttcagtcgaaaatggctggctggcgcgcttaa

SEQ ID NO: 377653 - DNA, 591 bp, Salmonella enterica
atggaagcgagtaacgtagcaccagcatcaccaatgttgtcttccttgttagcgccttcttcggctcaatctcaatccggggagagagtggatactgaatcattgcttctgttatttgatgtaatttggacgaagctaatagagcttgccaaaaagctgcgcgatattatgcgtacctataacgagacaaggcagaggttgacttgggaactgcaggtcaatgtcttacagacgcaaatgaaaacgattgatcaaacgtttacagcatcaatgattactgcgggtagcgcaatgttgtcaggagtgctgacgataggactcggggctgcaggcggggaaaccggccttatattaggtcaagccatgggacacactgctgggggcgtcatgggcctgggggctggtgtagcgcaacgtcaaagcgatcaagataaagcgattgccgacctgcaacaaaatggggccaactcttataacaaaagcttgatggatattatggataaagcggttgaaatcatgcagcaaatcatgggtatggggacgtcaatggtcgatattcttgctcaaatgctccgggcattaacgaggtaa

SEQ ID NO: 377654 - DNA, 789 bp, Salmonella enterica
atggaggttcatattccaccagcggcaagcaatatagccgggaataatagtattccttccgatatgcaagcggaggggacatcgtttactccccctgaaattccagtccctgatgcccccataacatctgtgttgcttacgcctgaacaggtaaagcaacagagggattatgctatgcattttattcaatacactattcgtgcgctgggtgcgacagtcgtgttcggattatcggtcgctgcagcggtaatttctggcggggcagggttacccattgttattcttgcgggtgctgcgctagtgattgccaccggggatgcttgctgtgcgtatcataattatcaattgatatgtcagcaaaaggagccgttacaaacttccagtgatagcgttgctcttgtggtcagtaagctggcgttaaaatgtggagcaaaccttacctgcgctaacactcttgccaactgtctttctttattaatacgttcaggaatcgctatttcttccctggttatacccttactatttccactgcctgccgctgaaaatatcgcggcctctttggagatggggactgtcattacctccgctagtctgacagcgataggtgcggtactggattattaccttgcccgaaccccaagtgccgatcaggaaaatacttttgatgagtttcctgccgatcccagtgtgttattggcggaaaaaattatagagtcctgtaaatcagttactctacctgcatcaatggaaagtatgggtaatcaatattgtggagtcggagaaccatga

SEQ ID NO: 377655 - DNA, 267 bp, Salmonella enterica
ttgaatatttctgatatcagcagaggaatgcctgtaaacactcaatcttctgtaatgtcctctacggaggcaggtcaggagcaaattaatctttttaaacaattaatgacagatgatgtgtcagtcaataacgccaatgtcttactacctcctgttatgctgaccaggcaaatggattatatggaattgaccgtgggtgtagattttcttgccaggatatcaggctcagcatcacaagcgcttaataagctggtaagtatgacatga

SEQ ID NO: 377656 - DNA, 993 bp, Salmonella enterica
atgaatattaaagttaatgaaataaaaataacgcctcctacagagtttacccctggtcagcttatagaggaacaagaggttacctcgccttcaatgttggctcttcaggaattacaggaaacgacggggactgcgctctatgagacgatggaagaaatagggatggcgctgagtggtaaactccgggaaaaatataaatttattgatgctgagaaactggagcgcagacagcaggcgttgctgcgtttaataaaacaaatacaggaggataatggcgtaacattgcgtccgcttaccgaagaaaatggcgatcctaatttgcagaatgcgcatcaaattatctctcttgcaatggcgcttactgctggcgggttgtcaaaaaagaaaaaacgagatttgcaatcgcaactggatacgctcacagcggaggagggatgggaacttgccgtttttagtttaatggaacttggcgaagtggatactgctacgctggcctctctgaaacgttttatgcaacagtcgatagacaacgatgaaatgcccttatcgcagtggtttagacgcgtggctgactggccggatcgttgtgagcgggtccgtattttgctaagagcaatagcatttgaacttagcatatgtatcgaatcctcgcagcaaagtcgtttggctgcagcattagtacgtttgcgtcgtttgctgttattccttggccttgaaaaagagtgccaacgtgaggaatggatttgccagttgccgcctaatacattactgccgttgctacttgatatcatttgtgagcgttggcttttcagtgattggttgcttgacagacttaccgctgtagttccttcatcgcggatgtttaatcggttactccaacaacttgatgcgcagtttatgctgataccagataattgttttaacgatgaagatcaacgtgaacaaatcctcgaaactcttcgtgaattaaaggtaaatcaggttttattctga

SEQ ID NO: 377657 - DNA, 372 bp, Salmonella enterica
atgcgtattaccaaagttgaaggaagtcttggggtgccacgtaaatcttatcaggatgataacgaggcggaagcgggacgtacggactttgagcaactcatttaccaggcgttacccgttagtgagaataaccttaccttgttgaataagaatgtagttttcacgcaacgctttcgcgttattggcggttatcttgacggtgtagaatgtgaagtatgtgaatcaggagagcaaattcaacttaaaattaatgttcctcatcatgagatttatcgttcgatgaaaatgctaaagcagtggctggaatctcagttgctgaatatggggtatgtaatctgcctggagatattctatgttaagaatagcgaatga

SEQ ID NO: 377658 - DNA, 273 bp, Salmonella enterica
atgaaaatgaagctgatacccttttatttgtttgtgctattttccgccgcgtcctgggctacggagataaacgcctgcaaagacctgatcggaacatgggaaaccacggcagataacccgccttataccatgacaatattaccaccggtagaaacctgcggagaaaaatgtgtgaaactgaacgtgcagtatgaacttgacgtgactcaccgcaacgcgctttattgccatgaaggacaagagggcgtaaaagtgtcagcgccagtgatataa

SEQ ID NO: 377659 - DNA, 138 bp, Salmonella enterica
atggataagaaaaacccatcaatggttaacctgcccgcatcgcatgagtcgattaaccagaaaatcgataccattaccgcgcaaccgggctccagcgatcttgtcgatccggatgaaggacaacaggcattaggctga

SEQ ID NO: 377660 - DNA, 642 bp, Salmonella enterica
atgctgcttaatcgacatgttattaaacattatgcgattaaaaaaacaggggagtacacgcctgcatctatgctgacgcatggatatgcggatgtggttatgggaatcctggaaattaagaatgcgatgatcgaaagttatcttattgataacttatctgattttgtttgcgtttgtggtgaaaagagcccactggttggacttgaacaaatctctttatataatttttatgccgccagacatgctgtctaccattcagatatgttctcttctttcaccgctgacactattgacttgttcaaggtcagtacgccttatacggggcgcaggaaaataggttatcatagtgattcattatttggaattatgggtgtcgttgaaaaaggtgatatggttgcgattttgccaagaaagattgccgcttattttagagatgtgagacgttataatataaaaataatgcgcatgcctgatgaaatgacttttcgcgcattgcctgtttatgcctatctggccacaaacagtatgagttataaaaatgctaagaatctgatatcaacctttcagtccatctctctgattaagccagaaaaggaacctgatattttggttaaagatagcatatccttatgccatttatag

SEQ ID NO: 377661 - DNA, 714 bp, Salmonella enterica
atgaacgtcacctatttacacgacgaggatttagactttcttcagcactgtagcgaagagcagctcgccgatttcgcccgtttgctgacgcataacgaaaagggcaaagctcgcttgtcgagcgtccttagccataacgagctattcaaagcaatggaaggtcacccggagcaacaccgccgtaactggcggctcattgccggcgaatttcagcattacggcggcgacagtatcgccaacaaattgcgcggacacggaaaacagtaccgcgcgattctgctggatgtcgcaaaacggctaaaactcaaagcagataaaagcatgtcgacgtttgaaatagaacagcaactgctggagcattttttacgtcatacctggcagaagatggacgcggcgcataagcaggaatttctgcaagccgtagaggccaaagtttctgaactggaagatctgctgccgctgctcatgaaagatcgccgtctggcaaaaggggtctcccacctgctttccacccagcttacccgcattttgcgtacccatgccgcaatgagcatcctgggtcacggattgttgcgcggcgcaggtctcggcggcccggtcggcgcggcgttaaacggcatcaaagcgatgagcggcagcgcgtatcgcgttactattccggcagtgttgcaaattgcctgcctgcgacgaatgatggcggcgattcaggcgtga

SEQ ID NO: 377662 - DNA, 186 bp, Salmonella enterica
atgacgttagcagaacaactgaagcagaaaggtcgtatggaagagatacaacaagggatgcaaactggcgaacgtaaaacctcacgtaaaattgccagggcaatgctgaaaaaaggcataccgatggccgatatcatcgaaacgaccgacgttagcgcagaagagatcccgtcactgcagcattaa

SEQ ID NO: 377663 - DNA, 873 bp, Salmonella enterica
atgccgctgctggatactgggtataatttcaagtattgtcgcattagtgcggataagtcagcagaaattgcacagccgtttttcatacggccagggcagatatttatttttttagaaaaattaagaggttttatgttaccagtatctgcgtctcaatctgctatcgccccaatttctatgtctgagggacgaccactaagtgatcgactttctattgaaaatcttcagtggcttaaaggtgctgtcctgaaacctgctgaaatggctatggggccttgtgtattaacctctgcgggtatctttacttatcttaatggaggaggaaaagaaaaggctgatgtttttttcgaacaggtacgatataacggcatgacaggaaaagactgttcgatggaaatcattgatatttttagcagtcttatagacacaggtatacccctaaaggttgatatttatttttccaacacccatatccgggacagagaggggtgtacacatggccgattagctgaaaaattaggacatattgcacaggaacatccttttgatatcgacctggtcagatacaaactgaattctctttctgccggacaatgtttgatcctgacaattgataacgctcatgttatctcagtcgcgcgcgatgctgaaaatttatggctgtttgataccaacttaaatcctcataaaaattgttatgaacagaaataccgtgaaatcattatcgaaactcaaagagagatagcaccttacctctttacgccatcaggggaaaaatacgcctgtaatgaggaagcacaatgtattctggataactatttaagtcgtgttatcaagaggcaaccagtaataataagtgtcgactcacagtga

SEQ ID NO: 377664 - DNA, 465 bp, Salmonella enterica
atgtatctcccttataccctctttgaacccgtcacacgcttcaacgataattctgctggtgacatgcaatgtggcgacatgggagaagaagagcttctggcgctcggcctgaatgacatatcagaaaaagtcgatccttatcgccttatatattatgattttccccgaccttacatggtagatggcgtgtttagcttaacaaacctcggcagagaaatatctcacgatgaatgtgtcgatattctattcacagaaatgaaagaactggaaaaaatgttttcattctatggtgaatatcaaacactaatagatgaactcatcagacatttcagatatggaaatggcagcgcattttatagccagcaactaaattccgcctttcataaaagagtaaagaagaatataaaagacagccctctttttatagttaaagactacattcagagggaatttaaaaaaacataa

SEQ ID NO: 377665 - DNA, 1545 bp, Salmonella enterica
atggcggaatctcaacctctgtcagccgcgccggaaggggcggagtatctgcgcgcggtgctacgcgcgccagtatacgaagcggcgcaggtgacgccgctgcaaaaaatggaaaagctctcgtcacgtctggacaacgttattctcgtcaaacgcgaagatcggcagccggtacatagctttaagctgcgcggcgcttacgcgatgatggccggattgaccgaagaacaaaaagcccacggcgtgattaccgcttcggcggggaaccatgcacagggcgtggcgttctcctccgcgcggcttggcgtgaagtctctgatcgtcatgccaaaagcaacggcagatattaaagtcgatgcggtacgcggttttggcggcgaagtgctgttgcacggcgctaattttgatgaagcgaaagcgaaagctattgaactggcgcagcagcagggttttacctgggtgccgccgtttgatcacccaatggtgatcgccgggcagggcacgctggcgctggagttgcttcagcaggattcgcatctcgatcgcgtctttgtgccggttggcggcggcggcctggcggcgggcgtagcggtactgatcaaacaattgatgccgcaaatcaaagttattgccgtcgaagcggaggattccgcctgcctgaaagcggcgttggaagccggtcatccagtggatctcccgcgcgttgggttgtttgctgaaggcgtggcggtaaaacgcatcggcgacgaaacgttccggctgtgtcaggaataccttgatgatattgtcaccgtggatagcgacgctatctgcgcggcgatgaaagatctgtttgaagatgtgcgtgcggtggctgagccgtctggcgcgctggcgttggcggggatgaaaaaatatatcgcccagcacaatcttcgcggcgaacgcctggcgcacgtcctttccggcgccaacgtcaacttccacggcctgcgctatgtgtctgaacgctgcgagctaggggaacagcgcgaagcgttactggcagtgaccattccggaagaaaagggtagcttcctcaaattctgccagttgcttggcgggcgtatggtcacagaatttaactaccgttttgccgacgcgaaaaatgcctgtatttttgtcggcgtacgcgtcagtcagggtctggaggagcgaaaagagattatcacccaactgtgcgacggcggttatagcgtagtggatctatccgacgatgaaatggcgaagctgcatgtgcgctatatggtcggtggccgtccctccaagccgttacaggagcgtttgtatagcttcgaatttccggagtcgcccggcgcgttgcttaaattcctgcatacgcttggcacgcactggaatatttcgctatttcattaccgtagccacggtaccgattatggccgcgtgctggcggcgttcgagttgggcgatcatgagccggatttcgaaacccggctctatgaactgggttatgaatgtcatgatgagagcaataacccggcgttccggttcttcctcgcgggctaa

SEQ ID NO: 377666 - DNA, 1383 bp, Salmonella enterica
atgcgataccgttttcccgataacttctggtggggcagcgcctgctcagcgttgcaaaccgaaggggatagtctgaatggcggtaaaagccagaccacgtgggatgtgtggttcgagcgccagcctggccgttttcaccagggcgtcggtccggcggaaacctcaacgttctatcgccgctggaagcacgatatcgcgctactgaagcagttaaaacacaacagttttcgcacctcgctaagctgggcacgtctcattccagacggcgtaggcgaggtgaatccacaagcggtgagcttctacaataacgtcatcgacgagctactggcgcagggcatcacgccgtttattacgctgttccattttgatatgccgatggtcatgcaggagaaaggcggctgggaaaatcgcgacgtcgtagaggcgtttggtcggtacgcgcaaacgtgttttaccttgtttggcgaccgcgtgaagcactggtttacctttaacgagccgattgtgccggtggaaggcggctatttgtacgacttccactatcccaatgtggtggattttaaacgtgcggccaccgtggcgtaccataccgtgctggcgcactcgaccgccgtgcgcgcctggcgcgccgggcgctacgacggtgaaatcggcgtggtgctgaatctgacgccgtcctacccgcgctcgcagcatcccgccgatgtgcaagccgcgcatcatgcggatctgttatttaaccgcagttttcttgacccggtattaaggggagaatacccggcggaactggtggcgctgctgaaaatctatgaccaactgcccgcctgtcagccaggcgaccgtcagcttattgccgacggcaaaatcgatttgctggggattaactattatcagccgcgccgcgtgaaatgccgtgatacagcggtgaatccgcaagcgccgtttatgccggagtggttatttgactattacgacatgccggggcgcaagatgaacccttatcgcggctgggaaatttacgcgccgggaatttacgacatcatcaccaacctgcgggataattacgacaatccgcgctgttttatctccgaaaacgggatgggcgttgagaacgagcaacgttttgtgcaagcgggacagattcacgatgattaccgaattgactttatctctgagcatcttaaatggctgcataaaggcattagcgagggctgtcactgtcttggctaccacatgtggacctttatcgataattggtcatggctgaacggctataaaaatcgctatggttttgtacaactggatttagccacccaaacgcgcacggtgaaaaaaagcggagaatggtttgccgccaccgcagagcataacggttttgattaa

SEQ ID NO: 377667 - DNA, 240 bp, Salmonella enterica
atgcagcagattaatttttatcgtcagcgggtagcgattaacgtgctggcaaaggatatcgccaacgcgaaggctatctatgaagccgccgaaggccatgcggtcattggcgtactttccgcgcagttcgctacggtagaagagggcgtgccggaggtgaaacgctggatggcggaggtgccgtctatctcggtgggactgggcactggcggcgacaggcggcgagcaaacacatattaa

SEQ ID NO: 377668 - DNA, 894 bp, Salmonella enterica
atggaactacgtcacctgcgctattttctcgccgtcgcggaggagggccattttggtcgcgccgccgagcggttaaatattgtaccgcctgcactcagtatgcaaatcaaagcgctggaagaggaactgggcggcccgctgtttatgcgcaccagccggaaagtcgtgttgaccgaagccgggcggctgttgcaggtagaggcgcagcgtacgatggatcaggctgaaaacgcccggctggcggtgcagcgcttaatacgcggcgaaagcggccgggtccgtgtcggttttgccggaaacgccgtgttcagcggtaaactgacaaaagatatgcgggcgtttcgcaaagcctaccctgatgctgagctggtggcgcgtgaagtggcgccgctgttgcaggcggatgcgatcctctccgggcagctcgatattggttatacgccggatcacagtctcctccacgtcccgggactgttgtctgaaacggtcggtgtctggaaccgtctggtggctatcgccgacgatcatccgctggccaaacagccatatctgacggtggatatgctggcggatgagcctatcattttttacgatacccacagcgcggatgagccgctttacacggcgctcacccgaatactgggccgcgcgccccagactgcgcatcgtacctccagcaccctgagcgttctcaccctggcggcggcagggcaagggctggcgctggtgccggagccgctgctgaatatttctataccggggctggtgtaccgtccgctggatgctccggaactgtcggctaatctgatgctgatcagcagaaagatcgagaatagcggtgcggtacaggctttcctggctatcgcgcgtgaaaatgcgcggtttacttgttag

SEQ ID NO: 377669 - DNA, 582 bp, Salmonella enterica
atgcatacttatctggaagatcgtcaacaaattaccgacctgcttacgggatggatctaccgcgatctgggcgagtgggagcaactccgcaatctgttccacccggatggcacgattgagatcacctggtttgaaggtctggccagcgattttgtcgacggttcaatgcgcatgggggcatcggacgcacgtaccaaacatctgatcggcacgccggtcgtcaccttcaatgctgacgccactaaggcaattgtcgaaactaacgcgatgatcatcgctgaaaacgtgaggcttaatatcggctgcaccacccacaaccgtttttacgacatggcggaaaaacgcaacggcgtctggaaactgttccaccgtcagagtatttacgatatgggcggcttcaccttcccgctcggtatcgtcgatatcgatcaagaaacagtggcgaagtatccgcgcgaatacgccgcactggcttatctgctggataaaagcggcttcccggtcaaccgcgtcttcgcaacccgaggcagcgaccttgaaaaacacatgaaggaagcgggcgagcgctggcttgcagcctga

SEQ ID NO: 377670 - DNA, 1056 bp, Salmonella enterica
atgaaaaccagatatttacaccaaaaactaatggctctattactcgcgacgtcgctgctgcccgccgttgcgtcggcaagccagacgctcacctacagcgatcatgagccactgggaggcatgcgtacccgttttattaacgacgtatttttcccggcgattgaaaaagagtcgcagggtcgcctgaagatcgacgctcactggggcggagagcttaacaccagctatgaggcgttaagcaaagtcagcaagggcgatgttgatatggcaaccgttgtgccggagtacaacgccgaccagctaccgctgcatcaaatcttcaaaagctttcctgtcggcccaaccggtgcgcaacaggttgcattcttccgtcacgtatacgctgacgttcctgccttcccggcagagctgaagaaaaataatgtggtgagcgtttttctggaaactggctatccactggcctttttcagcagcaaaacgatgccagatctgggcaagattaaggggggtacatggcgctccgccagcttctggcaccgggattttctgcaaaacgctggcgcaacgccggtaaccatgccctggggcgaacctacctataacgcgctgaaaaccggcgcgattgatggcatgatgctgaacgtcgacagcggttacgatctgaaagcgtatcagtacgcgcccaacgtgctgatttccaaagagctgtggctgggacatctctatattctggcgatgaacgaaaaaacctgggacaagctatccccggaagaccaggcagccatccagcgcgcagcgcaaactgcgtatcagtccttaggctcagagatggaccacagctttaacacccagatagacgatttgcgtaacgtcggtgcctcggtgcgtatcctgaaaccgcaagaagttgcacaatggcaaaccactacccactaccaggccgcgcaggctaagtgggtaaaagaacaggaagcgaaaggcgttaacgatgcaggaacggtgatgaagcaggttaacgccatcatggatagcgcgatgcagcagaaggcgcgctaa

SEQ ID NO: 377671 - DNA, 336 bp, Salmonella enterica
gtggttaaagcgtgggattcacgtactgccagcctgacgaaagcacccggttttatcagcaccaccctgtatcagtcggtcctgcccaatcatccctggccgttgatcgaagtcgcgcaatggcaatcgtatactacctggacaaaggcccatgacaatgcggattgcaaccacctgaccgaacgctatcccccgccactggccacaccggaagtgctgaaccagagctggtctgtcgattttatgaatgatgatttggtctgtggccgtcgtttcgcacgttcaatgttgttgatgactttaaccgcgaggcgttgtcgattgaaatcgatctga

SEQ ID NO: 377672 - DNA, 945 bp, Salmonella enterica
atgcatggaactaaaacgggtctatttacacagaagttcagaatcaccaactggcacacctataacaacgctctaatcaaccgtggttccatgactttctggctggatgacgaggcgattaagtcgtggtatgacacatccccgccttcagcacgcggaagacctcagcgctattctgaccttgccatcactaccgttctggtgattaaacgcgtattccggctgcccctgcgggccgcacagggcttcattgattccattttcaccttgatgggcgttccgctacgctgtctggattacacctgtgtcagcaggcgggcaaagtcggtcaatgtcagttttaaaacagtcacccggggtgaaatcacgcatctggtgattgattccaccgggctgaagctcttcggtgaaggcgaatggaaagtcaaaaaacatggcaaagaacgccgccgtatctggcgaaagttgcatctggccgttgacagcaaaacacatgaaatcatctgcgcagacctgtcacttaacaacgttacagacttagagggtttccccgggttaatccggcagacccaccggaaaatcaggtcggtcgctgccgatggcgcttacgatacctggttatgtcacgatgaactgcgccgtaagaaaatccgcaccctcatacctccccgtaagggagcgggttactggcctggtgagtatgaggaccgcaatcgcggcgttgctaatcagcggctgagcggaagcaatgcaaggtggaaatggacaacggaatataaccgtcgctctatagcggaaacagccatgtatcgggtaaaacagctgttcggaggttcactgacactgcgtgactacgatggtcaggttgcagaagctctggccatggtacgcgcgctgaacaaaatgacgaaggcaggtatgccagaaagcgtgcgtattgcctga

SEQ ID NO: 377673 - DNA, 225 bp, Salmonella enterica
ttgtacagtgatagcctggaaacacattttgttgatcggatattacacatccagagccgcactgagattatggacctgaaccgtgtggcgctggtttccgtctgcggggcttgtatggcgcagggctgcgccaccctgcgtatccgtgactcgcataaagatgaaaagatggcagcaatccataaagcactgggcgaatgcagcgcagtgcatccggttttgtga

SEQ ID NO: 377674 - DNA, 978 bp, Salmonella enterica
atgattattcataattatcgaagcattattggccaattttttccgctccagcaggaaaataatgaagtccgtacagcaaatctaacccaggacagacctgtcggggaatttatcaaaatggatgccctgccgggtgatagtaaaagtagcattgagaaaatgacgcaccctcttatagagcaggagcctaccaaaccttactttgctggacaaagagttatcactcctgatttcaccacgtaccgtgcagagcaagaaaaacaaagaaataatcttttattatgtaaaacgcgagatgatagcgcgctgtatttcaatcaaaccccgatcattgagctaaaaaggtacaacgatgatgtatttgccaaagaaacagcactgcgtgctggcgacaactttttgaataaaacgcaatatttcaccccaatggtcgagtatttaacccagttcagcaaagaaggggatattttggtacaaaacccctttgaaaccagcagcgataaaaatacgccgcacttacaatttattcctggcgatgtccctttgcccctgttctatcaaaactcgcaggtgttgattgatgacaaataccaacaggttgactggcatttacctaccctggctgtgactgtggatagccgacaacatgactggcgagaacagacagaacgggtacagacggtgtgccaggagttgctggctaatcaacacatcagtactacaccagtgctcaggaatctggggaatggcctgataaaaatgtatttgatcttcaaacaggacggtagtgatctggcagcagaaactatgcaacgtgccccaggttggctggagtcctgcggcattttcatttccaatacgccaaaagcagttacgttcaccaccctgggggcagttcaatattatgccccctatggggtcacggataaggaacaactgctgacaagtctggtacaccatctcatcaacagagcataa

SEQ ID NO: 377675 - DNA, 1464 bp, Salmonella enterica
atggcaagccatgccgtaaaaaaagatgattatgccaaacttgatttttccacccaaaatattaaatcacacattaccgacccacgttgtataaacgccaaattgacgccattacaactgttcaaagcggcttttcagctaggcgatacccctgcagtttccaactttcgttttatgaacaacccagccactaaagacgacggtaaataccgggagtggatgtatcactttgacaacagtaattatgctgccgagtttaaactgattaccacacgtaccgcaggtaccgagcaggccaacaacgaacagtgcctggctgcgttcccctatgataccgaaaaaaccatccgttttacgcaaagcgaagcggcaacaaaattcccgacgatggacgacctgcaaaaagaattcagtcatataccgggagccagctatgtggttattcgtaaccccgacaacacaacgccgattgaaacaggtattcgcaccgagataattgtacatcaccgttctgcaagcggcaaaaacgaaacggaatcacgcgatgccgaattgatgaccttccatggtgttgaccggtgccaacctttccttactccacaggaacttgaacaagccctgcatctcacgtcattacaacgtttcgtattgggtgaattccgtgatgccgagcctcaacaatttctcgaagcattaaaagaacaaaaagaaactcttaacgcgcaaataaggcaaagcctgacgggcaacgcacttaaaccactagaaaaaataactgtggcaaaattcagtgaacaggggctacaaatcaccgacgaggaattattcaataaacagataagcacttacgataacctacccgaagttctggataagctcccgaaactggagctttcctctgcagatttaactgaggacgtgctcactatcgttcccatgctaatgaactacgatcagaatgccgaattgaagcccgattgctccgaaaataaggcatttcctgccagaacccaattgcgggaacgcactaacgaacaattcagggaaccgctggaacgagatttacaacacgtcaaaatgagtcacagccccaacaaccttctctccatggataaattgattgatatcactcatgatattcaggacttttaccagaagggagtccattctctcaaagcgttaaaggcagaccctaaactgatagcgttatatgaaagccgggcagaattggccagagagtatgccagtcagttcccgacacgcgcaacccacccagaaacccatcaggtactctcactgttcacctactacatggtagacgatctggaccaggcagccgccactttgcataacctgggggccaacgtcgatagcactcatcttgcccgtatgaaagatcaacagcaaccactactacagcactttattacccatcgtctgttaaacgatcaactggcagactga

SEQ ID NO: 377676 - DNA, 396 bp, Salmonella enterica
atgcctaatattagtaatacccatctgacacaaacccattatcccctcgctgttgtcgaggcaaagactgaccatggcgatgagcgttttgtgattgataaaaacaaagggatcgtttaccagttttcgattgttacaaacaatactatgaaactaaatcaggtggatttatctacactaaaaaaggcaatggggatcaaatctatagataaggttacacactgcgatgccattgagataatgaaaaaccctagtatgatcaatactattcttagcccgtatagctctagttcctcatcgcctggccgattcaaggccatcaccgatttaggtggggttgaaaagagccaatacaaacagttatcagaatccgacaaaacggcacaactgcgctag

SEQ ID NO: 377677 - DNA, 312 bp, Salmonella enterica
atgaacaagaaaactaagcgtactttcacccccgagttcaggctggaatgtgcacagctgattgttgataagggctactcatatagacaagccagtgaagcgatgaatgtcggttctaccacgcttgagagctgggtacgccagctcaggcgagagcgccaggggattacgccctctgccacacctattactccagaccagaaacgtatccgcgagctggaaaagcaggttcgccgcctggaggaacagaatacgatattaaaaaaggctaccgcgctcttgatgtccgactcactgaacggttcacgatag

SEQ ID NO: 377678 - DNA, 756 bp, Salmonella enterica
atgccgatcatagcaccaattcctgaggaagaacgacgactgatgcgcaaagaagcacagcagacccgcgataaaaatcatgccagacgactcattgctatgctgatgcagcatcagggaatgaccgttaccgatgtcgccagaatactctgtgctgcccgctcatctgtcggcagatggataaactggtttactttacatggcgctgaaggcttaaaaagcctcaggccgggacgtgctccacaatggccggttaccgatattcttcaggtgcttccgctgctggttcagcgctccccaaaggattttggctggttgcgctcacgctggagtacagagttgttgtcccgcatcatcaaccagatttttaacctgacactgcatagccccactctgcaccgatacctgaaacgtgcgggcattgtctggcgcagagcctcgccaacgctgaaaatccgggacccgctgtatgaagaaaaacagcttgccatcggacaggcgctgaatgaggctccggcagaacatcccgtgttttatcaggatgaagtcgatatcgacctgaaccctaaaattggcgcggactggatgcccaaagggcaacagaaacgtatcgccacgccggggcagaaccagaagcattatctggcaggcgcactacattcgggtaccgggaaaatccactatgtcagtggcagtggtaagagttctgatttatttatcagcctgttagaagcattacggcgcacataccgatga

SEQ ID NO: 377679 - DNA, 285 bp, Salmonella enterica
atgagcatagtcatcccacataacgagaactatctgttcgatgatgatttcgattctattaccgtcaaaatgactgttctaaaagaccatatatttattgcttttcaactctgcaaaagaattagccttttcataaacttccccttaccactgctatgccaccatagtttttatttggtggtcattctggtggtcttgacaaacagcaaattcaagtttagccagttactaacaaaagcgatcccagtcagagagccagattttagtattaagacatctcagtga

SEQ ID NO: 377680 - DNA, 492 bp, Salmonella enterica
atgaacgaagacaaagtacaacgcattgctgaagaggtcgtctttcgtctgcagcgacgggcgcaaagcaatattgcgcttagcacagcccagctccgggacgccgattcacgcacgctgttttcccggtatggcaatctgcgcattttgctggcggatctgcctttgctcaggggaattgccgaacaaaacgacaacgatattgccgccataaagctccactacgcacttgcgctgggggtcaatgtacaaatatcgctatgccgttctttgttgacgtccttaccggtgaaaaagctggcgcgtctgccgttgagcttctgtgatgaaaatggtcagtccatcattctgcactcaggtcagctcctgagttatgccgatgttgcccgactaaggcgccagattctggtacttcgtcgccgatgcatcgttaccgcactggcccacgaagcggccagcgtccgaaacattcaactgattaggcaggagtaa

SEQ ID NO: 377681 - DNA, 399 bp, Salmonella enterica
atgcgattaattgataatgaccagctcgagtcattatataaacaggcagcgcaatcagatcgcctgcgtgctcaccttttgttgcatcgttctcatcaggagagggtacaacgactgcttattgctttggtcaaggggagctatgtagaacctcactaccatgaactacctcatcagtgggaaatgtttatcgtcatggcagggcagcttcaggtctgcttgcatggaaaagatggaaaggtcattaagcaatttgttgtcggagacgatagcggaataagtgtagtggagttttctccaggggacatacatagcgttttatgcatgtctcaacgggcacttatgttggaagtgaaagagggaccttttgacccatcttttgctaaagcgtttatttaa

SEQ ID NO: 377682 - DNA, 1212 bp, Salmonella enterica
atgaaacttgctctaatcatagatgattacctaccagatagtacccgtgttggcgcaaaaatgtttcatgaactggcccaagaatttattcagcgtgggcatgatgttacggtgatttatcctgatagtagtctgcaagaaaagattttgtttgactcgtttcagggggttaaaacgtggcgcttcaaaagcgggtccctcaaggatgtgagcaaaattcagagagccatcaatgagacgcttttgtcgtatcgagcatggaatgctatcaaaaaccagataaaagaagaaacttttgatggcgtggtttattattcaccttccatattttgggggcatctggttaagaaaattaaaacccgttgccaatgcccggcttatctcattttgagggacatgttccctcaatgggtgattgatgcaggaatgctgaaagcgggttccccaattgagctttattttcgtttcttcgaaagatcatcctatcgtcaggcaaaccgtattgggctcatgtctgaaaagaatcttgatatttttcggataactcacagaggttatccttgcgaggttctacgtaactgggcatcacttacgccgacggtattgtcccgggattatgtgccattgcgtaagcgtcttggccttgaagataaagttattttcttctatggcggaaatataggtcatgcccaggatatggcgaatctgatgcgtcttacgcgaagtatggcagaacatccgcaagctcattttctgtttattggtcagggggacgaagtcgaattaatcaactctttagcttctgagtgggggctatcgaattttacgtatttggcctctgtggatcaggatgaatttaagctaattctgtcggaaatggatataggcctgttttcactttccgccagacactcttcccacaatttccctggtaagttattaggctacatggttcagtcgctacctatattaggtagcgtgaatgccggaaatgatttgcttgatatcgttaatcaaaataatgcagggctaatacatattaatggtgaagatgataagctttatcattccgcactgttattgcttcaagatattaatgtacgacgtaagcttgggatgggctcgaatacattattgaaagaacagttctctgttgaatctgctgcacagacgatagaaatgaggctggaggcatgtaatgcgattaattga

SEQ ID NO: 377683 - DNA, 1131 bp, Salmonella enterica
atgaaaaaattaaaaattatgtctgtggttgggactcgtccggaaattattcggttatcacgcgttttggctaaacttgatgagcattgcgagcatatacttgttcatactggtcaaaactacgattatgaattaaatgaagtattctttaacgaccttggtgtccgcaagccagattattttttaaacgccgcagggaaaaatgcagctgcgaccattggccaggttatcattaaagttgatgaggtattagaatccgaaaagcctgaagcaatgttggtgctgggcgatacaaattcctgtatttcagctatccctgccaagcgtcgtaaggtgcctattttccatatggaagctgggaaccgttgcttcgatcagcgcgtacctgaggaaactaaccgacgcattgtcgaccatactgccgacatcaatatgacctatagcgatattgcacgtgaatatctattggctgaagggatcgcagcggaccggatcattaaaaccggtagtcctatgtttgaggtactttcttactacatgccccaaatcgatggttcagatgttctctctcgcttgaatctacgtgccggtgaattttttgttgtgagtgcgcatcgagaagaaaatgtcgattctccgaagcaactcgtcaagcttgcaaagattctaaacactattgctgaaaaatataatcttccggttatcgtttctacacatccgcggacgcgtaatcgtattaatgagcaagggattgaattccacccaaatattaatctactgaagccgttgggtttccacgattacaaccacttgcagaagaattctcgtgctgtattgtcagacagcggtacgatcacagaagaatcatccatcatgaattttccagcggtaaacattcgggaagctcatgagcgcccagagggctttgaggaagcatctgtcatgatggtggggctagaatgcgaacgtgtacttcaggctttggagattctggcaacgcagcctcgtggagcgacccgtcttttacgacaagtcagtgactacagtatgccgaatgtatcggataaagttgttagaatcgttcactcttatatagattacgtcaagagagttgtctggaaagaatattga

SEQ ID NO: 377684 - DNA, 1104 bp, Salmonella enterica
atgaaaatcctgattactggtgctgatggttttattggacgtaacttgtgcttgcgtcttcaggaaaagggggatgttgaccttattaagattgatcgtgattcaagtactattgagcttgaaataggcctgcaagaagccgattttatttatcatctcgctggtatcaatcgacctaaaaatattgaagagtttattgaaggtaacagaaatctgactcaacagattgttgattttctgttagtgaatcagaaaaaaactcctattatgattagttcctctatccaggcagggctagataatgcatatggtcagagtaaagcagcagctgaaaaacagattgaacgttatgcggcaaaaagtggagctgcatattttatctaccggtatccaaatgttttcggaaaatggtgcaaaccaaactataactcgttcgtagctactttttgtcataacattgccaatgatgttgacattaccatcaatgacccagcagcatcggtaagcttggtttacatcgatgacgtttgtactcatgcgttaaagcttcttacaggaacggttgatagcggatataaagacgttgctccgatttattcaacaacagttggggaggtagcagagttaatttatcgcttcaaagaaagtcgttctactcttatcactgaagctgttggcactggattcactcgtgcattgtattcgacgtggttaagctatttgcctaccgacaagtttacttatacagtgccattcaatggtgatagccgtggtatcttttgtgaaatgttaaaaacaccgtcatcggggcagttttcctttttcacagcacatccagggatcacgcgaggtgggcattatcaccacactaaaaatgaaaagtttctcgtcattcgtgggcaggccagattcaaatttgagcacgttattaccggtgagcgttatgaactaaacgtttcattcgatgaatttaaaattgttgaaacagttcctggttggacacatgatatcacgaatattggcaatgatgaattggtagttatgctctgggcaaacgaaattttcaatcgtgatgagcctgatactattgcgagagctctataa

SEQ ID NO: 377685 - DNA, 1035 bp, Salmonella enterica
atgtttaaagataaaacactgctgattacgggtggaacagggtcttttggtaatgctgtattgaatcgctttctttctacagatataaaagaaatccgcattttctctcgcgatgaaaagaaacaagatgatatgcggaaaaaatataataatcagaagttaaagttttatatcggtgatgtcagagattatcgtagcattttgaatgcaactcgtggtgttgattttatataccatgcagcggcgcttaagcaggtgccatcatgtgaattccatccaatggaagctgttaaaactaatgtgctcggcacagagaacgtactcgaagctgctatcgctaatgaagtaaaacgagttgtttgcttaagtactgacaaagcagtttatcctatcaatgccatgggaatttcaaaggcaatgatggagaaagtgatggtcgcaaaatcacgtaacgtaaatagtaataaaacggtgatctgtggtacacgctatggcaacgtgatggcttctcgtggttcggtgattcctttatttgttgatctcataaaagcgggtaggccactgacaattaccgatccaaacatgactcgctttatgatgactcttgaagatgcagttgatcttgtactttatgcatttgaacatggtaataatggtgatatcttcgtacagaaggcccctgctgctacgattgatacattagcaattgcactgaaagaactcttgaacgttgagcgtcatccagttaatgttatcggtactcgccatggcgagaagttatatgaagctttacttagtcgcgaagagatgattgcagctattgatatgggggattattaccgtgttccaccagatctgcgtgatcttaattacgggaaatatgtagaacagggtgatagtcgtatctcggttgttgaagattataactcccataatacacagcgactggatgtagaaggaatgaaaactctgcttcttaaattaccgtttattcgcgcactgtgtgcaggtgaaaattacgatctggaagcctga

SEQ ID NO: 377686 - DNA, 792 bp, Salmonella enterica
atgcttagacctcgcattattccctgcttattgatccataatggagggttggtcaaaactgtcggctttggttcgccaaagtatgtaggcgatccgatcaatgcagtaaaaatatttaatgaaaaggaggctgatgagctgatggtactggatattgatgccagtgctgcatcgcgtgagcccgactatgcgttgattaagaaacttgcagcggagtgccgcatgcctttgtgttatggtggcgggatcaaaacggtcgagcaagccgatcggattatttcgctaggtgttgagaaagtttcattgagttcggtggcaattgataatcctcaattaattaccgaacttgctcaggcaattggtcgccagagtgttgttgttgtactggatgttcgaaagaaaaagggccttttttctaaggggtatgagcttaccagcatcaataatatccgaagccataagcaagatccgttgggggttgctatagaactggaaaaagctggtgccggagaaatagttattaactcggttgataacgatggtgttatgaaagggtatgatcttgagttcgcgaagagagtgaagtctgctctacatgtccctacgacttttttaggtggtgcaggcacgcacgagcatctcagtgaactgattactcactgtggccttgtgggtgcggctgctggcagcctatttgtttttaagggtaaatatcgtgctgtattgatcaattacccaacagcggagcagaaggaccagatctatttaccgtccatgcaaaaacagatttga

SEQ ID NO: 377687 - DNA, 627 bp, Salmonella enterica
gtgatcaagcttattaattatggtgtaggcaatattcaggcttttcttaatatttttaaactgctagggattcatgctgaagctgtttcgactccagaggccttacagggggcaacccatctgattctgcctggtgttggtgcgtttgataatgcgatgacacagtttaatcagtctggtttacgtgatcgtgtcgaacaattagtactcgctgataagattcctattatcggtatctgtgttggcatgcaaatgcttgccagcggtagtgaggagggaagaatggctggactcaactggatccctggtcaagtccgcagtttcacgtctaacccgcagagccagaaacttccaatgccgcatatgggctggaacgatgtgaaaccgtgtacagactctgtcttgacaagcaatttcatcgctgagccgaagttctattttttacactcatactattttgactgcgcggataaaaatgatgttatcgcgacggctgaatacggatttgaatttgactgcattgttgggagaaagaacatttttggtatccagtgtcatcctgaaaagagtcactccacaggtttgacgttgttaaggaatttttctgagattggtaatcatgcttag

SEQ ID NO: 377688 - DNA, 420 bp, Salmonella enterica
atgcctttttatgtaggttcaagctgttttcctgcttgcataagcaagcaaaaaattactgatatactcaattcggatattccccttaagatgagcttatgggataggattaaagagtttttctttaccactcatcaggctgaagcacaggattgcctttaccggatctgccatccatctgctggaacgacgccagatgatgtgaggaaactgtttgaacgtcttaaggaattagcccacccgggctatgcggataatattcagagtcatcggtatggagggaagagtttctgtatcatggacaaaaatggcgatgaacttctgtcggtaagttttgcagatgattatactgttacaacaggaaccaggggggcattctttgctgacggtactacgcgcatttatcctttacatccttag

SEQ ID NO: 377689 - DNA, 882 bp, Salmonella enterica
atgaataggtttttttccgctcgttccgatatgccattcgcgatgttactactggcgcccagtttgttactgctgggcgggttagtcgcatggccgatgatatcgaatatcgaaatcagtttcttgcgtttgccgctaaatccgcagattgcgtctacttttgtcgggttaagcaactatatcagcatcctttccgatcctggcttctggcattcgttatggatgacagtctggtacaccgcgctggtggtggcaggcagtacggcgctggggctgggcgtggcgatgttcttcaaccgagagttccgtctgcgtaaaacggcgcgctcactggtgattctttcctacgtaacgccgtcaatctcgttggtttttgcctggaaatacatgttcaacaacggctacggcatcgtgaactatcttggcgtagatctgctgcacctctacgagcgcgcgccgctgtggtttgacaatccaggcagcagcttcgtattagtggtgttgttcgcgatctggcgttatttcccgtatgcctttatttcatttctggcgattttgcagaccattgataaatcgctctatgaagccgcggaaatggatggcgcgaatgcctggcaacgcttttgcatcgtcacgctgcccgccatcatgccggtattagcgaccgttgtaaccctgcgtaccatctggatgttctatatgttcgccgatgtttatctgctgaccacgaaggtcgatattctcggcgtatatctttacaaaacagcatttgcatttaatgacttaggaaaagcggctgcgatctccgtcgtactcttcatcatcatttttgctgtcatcttgctgaccagaaaacgggtgaatctcaatggcaacaaataa

SEQ ID NO: 377690 - DNA, 2271 bp, Salmonella enterica
atgataaagcctgcaatattaaccgatccggggttttgcccgcatcgtctgaataaatatgccacgctcatggcttcaggcaatgggtatataggtgttcgcgcctgccatgaagaagcgtatacggtacaaactcgcggtatgtttctggcgggtctctatcatcgggctgggagcggcgagataaatgaactggtcaatatccccgatgtgattggcgtcgacatcacattgaatggcgaaattttttcgcttttgagcggaacgatcgagcgctggcgtcgggaaatcgactttgccagcggtgagttgcgtcgatccttgatttggcgggcgccgaatgggatgcgctttgcgattgatagccgacgtttcgtttccgctgagaagttatcgttattggcgatggagatgactattacgccattggacgctgatgccagtatcgccctttccaccggtattgacgccacgatgactaatcatggtcgtcaacatctggacgaggcgcagatcagggtttttggccagcattatctgcaggggatctacaccactcaggatggacgcaacgatattgccatttcctcatactgctgcgtaaaaggtggcgtgcagcgttgtttcacggcaaaagatcgccgtctgatgcagcataacaacgcgcaggtaaaagccggcgagcggcttgtgctggaaaaactgacgtgggttaactggagctccgaaaggcgaaattcgctcgaaagctgggggcgtcagtctctacggctgctggaaaactgtgtcgggcagggctatgacgcgttgttggcagagacaacggcgaactggcattcatggtggcgatgtcaccgtgtgaaggttgtcagtacagcatgtgacgatcaacagatgcttgatctcgcgctttatcatttacgcatcatgacgccggagcacgatgagcggagcagtattgctgcgaaggggcttaccggggaaggttataaaggtcacgttttctgggataccgaggtgttcctgctgccattccatctgcttacctcaccagaaaccgccaggcggctgctgcgctaccgctggcataatttgcctggcgcacgcgagaaggcgaggcgcaatggctggcagggcgctttgttcccgtgggaaagcgcgcgcagcggagaggaagaaacgccggaattcgcggcaatcaatatccgtaccgggttacggcaaaaagtcgcctctgcgttggcggaacatcacctcgtcgccgatatcgcctgggcggtcattcattactggcacgccacccgcgatatcaactttatgtcccgtgagggaatggcgctgttaatggaaacggctaaattctggatgagtcgcgcgatagaggtgaatggtcgtctggaaattcataacgttattggccccgatgaatataccgagcacgtcaataacaatgcctttaccaattatatggcgcgctacaatgtggaacagtcactggagttcgcccgttcacagaagtgcgcggacgaggcttttatttaccgcgccgaacattttttacaacgtctctggctaccagagattcaaccagatggcgtattgccacaggatgatacgttcctcagtaagccggttatcgatttagcgcaatataaagcgaaggcgggtaaacaaaccattttgctggattactcccgcgcagaagtcaatgagatgcaaattcttaaacaggcggatgtggtgatgctggcttatatgctgccgacgctgtttacgtcgcagacatgtctggcaaatcttcgtttttatgagccgcgtactatccatgactcctctttaagtaaagcgattcatggcatcgtggcggcccgctgtggcgaccccgtaatggcgtatcaattctggcgtgatggggcgcgtatcgatctcggcgatgacccgcatagctgtgacgatggcattcatgccgccgcaacgggggccatttggttgggggcgatacaagggtttgctggtcttagcgtccgccagggagaattgcatctggagccgacgttgcctgaagtgtggtccgaattatcctttccgctacagtggcaaggcgttgaactctttatcacgataagcgcggaaagcattcaggttagcagcacgcgcgctgtcgagatgtggatctgcggccagccgacgacgattgacggtgagcaatgtttctcccgacgcaacgttattttacctgtaattgggaccgctaccatggagggtgaatga

SEQ ID NO: 377691 - DNA, 660 bp, Salmonella enterica
atgaaacctcaggccatcatttttgatttagacggtgtcattactgataccgcgcatcttcattttatggcgtggaaacagattgccgatgaaatgggcatagctattgatgaagtcttcaatgacagtttaaagggcattagccggatggcgtcattgcggcgtattttacggcatggcggaagagaggggacattgagtgagagtgaatgcctgcactgggcatcgcgtaaaaacgcaatttatgtcaattcgttacgccagttgacgccccattccgttttgccagggattcgggaattactcaatactctggccgggttgcagatcccgacagcgctcgcctcgatatcgcttaatgcgcccgctattttacaggcgcttgatattgaagacctttttgatttttgcgccgatgcgtcgcaaattacacgttcaaaaccagatccggagatttttattaccgcctgtaaagggttaggcgtcgtaccggaaaaatgtatcggtattgaagacgcacaagcggggataacggcgattaacgcgtgtggaatgcgatccgtaggtattggcgaatcactcacgggagcgggattgcttctcccttcgacggaatatctgacgtggtcgtgtttatcggctttctggctaaatgcataa

SEQ ID NO: 377692 - DNA, 906 bp, Salmonella enterica
atgaaaaccttactgtcctctactgcgctagttatgtgcgcaggaatggcttgcgcacaagctgccgaaaaaaatgactggcattttaatattggtgccatgtacgaaatagaaaacgtcgaaggtcaggcggaagatatggatggactgggcgaaccttccatctattttaatgcagcaaatggaccatggaaaatttcgctggcgtattaccaggaaggtccggtcgattatagtgcaggtaaacgtggtacctggtttgatcgtccggagctggaaattcgctatcaattactggaaagcgacgacgttaattttggcttgaccggtggttttcgtaattatggctatcactatgtagatgagcccgggaaagataccgcgaatatgcagcgctggaaagtacaaccagactgggatattaaactcagcgacgacttacgttttggtggttggctcgctatgtatcagtttgtcaatgagttatcgataacgggttattccgacagccgtgtagagagcgaaacaggttttacgtacaagatcaatgatatgttctcgatggtaactaactattatcttgagcgtggttttaatatagataagtcgcgtaataacggcgaattctctactcaggaaatccgcgcttacttgccgatctccttaggcaatacgacattgacgccctatactcgtattgggcttgatcgctggactaactgggactggcaggatgatcctgagcgtgaaggccatgacttcaaccgactgggattattatatgcatatgacttccagaacggcctgtcaatgacgctggaatatgcctttgaatgtgaggaccatgacgaaggtgagagcgataaattccactatgccgggataggtattaactacgccttttaa

SEQ ID NO: 377693 - DNA, 1011 bp, Salmonella enterica
atgtcccccactatttatgatatcgcgcgtgttgcgggagtttcaaagtcgacggtgtcgcgcgttctcaataagcagacgaatatctcaccggaagcgcgcgaaaaagtcctgcgcgccattgatgaattacaatatcagccaaataagcttgcccgggcactgacaacgtccggttttgacgccattatggttatttccacccgttcagcaaaaaccacggcggggaacccttttttctcagaagtgttacatgcgattaccgccaaagcagaagaggaagggtttgacgtgatattacaaacttcacgtagtactgaggatgatctgcaaaagtgtgaaagtaaaatcaaacaaaaattgattaaaggcatcattatgcttagctcgcccgcagacgaaaccttttttgcacaactggataagtatgatgtcccggttgttgttattggtaaggttgagggtcaatataatcatgtttattcggttgatacggataattttcgcgacagcattgcgttaacaaacgccttaattaataacggtcatcaccgtattgcctgcctccatgcgccgctcgatttccacgtttctatcgatcgggttaatggttataaaaccagtattaccgcacataacctcgttctgcatgaaaaatggattattgacggtggttatacgcatgaaagcgcgctgttagccgccagagaattattaagtcaacaaccgttgccggatgccgtatttgctaccgacagtctgaaactcatgagcttatatcgcgtggccgccgaaaaaaatatcgctattcctcagcaactggccattgttggttacagtaatgagatgctttccttcatgttgacgccaccgccgggcgggattgacgtgccaacgcaggcattaggtgaagaaagctgccgcttactatttaatctgattgccggaaaaaaaacagtcacaaatattaccgtcaagacacgcatttcgttaacaggatcgttggcttaa

SEQ ID NO: 377694 - DNA, 870 bp, Salmonella enterica
gtggaatattcagaactaagtaacaacctcaaaatgcctatggttggttttggcgtttttaaggtaaccgacaaagaagaatgtaagcagtcagtgttaagtgctattcgcaccggttatcgccttatcgataccgccgcggtatacggcaatgaagatgccgttggtgacgctgttcgtgaagccatcgcgacaggtctgtgtacccgtgaggagttatttattacttctaaactgtgggtgcaagatatggctaactacgatatggccaaagcaggtattgaagcgtcgctaaaaaaatcagggttagaatattttgatctctatttactgcatcaggcaatgcgcgactatttcagcgcgtggcgtgcactggaagatgcctgggaggcgggtaaactgagagccattggcgtatccaatttctatgctcatgtgttagcaaacttctgcgaaaccgtcagaattacgccaatggtaaaccaggtcgaattgcatccatactttgcacaacctgccgcgctggaaaccatgaagcactataacgttcagcctgaagcctgggcaccgttaggcggcgggagacatacaccgtatgaaaatgaaatgctccgaaggattgccgatgctcatcaaaagaccgtcgcccaggttgtcctgcgttggaacgtgcaacgtggtgtcacggtcattcctaaatccactcgacaggaacgtattgaagagaactttgccatctgggatttctctctgacggataacgaaatggctcaaatcaacgctcttgatttaggctatgttggcgaagcggtgaagcattttaatcctgaatttgttcgcggttgtcttggcgttaaaatccatgactga

SEQ ID NO: 377695 - DNA, 3420 bp, Salmonella enterica
atgcccgtaacattagaacatgtatcttccagaacggtacagcagaagttaaatacaaaaggtatcagaacttgggacaccatacagtacctttcagctttggatggagcgcataaggatactgtttttcatgaacaaatatctaatctacccgaagagtatattcatctggatgaaatggcccgagatgaaaaagaatatagcttaaatatttatgagttcttttttgagtcaacgtctgaaattatatgtgaagatattaaatcaactttagatttttattatttgaatagtccaacatttcgtcggttggttaattatagagtcgattatagtataaataacgatattgataccagtaagtgtgaagtaatagtatccccaaattatagttatgaaaatgctgaagggagtcgtgtgtatttatcgttgccgtttaataagaaaggttttcctatcgatcctgaatctaacgactgtgataataatatatcatcagaaaaagtattgttagatttatttttgaagcatattttatacgatgatttgaaagtggatcatgatgttacaaatatatattctaatgttatttataaggaaattgattctacggctatggcacatgcatcgttgtgtttttctcaggcagcggtgagcgatgggcatgagttatttaatattgacagcgtaactactctacctaaaagtactgagcaaatcatatttgagggaaaggaaatacaaaaagaaattttatcctattttgaaaggagtaataattttcagccagtcaccgttcataagatggagagaaatataaaaaatatcgcagtaacgggtttattactatcatccagattaacaatagcagacggtaatgggctaaaaaatgataattcagaagacaagaataattttccatccaataaagaacaactgagatatgcaagggctctcccggaggatcattccgccccaaatatggagcctcatccgttaggtaagatgatagatgaaatagtcaaacattcttcatttgctgcaggattgccacttctcgaaatgctcaaaaaacttggagatgagcagttgatgaatgattacaaaagaggctatcatgaattacttgtattttctcaaacagggcagtggacgcatggtggaagaagacttgctgctgaatatatgttcaagggccttataattcatttgaatgagattgaaatacttcttaataatggaagcaaggtttcttttgagtattttgtaaaagaacatattgaacatcaatataaaatatatgggttaatcgctcgtgatatgctggttcatcctttatatattagttccagaattttagcaaccagacaaattgcatctgtcctggcaaatgaaagccattatacgaaagtactaaatcaaaaatttccagaggtttcgagttcaaactttgatactttctatggcaaggaggctatttttacagcattaaatattgtgaatttttacagaaaagaaaaaaggatgtccacatttaacactaaaaagatgaaagatctttttaagcgagttcaattagtaatacatcatttatccaggaatggtggtgataaaatattgcttagtcctgatggcataaaatataattttagcatcatgcgtaatattattcatttgtgtacaaagataactggtccagttaatgataaaaaaataaatgccctatcaagaaaaattgtggttaataatgaattttccagatatattaagtctttgtttcccagagggaacggatttttagagcttttaatgaaggccgctatcgatacacaactaaattgggcggaaaaatattatagagcagagacacatgtcaaagatcatatgcaagactgtgatctattagggttaatgaatataaataaaatgttgcgagatacagttgttgggcttattcatgagattagcgatattgtacaatcgagttggctgacagcagaagatcaacatgaaaaacaggttcagtctctcgaagcattcaaaaggaaagtctcatccatggatggcggacaagctttcgtgtatggttttaataaagtcattcaggaggggctatggggattaattgaattgagttttgatgttgatgataccgctcatcatcgaacagtttcctcactaagtccagcatcaagatcagggcttcattttttaggaactatctggaatattgtaatgagttttgtccctggttttaatgcgctagctggtaccagcagtattctcaatcgggctattgtggaaaactctgctgatgtatgtggatacattcaggatgttatacgtattggtatggaggctgctcctgttgcagaagcgaagtttacagaaagggcgtcgaatgcaaaatatactggtctccgctttgttgaaagtaagatagagactggtgtaataaaagcgccgattcaaaaaggtagtaattataaagttatagagtcaatagaagatattgattttatttatcaaaagagcaatcggaaaattcttgagttaaatccagagggaagtgatggactctatcgcgctacagggtttgataaagaaacgcatggttattataaacagtcaggagaaggcttttacagaaagcaaaaatcatttctaccgtcgtccgcggaaaatccgaatacaataagatataatgacagagaaatagttttgactaaagaccctgcatcagaaatttatcagggaaccttttctgataccgggaaaaatgcgggtattaccttttacagaagttctgacggtaaattttatcaggtatcaggactgaaagggggagggcctatacggcatgttgataaaccttattcggagttgagagaaggagatattggttatgatgaggatcttctggatatttccgatgattcaccactactggaggacatgctgccttccctgtcagaagaattatatcctacatcagaagaaaatgtgcaaagtgtctataaaaaactccagagtggggatactgcagcaggtgagattgaagttgtattatgcagggggacaactggcccgcaggctgaaaatattgttaagtttaaaacagcaggaggtgtggaggggcccgatccaaatatattgcctgtctctgtagaaaccgccagggagcaggttcggagtggaagagtggtacctgaatttacaacagatcttagtgttgcagatagatttagcagggagcatcatcttattatcgttaagacaaaagtgaaatatcttacgcgaggcagtacaagtgaaagcggttgggttatgccacatactgcaccagtggaacctgttggtatcattgaccggacgtatggtcatgcagaaaatatcggacaggcaaacgcttctaagtaa

SEQ ID NO: 377696 - DNA, 2469 bp, Salmonella enterica
atgcgggggattggagcagtcattcattttcgttcaccaacacctggcagcacatcagtccccgatttcagcgggatgtggagcagtatcagggactggttcgccctgtctgctcaggatgaagctgcacagtgctttcgcgctttttatcagccggatgaaggaatgtccccaccggacaggctgaagcactttttaagactgaaggcgctggcatctccgggacggcaggctaacttcaccgcagagcgaatactcggtaccggtgaaaccatctgcatgattgcctccggtaaaaatagcgactttccctccgtcacacttcacctgagcgaccaggaatggcattcgacacaacaccagaaagaggctgttgacagcccacggtcctcagtcagtgatgacaaccaggcagctaccgtaacagggacaggagggagcgtcgaagcacgcccaaaaggttcccctattacaaatctgcaaattcagacatggcgggacctgccacaggaagcgaaacgcgaggcaggcggctggaaagtatgggcgcagtcacaggggataaacatcggcagtgccggtgcctgcctgacaaacactggactaaggccaaagggggcaatacgactacagccgcccggggagagaggttcttccattactaacgcacagattcaggtgtggcgggatctgccacaggaagcgaaacgcgaggcaggcggctggataaggtgggcacagtcacaggggataaacatcggtagtgccggtgtctgcctgacaaacactggactgacgcccaagggggcaatacggctacaaccgcccggggagagaggtacccctattataaatatgcagattcgagcgtggcaggacctgccacaggaagcgaaacgcgaggcaggcggctggataaggtgggcacaggcacaggggataaacatcgacagtgccagtgcctgcctgacaaacactggactgacgccccggggggcaatacgactacaaccgcccggggaaagaggtacccctattacaaatcagcagattcgagcgtggaaggacctgccactggaggcgaaacgcgagacaggcggctggataaggtgggcacaggcacaggggataaccatcggaagtgcaggaatctttctgaccaaccgcgggctgaccccctttggtacagagcgcctgaaaccgcccggggaaagaggtacccctattacaaatcagcagattcgagcgtggcaggacctgccactggaggcgaaacgcgaggcaggcgggtggatgacgtgggcgcaggcacagggcatagacattaatagtgcgagtgcctatctgacaaagacaggactgaagccccaggtggtggtacggctacaacctcccagggagaggggctcccccattacagaggcgcaacttctggcatggttgaacatgtcaccggaggaacgccggacatcaggtggatgggccacatgggcgcaggcccgggggatatcttatataagcgcaagaaagtatctggcaccgacagacagtgagatgccatccagaggcacatcacgtccgtcgccgccctcaaccgtcacgagtgacagcccacaggcatcaacatccgcagcaacaaccacaggcgatgagatagccatcagcatgactgcgcccccggagcacatcggggaaaaacggtcgcttccctcgaccaaagaggatatctcagccccgccggcaaaacagatcaaggaagaggaagatgacgttacctggcgaacacaccagataaacaataacttacccattctgcggcactggcgtgacccggcgatatcggtgatgacccaggcggaaggcaggattgaaaccttacaggttacacggtgggggcctctttttaacctgttatcccggcagaccaaagccagaattaatcaggatattcgctggtttctgcaaaatgaaggaaagcatgatgcgcgaatgaatgccatgatgtccgtcgctattccccttgatgacagcgacggttacagggggcgcacagtctacgcgcgaaccgatctggcggcgtttaccgtactgggcccctactccggccgcctgctggacagtgaaaaggtacggtgtgaacacgaaaaagaatatgggaaggaagccggtaattattattttgccacgcgaagccaggagcgcctggtgtccgcctggccggaaggaaatatcctcagcctgattaacagtccggcatttacccaccggacagcggagacagaagcaagacagaacgtcagcgcggtgcttgtcgggaagaatattcacttttacgtcaccacacgcgacatcagcgccggggaagaactgtggtttgattacggaccagactaccggcattttgagtcaggtgaagcactacgctccgcgcaggttaaggaggaaccaccttcaccggaagagggatag

SEQ ID NO: 377697 - DNA, 123 bp, Salmonella enterica
atgtccagtgtgctaatgtcgatggtatctttatcacagattttctgtgttcatatccaattgatatatcatagtatatttacctcttcctctttgattattaccatcattcctcctgattaa

SEQ ID NO: 377698 - DNA, 1032 bp, Salmonella enterica
atgaacatcatcgccattatggggccgcacggggtttattataaagatgaacccatcaaggagcttgagcgtgcattacaatccctgggatttcaaattatctggccgcaaaatagcgttgatttgttgaagtttattgaacataacccacgcatttgcggcgttatttttgactgggatgaatacagcctcgacctttgtagcgaaatcaatcagctaaatgaataccttcccctctacgcttttatcaataccaactcgacgttggacgttagcgtttacgatatgcgcatggcgctgtggttttttgagtatgcgttggggcaggccgaagatatagcgacgcgcattcatcaatatacaaacgaatatctcgataatattacgccgccgtttaccaaagcgctgtttacctacgctaaagaaggaaaatataccttttgtacgccgggtcatatggcgggtacggcgtatcagaaaagcccgccaggctgtctgttttatgacttttttggcggcaataccttaaaagctgatgtgtcgatttcggtgactgaactggggtcactgctggatcacaccgggccgcatctggaagcggaagagtatatcgcccgtacttttggcgccgagcagagttacatggtgacgaacggtacgtcgacctcgaataaaattgtcggtatgtatgccgcgcctgcgggaagtacgttgcttattgaccgtaattgccataaatcgctggcgcatttgctgatgatgagcgatgtggtgcctctctggctaaagccgacgcgcaatgcgctcggcattctcggcggtattcctaagcgtgagttcacccgtgacagtattgcgcgtaaggtggcggaaaccgagcaggcgcagtggccggttcatgcggttatcaccaattctacttacgatggtctgctgtataacactaactggatcaagcagatactggacgttccctcgatccattttgattccgcctgggtaccctatacccattttcatccgatctactag

SEQ ID NO: 377699 - DNA, 1830 bp, Salmonella enterica
ttggatatccttgctcgcctgtttaataccacacattcaggtcagcggttaagagtattaaatttgatcggaagtaaaggtgaacttgcattacaggtcggtgaagcagaaccttttggtttgatcaatattggcgattcaccctctctttataaaatgtgcgaggaagatacgacgttcgattatcaaagagacgattttgccaagtctctgttccatacgttgaacgataaagattcccaactacatatcttaattgggtcccgaaaatttactgagggctggagcagttggcgcgtatcaactatgggtctactcaatatggggcgtggggaaggctcacagattattcagctttttggtcgcggggtacgcctgaaaggtcgcaactattctttaaaaagaagcacaccaggagaacgtcctaaaggactgcatctggagaaattagagacactgaatattttcggtgttcgtgctgactatatggcaacatttaaacaatatctcgaagacgaaggaataacgccaagtgatgagatcctagagctaaattttgaaactcggccaaacatgcctaatacaaagcttaaaacacttaagctcaaagatggctacaaggataatcaaaaaaacggcttcaagcgtgtttactttcctgagctttatgaggttcctgctgaactgcaaggcaagataaagcatccacacatcaaactcgatttatatcctaaacttgagtcgattgatacgagcaggaagggtgacaatacacctgttaatgtcagaaacgaggctaaattagattataaagtaatcagtgcgtttgattttgatcgtctttatctcgctattcaggcctataaactacagcgtggatggtcaaatttacgtctggataaacaacggttgatcgatttttgccttggaaaggcgaatatcgcaaacaattggtacacgctttcgattccggcatcggagctcgaaattaagcagtattccgatattgctaagcaagaagatattatgcttcgccttctgactgattataccgaccgcttttataatgcattaaagaatgcttatgaaggtcaattctatgaaataactcaagtcaatgaagacgatccatgcatgatcaaaatgtatcactttgaaattgaagagtctgatgatggtctggattatacaaagcgacttgagcaattgcagcaaatcatcgctcaaggtgatattggtaaagctaaatcctggaacgctcccggcatgattgctgtaaccttcgacaagcatctatattatcctcttctttcaattgagaaaaatgctgatttaccgctaaaaatgcgtccaaccgcctttgatgcaccgagcgaaattaccttcattaaggatttacaagaatttattgaaacaccaaaaggtcaaaaaaccatcggcaataagagcttatacttgttgcgcaatgctgattccaaagctaaaggcttaggtttcgctactgcgggtaacttctatcctgactttttattgtggctagttgatgatgaaagtgggaagcaatggttaagcctgattgatccaaaaggtattagaaatctgaatcttgacgatgctaaatttggcttgtacaaggaaataaaagagcttgagaagaaattatctgatgataaattaagtctaagtgcgtttattgtttctgaaactcgtttcgttgatttaataaatgtatccgaacctaaagataaaattgaagaacgtaacgtactctttctagaggatactggttctatttatctggagaagcttttcaaaaagatggttgcttaa

SEQ ID NO: 377700 - DNA, 303 bp, Salmonella enterica
atgaaattactaaacacttacgaagataaagatgaagcagaggatgcattaactaaaatctcgggtgagaaaaggcttgctagtgaaagagatagtacggaaactatttataatctttttggtcaagcaacgtggagtaatttttataaattagaaatgttctctctcccggagttgcaaaaactacttgagctgcgaaaggctggtcagcctatagatcaatccaggtatgctgaaataatgaacacactgaatcatgtatcacgagctttcgatttagaagttcctgcacattggttgtga

SEQ ID NO: 377701 - DNA, 1320 bp, Salmonella enterica
atgccattaataattattgcggcaggcgttgcgctgctgttggtcttaatgattggctttaaagttaacggctttatcgcccttgttctggttgccgccgttgtgggatttgccgaagggatgggcgcacaagatgtcctgcactccatacaaaacggaattggcagtactctgggcggactagccatgatcctcggttttggcgcgatgctgggaagattaatttccgatactggcgccgcgcagcgcattgcgacgacgctcattaatacgttcggcaaaaaacgcgtgcaatgggcgctggtgataaccgggcttatcgtcggcctggcaatgttttttgaagtcggattcgtactgctgttgccgctcgtttttacgattgtggcctcatcgggactgccattgctgtatgtcggggttccaatggtcgccgccttatccgttacgcactgcttcctgccgccgcatcccggccctaccgccattgcgacaatttttgaggcaaatctcggtacgaccctgctgtatgggttaattattaccataccgaccgtgattgttgccggccctctgttttcaaaattgctggcgcgctttgagaaagcgccgcctgaaggattatttaatcctcatctattcagtgaagaagagatgccgtcattctggaacagtatttttgccgccgtgatcccggtcattctgatggccatcgcagcggtatgtgaaatcacgctaccaaaaacgaatgccgttcgggttttcttcgaatttatcggtaatccggcagtagcgttgtttattgccattatcatcgccatttttacgctgggccgacgcaatgggcgtacggttgagcaggtgatggatatcgtcggcgagtccattggcgctatcgcgatgattgtttttatcatcgcaggcggcggcgcgtttaaacaagtgctggtggatagcggcgtgggccaatatatctcgcaattaatgaccggcacatcgctatctcctttattaatgtgctggacggtagccgccgtgcttcgtattgcgttaggttccgcgaccgtggccgcgattaccaccgccggcgtcgtattgccaattattaacgtaacccacgccgatccggcgttaatggtactggcgacaggcgcgggaagcgttattgcatcacatgttaacgatcccggtttttggctgtttaaagggtattttaatcttagcgtcggggaaaccctacgcacctggaccgtcatggaaacattgatctctgtcatggggctgctgggcgtactggcgctgaatgcggttctgcattaa

SEQ ID NO: 377702 - DNA, 1134 bp, Salmonella enterica
atgtttgatttactcctgcgccgtgcgcggctggtcgacgatacggtctgcgatatcgccctacaaaacggcaaaattgccgcgctgggcgacatttccgcgccggcggtaaaaaccctcgatctacgcggcaactgttttgtcagcgcaggttggattgattcgcacgtccactgttacccaaaatcgccgatttatttcgatgagccggatagtatcggcatcgcgacgggggtgacgacggtgattgatgcaggcagcaccggcgcagacgacattgatgatttctatgccctgacccgtcaggcgaccaccgacgtttatgcgctattgaatatttcccgcgtcgggctgatagctcagaatgaactggcggacatgaacaacattgatgccggagcggtaacgctggcggtaaaacgccacccggattttatcgtcggcctcaaggcgcggatgagcagcagcgtggtaggcgttaacggcatcacgccgctggaacgcgctaaagccatgcagcaagaaaacggcaacctgccgctgatggtacatattggcaataacccgccggatctggacgaaatagcggagcgtctgacggcgggcgatatcattacccactgttacaacggtaagccgaaccgtattcttcggcctgacggcgagctgcgtgcctcggtgacacgggcgctggcgcgcggtgtgcgtctggacgtcggacatggcaccgccagcctgagctttgcggtggcaaaacgcgccattagcctggggattttaccgcataccatcagttccgatatctactgccgtaaccgcatcaacggcccggtgcattcgctggctaatgtgatgtcgaaattcctcgccatcggcatgtcgctgccgcaggtcattgcgtgcgtgacggccaatgccgccgatagcctgaatctgaaaaccaaaggtcgtcttcagcccggcctggatgccgacctgaccctctttacgcttaaacgccagcccaccgtgctggtagacacggaaaacgacagcttacaggctgaggaattgctgacgccgcttgccgcgatacgcgcaggcaagggctatatgactgaacaagggagcgcggaatatgccttcgatttttga

SEQ ID NO: 377703 - DNA, 2037 bp, Salmonella enterica
atgcttaatattgttagtgatttatgtattcgaacaggcgaattgataactgtactgtcatgtttttgggggagggcggagccttcccccccagaagttgatgaaattgctgattcagaagtaaagattaatggtgtattgttaccttatggtatcacggctaagcctgtgttagcgggatgtattcatgacataagtgcaaagaatatgcccctcattattcatgctggtgaaggccgttggttagttgtcgttagagtgatgaaaaatgcggtcacggtacttggattagataaaaagtttcaggatgtcatcattgatgattctttttataatggtaaaacaatatttcatgttacccagaatgaaacccttaaagaaaaaatatcagtaaagcgtatgctttttagacttatctctgagaacaaaagttattactgtagatattttttggcctcttttctgttagcattgactgcgctaaccattcctgtttttagtagtgtgttttatgataagttaatacctagtgagtctgtttcttcgctgttctcgatatgtggtattgtagtgattatgatactacttgaattgtttttacggacttcgcgtgatattagtcagtcattgctttctcgagctgatgatgtcactcttgatattagttttatggaaaatgttatccgtacgaacagccattcatacatggtgtcgacgctctatttcctctgggtcgagtttcagagagttaagtctattattttctatgggcttattcaaaaagttgctgaattacctgtattcataatctatgttactattatttgtatgaatctcggatttgtggggctggtaccggtagtgatgactatagttggggtaatatattcctggtaccataacatatccatggataaactaggaaaagaacagcaaaataaaaatcagtcgcgagactcgtggttttctgaagttttattttctcttgattcggtcaaaaatataaatagtgaaaggttattgactgactgggtagttatgtcagaagataattcaattacctcattgaagattaaaaggatgatgtctacctatcagtatattatggcatcgatgtctggtttaaatcaactgttgataatgatgtgctcgtggtttttggtcgtgcagggacgcattacaaccggcgctattatttcttcagttattattgttgggcgtatgtcttctataatgaattcattttcctcactatttatgtctgtactaacagcaagaagagttactcatgacatgggggcgctatttgattcaccaacaagtacttctccaaatttgttaacctatattaaacccaaaaattctattctggttaaaaatctttcctggaaatacgatgatgttggacctgatgttttaagagaaatcgatctcgaaatacccattggacaaaaaattgcaattgtgggggaatgtggagccggtaagtcaactctgctttcactcattagtggaatgaaattgcctcattcgggcgcagtaatttatgatggtgttagctcgaatcatttatcctctgattttttctttaaagaaattagctgtatttaccctaaagatggttttttatctggtacccttgaatacaattttttgcttaagaacagcaccaatccgcctaaggttgtagatgccttaaagttacttgggtgtgattttattcttaatgaccctggcggtatgaaacggcatgttagctatatggaagagggtttttcatcggggcaattacagaaattgcttctggcaagaagtatcagcggttcagcaaatatctttgtttgggatgagccgacttcttctcttgacgagaaaagtgaaagcgaatttttcagtaaaatagatactatccttaaaggaaaaacactcgtcatgacaacgcatcgcaaacatttattacaattttttgacagagtaatttatttaaagaatggaaaaattacaggtgattatctgcacgcagagctattcccttaa

SEQ ID NO: 377704 - DNA, 2940 bp, Salmonella enterica
atgcataaaaatgtctccgtgacaggtaatgctgagtccggtagtataataactatttatgatagcaatggaatacctgtcagtactacaactgcagataatgaagggcattgggaagttacattaaattcattgccagaaggtagtaatattttcactattacatcacaagatgcagcgggtaatatttcggaaactgtaataaatattgactgtgatacttcaacatttgttactaatttgactattactgatgaaacaaatagtggagcattaaccgatcttattacgaataattcgtctccggtgattacagcaaatggtgaagttggatcatcagttgatatcatagtcaatggtgtcaaagttgacaccatatcggttggcgatgatggggttattacttatgagcttaaatctcttcctgatggggaatactccgtacagctggtaacaacagatgtggcaggaaatacggcaacctctgaggctatttctgtcacagtcgatactcatatcagtcaattctctattagtatgagctctctgacgaatgacactacacccgcattgtctggaaagggtgaggcagggtctacaattgatgtttatgtagatggtagacatgttgatgaattggccgttgattcaaacgggaactggtctactaatctgtcattaggtcctgatggcgtatattctgtttccgttgttatcaccgacatcgccggtaacactgagacaaaaacagcctctttaacacttgatacacatattgatactcccactattgtatttcccgcatcgcaagattcggcagatccaacagacatgattacaaatgtctctaaacctactttctctggcgagggtgaagtaggagacacaattaccgtttatgtggatggtaaaagctatgcgacgacaacggttgattcacaaggaaattggacatatgaattttctaattccttaagcgatggggcgcatagtatttatgttgttgctaacgatgctgctggaaatagagccacatcggatacaatttcactgactattgatacggttgcccaaattaatacgccaacactggtttcagatgatgggctttataataacgataatatcacaggcaataataaccccggttttaaaatttcaggcgaagtcggtgagacagttattatctatctggatggtaagccggtcgatacgattgttttaacgcaatcatcgcaaaattggcaatatactcaaacattagatgatggtgtgcataccttacaatattcagtcactgatgttgcagggaataccagtatttcagatgttacaaattttacaatcgatacacactatgatgcaacgcttctggtgacctctgttgaaggagtacaggttactgcaaataccgatgtgatatatattacagataatcctgcgacaatttctttaaacggtgagggggaggccgatagcaaaatcactatttatattgatggggtacaagttgcctccgtattggccgataattcgggtaactggcaggcagatattgattctggaaaatttcccccacaagagaacgcctcagtacaaattatttcggaagacgttggtggtaacacttcagaagttgattacaccattcgtgttgataatcaagttgatggtctgacattacaacttgataatccaatagccaatacttctggtgctgaagactctcctgtcgtatggaaatcaaattccgaatcgttagactttagcgggacgggagaagctggagcaaccgtctctataatgataggtggcgttatcgttgcgtcttgtattgttgacagcaatggacagtggagtactgaatcatcacctgtcagtgatggaacatggagcgttactattgaagaaacggatgttgcgggtaatacaatggagtatacgcatgacattgttatagataccatgccaccgcaaacacctgatattgagtattcctcttatattgatgaacaaggtattgttgttctttctggtatgggggagcctgatagtactatttatctgactgatagtgcaggaaatatcattgcacaagcaacggtttctgatgatggttcatggactctttccgcaaaatatacttcaggcacagattattctgtgtactctgtagatagctttgggaaccaaagcccagcagttgcagttaatggttcaacagacgccaatacctggcccacagattctatagacaatattaatcatttgctgattactaatgctgatacccatacggttgttttttccgatatccccaacagtgctagctctgttgatattatatggcaaggaaaaacatatgctttagtccatgatgatgatggttcctggtctattcctggtaatgtcgttcacgagaatggagtttatgaggttaatctggcaatccattatgccgacggaagcacctcgtatatgaatgagtttgttgtggtcgatattcctcaggctaaaagtgcttctcatcaggacttatctcatgtgtctgatttgataccccatatggtcgatcatcatgttgaacattcgggaggcttcgataagcataagttggctgatatatttcatcatgcctctgagtctcactcacactcagttccagctagcgttacccgatcagaacatacgcctttggagcatacaagtatcgatgcgtttgcacaatttatgcataaaatggagcatcattcttccgtatccgaaaaaatcactgggcttaatgacgcttttgctaagaaccatgaaggggaacataggggattatctggtaatcaccaggttaatattataaggcattttattactcacgcgtataacgaacatatacataatgctgatgaacatcatcatagtattcataccaatcatcatatttaa

SEQ ID NO: 377705 - DNA, 729 bp, Salmonella enterica
gtgaaaaaaggtataagtccactaagtaatttattagttaaaaaacaaagtgctgttcgtcttcaatctgagatttcagaaataaataatcaaattgttagtaaaaataactttattgatcttaaaggtaacgagatctcgaccatcaggcaagactatttacactcaattcaaaaaaaactacaagatagtgaaaatgatttgtcaatcttgaatgctgagctaaaaattatcggtttacaacgttctgagaatattgttcactcccctgttgaaggcgttatatataatgtaaataaaaatgcgatgactattggtggggttatttcaccgacagaaatgttattcgagattaaacctgttgataagcatatcagggctgaggtgaaaattaatccgaagtaccgcgatcaaatttttgttggtgaaaaaacaacaatttcaatcgagtcaattgtaaactccaggcgtcaaccatatccggcaataattgaaagtattagccctgatattattgaatctaaggataataccgggttgaaagaatattataaagttatggttgagttttatgtttccgacagtgctttatcaaatattaaaccgggaatgatcgttgatgcaaatattataactggtaagcatacgattcttgattatcttatgtcacctattgctaaaacatttaaaggggcgctctcagagccgttaccttctgaccatcgataa

SEQ ID NO: 377706 - DNA, 789 bp, Salmonella enterica
atgaaaagcgcgattgaacgtcgcatggaaatcgcgaatctggttggagtgagaggtaaggtcagtgttggggatcttaccgaatattttggagtatccggagcgactatccgtactgacttacgtttcctggagtcaatggggcacattgtccgctctaacggttatgtcattttaaacaaaggagtcattgccaacttttcagcggaatcccgaaatcgtaaagaatctgtaacggtagggcatgaacaggatgttgccgtatcggcagaagagagtaataaagccctatcttattcaaatggcgacggatgggagcagaagctgacggaaataataggcagcctggaacaatcattgttcattggtgccggagcgttaacccgacattgggcacaaattcaaaaatgggactctgggttaatactgacaaatgatatccagttagtaacctctcggttattccctacgtctaaaatgacggtgattatgcctggaggcattgttaacagtgaagaaatgatgtttgagggtggcaaaacagaagaaaatttaaaagaataccgggtagaaaatgcaattatcgaggttgataattttgttcccgaagaaggtttttttgcggcccatgaaaatgatgtaaggttcttaagaacattacgtactattgcgaaaaaacttatacttattgtacgaaatgagaatctgtcacaaatcgccaatttctggattggcgatgcagacttcgctgaacactttatttacgcctcaaaaataaagagtctctga

SEQ ID NO: 377707 - DNA, 474 bp, Salmonella enterica
atggctaatattgttctggttagaattgatgaacgtcttttacatggacaaattcgaatcacatggggaaagtattctggtgcaaataccattattgtcgccaatgatgaaatagcagccaaccctgtattacaggcaccttttaaaggcgctgccggcggtgagtatgtagtacttttcagaacaatcgagcatttgattggtagtatcaataaagctgatgaacgcagacgtatactcattctgtgtaaaacaccagaagatgtcgccaaacttattgagggaggagtcaagtttaatgaggtcaacgtcggtaatatgcatcataatgccgagcggagacaaattgacaaaaatgtttccgttagcccggctgatattcaggccttcaaacgcattcagctaaaaggcgttgaatcgataatacagcatatgccagaaagctcacggaaaaacattttcgactgtatctga

SEQ ID NO: 377708 - DNA, 771 bp, Salmonella enterica
atgtatgaggcttttttggtcgccttatgggctgccctgtgcggaatagataagtatgatgttgccttaaactttcatcgacctttaattacaggacctgtgattggttttattttaggcgatgtccagacaggattaattgcgggagctgcaatggaattagcctggttagggctggtgccaaacgccggttcacaaccaccagatgttaccatcggagctattgtcggaacagcttttgctattaaactgggtatcacacctgaagcgtcgattggtatggcgattccgtttgctatggcaatgcaagcgcttgtaattttcttatttacatcattttcaccggtgatgcagaaatgtgatcgctatgctgagcagggaaatgcctctggtattgatcgcatgctttactttgggttggctaccagagccgtgttatatggcgttgttgcttttgcggcagtttactacggaacccaggcagccgattttattatcagctatttaccggaaaaagttattgccggaatggctatcgcagggaaaatgatgccagccgtgggctttgccatgttgttacgtacgatgtttaatgtcaaattactgccacattttttcatcggtttcattttaacaacgtattttaaattacctattattgctgtcgcgatagcgtttctttgcgtggccatccttgattatttccagtcaggaagcgctaccggaaaaaatcaggaaggagtattagaggatattcatgatgatctctaa

SEQ ID NO: 377709 - DNA, 870 bp, Salmonella enterica
atgatgatctctaaagcaaccgtagacacagataccactgaagagctgactgtatcacctgataccgagtatcaggataaagaaattagttcggctataacaaaaagagacctgtggaaagttggtttccggggtctttttatggaaggaaatttcaattatgaacgtatgcaggccggtggtttttgttttagcattatcccggcgctgaaaaagattcatcgtaatccacatgatttctcactggcgctcaagaataacctttcattttataatgcgcaccccaagctttttacatttccacttgggctggcaattgcgatggaagagaataaagaaaaaccagaaacaattaacgcaatcaaagcagcgacaatggggccgacaggagggatcggcgacgccattgaccatatgaccatgatgcctttgacgttaggtattggcgctgcgatctctctgcaaggtagcattgccgggccattcgtattttttattttgtaccagatttaccacttttttgtttatttctggctgctcttttttggctataaatctggtgttgcggctctcggaaaattatccgagcaggcagataaactgggacgcgcggccaatatcattggcctgggggtgctgggttctatgactgccgcctttgttaaagtatcgacaccattagtggtcacggcgggtgctgctcatgtgaatgttcaaaccgaccttctggacaggatattgccaaatgcgctaccgctggcgctggtctggatcatgttctggctggtacaaaaaggtaaatcgcccagtgcgctgatatttggcacgctagctcttggtgtcgtgggacacgttattggtattttctaa

SEQ ID NO: 377710 - DNA, 438 bp, Salmonella enterica
atgattgggataattgttgtaggccatataaattttgcctcagggttacgttctgccgttgaagctattgccggggagcaatcctgtgtcgaatatatcgattttattccgggcatgagtacagaacaattagaaatacatatccgacaggcagttgaaaaatgccagacaggagaaggcgttctggtattcacagacgttgctggaggttccccttgtaaccgagcgacagccgtcatgtctgattactctgatatgcgagtgattactggcagtaatttacccatgattgccaatgcctgtcttgagcgtgatgctacaaatcttgatgaacttgcatcactcattgtagaactagggcatcattccattggactgattgatatcaacaattttgtgaccgaagataagccaaatgatatgaatgatggtctctga

SEQ ID NO: 377711 - DNA, 1035 bp, Salmonella enterica
atgcagcatcaatcaattacgcaattaatgcgtaaggtctatctctggcaaaaagaacaccaggttcgctgggtaatcaggagccagggacaacgccgctatttaaaatcaaccgactgggaacgcggtgttttctggagttgcgttgccgcagcatggcgagaaacgcaggatgacgtgtacttaaatgggcttgcggaatatacccttaatacgggttttcgggctggaccgctggtgaattttgctgacgatcaggtctgtcttcaaagctatctggaggtctatcaaacattaggttgtgatgacgccattcagtacgcgcaaaaagcgcttgagccaatgctgacaagcgagaaaaaaggtagagagatctggtggtgggccgatgctttatttatggcggcaccaacattagctgcattcggcgctcattctcagcaacccgcttattgggagcagatggatcgcttctggtgggatgccgtggattttcttcacgacccagaaacgggactttactatcgtgacaagcgatatatgcctttaccagagggtgaagacgtccgtgaacagaacgggcagaaagtattctgggcgaggggcatcggctgggtcctggcggcaataccacggctcctggcctggttaccccagaacttcccttcccgtgaacgctatctggcgcagtatctactgctagctgaacaggtcgtgaaataccagtctgcggatggcttatggcgtactagcttacttgatcctgaacattttcctgagcctgaaagcagcgccagtgcgttgttctgctatgcgctggcatggggaattaatcatggcgtgctggatgataaataccgtcctgtcgtgctacgggcctggcagggactgacagaatgtgtcgacgaacaggggaagttaggatgggtacaacttccggcttataacccccgaagagtggacgccagccataacattgattatggcgcaggtgtctttttgcttgccgggactgaaatgttgaatctgatttaa

SEQ ID NO: 377712 - DNA, 1458 bp, Salmonella enterica
atgatatcaccgacacaacgcccctggttaccccatgagcatcccggatggaaggattatacccttttgttcctgcaaaaattaaagcgtgatgtgttattacgtaaaccctttatttcacataacagtgaaatggctgagttgtttgcgaaaaaccacctttcgtttaaggaaaaatgcgaacagatggccgtgtattttattgattcatttttctattactcccgttttcagttttgccgggcatatttacccggctggcccagtgagcaaggttccgagtccgatgcgattgaagcaacggcccgaaccttaccgctgatggccgcctggctccattatcaaatgacaaatcaaggtaagttagacagctatggaaaatgtgtccgtcaggctctaaaacaagcttttatttgtggaaccaaccctgaacatccaggatattggggaaaaatcaaagattatgatcagcgtatttgtgaatgctgcgatattgctctggcgttatggctggtacgcaataccgtctggaaaagctatagcgcatctgagcaagaacgtattctttgctggcttcaaggggtaaataactgtaaaaccgttgataacaactggcatttatttattgtgttaacccagcaggtcgtactggcgctttccggtaaaggagaaaacagcgagcagcgctatgcacgggtaaaagagttctacgtcggtgagggctggttccgtgatggggcgaatggaaacttcgattactataattcgtgggcatttcactatcttttattttggatcgatcgtataaaccctgattttgatcatcaatttattacacaaagttgcgccgaatttgccaaaacatttcgctatttctttacaccatgcggatttcctttttttgggagaagtattagttatcggcttgcagcacctgtagcgctcatggcgaatgccattcaatcgggtcgggctgatgggcaattaaagcggatcatttctacgctaacccatttcttcatactacatggcgcggaacaacatggcgtcatcacccagggattgtttcaagccgatcgtcggttgatggatggctacagcggtagtggcagcagtttatggtcactgcggacattaatattgatgctttattctggaacagaatgtggcttgtgggatactgatgaagcacctctggaaattgaaactgcatcatttgattttactatcgacgccatttcagctcgcgtcacaggaattaaagaaacgcaagaggtcattgtaacatttgctcatgatcagtatcctgatgctcctttcaaggatggcaaattaataaagcaaggatggtggccaattgttcttgaaagtgtctccgggcgctcaacacgtcctaaaaacaacttattacgtaagggggttacgacttttagttcccgattaaatttatacctctga

SEQ ID NO: 377713 - DNA, 1005 bp, Salmonella enterica
atgaaaaactatcaacggccctgtattcttttttttacagcattaatgatgataagtgcgtttcccgcgtttgccgggggatatatccaattcggtagtgagtacgaatactatccacaaaaagaaaacattgcctatcatcgactgacgtcttacaacccgtatattcgcttcagttatcgaccgcaagactctgactggacgtactccggccgtattcttttaaaagagtatccatataagaatgattataataataaagtaagcacctctcaatctgggttgtatgaactatacgccactaactatattaaaagtggtaattttatcttcagaccggggattggttttcggatcattccttatgataaagcaaactactatggtgagcgatatgagcgacaactcagaatactgcctcaattcgattatctgctgacgcaggactcccgcttttacctgaatggattcttttatatcgccgactcaaaaggaagccgtaagaacgacagaactaccgacccttataacaatggcgaatgtaaagccagtgatgccaatgcctttggtttttgttctaaaaaatacagtgactggggatatgagttcgacgcaggagtccgccataacattaacagcacgaatagtgtagcattgggggttcatacggagtttgatgacgttacgaataactatgatgatcagctaattcagggaacactggattaccaatatcgtacaggaaaattaacgttagggccatatgtccgtattgctcttgatcgcagtattaaactgaaatcagaaaagaaccctgcttcaaatattactttaaaacaaccttataaccgctatggcttacgcgcaaattattcctttaacggacgttggtctatgggtgccgaaacctattatcaggaagagaaaatgcaggatcagtctggcaacgatatgcagtcgcggcagaaatggttttataagctgaacgttcagtataatttctga

SEQ ID NO: 377714 - DNA, 2400 bp, Salmonella enterica
atgaaaaagacaaatttagcattttcgctattgtgcttaagtatgggcagcgtacatgcacagatcgctaccgaaaatgtaaatctgccagtagtaaaatcaactaccacaacgtcaacccagcaacagtatattattgagcgtatgcgtgatacctggcggcagaattttgtgccttcaggcccagcggcgccagaattatcagcagagtatgtggcaagtttaaacaaaacggccaataaactctggaaaggaatagataaaaatacccccgcaggccagttatgggcagataccgtactggatagtgaaagcacatcaggacgcctgaaactgggcactactctttatacggtataccaacgcctgttcaccctggcaaaagcctgggctacgccggggacagatctttataaaaatgctcagttgtatactgtacttaaatcagcgctgatcaatctgaaccaggactattataacgatcagaccccagaatggggaaactggtggaactgggagttaggcatttcacgcagtgttaacaatactctggtgatactttatgatgatctcccttccacgctgattgataaatataatctcgcgacccgacattttgttcgcgaccctcgttatttagctgaaggaagcggagccccctactccaccacaaaaaatgcctttacgtcgactggcggaaaccgcattgacagcgcaatggtcgtttttgttcggggtctcctggctaacgatcctggagaaattagcgctgcagtaacttcagtacctgaagtgcttaacaccgttcagtccggagatggtttctacaaagacggatcgtttatccagcataaagatttaccttatagcggaacctatggccaggttttgctgaatggtctgggattaattaaaaacagcgtcgcaggtacaccatgggatttctcagttgaagataatcgccgtatttatgacgtgatcagacaagcttttttacctttacttcatgagggaaaaatgcccgatgccgtcaatgggcgcagtatttcacgtaaaaatgggcaggatcaggatgttggcgcatcagttatgaatgccattgcattgtttgttaatggtgcgccaccagaagaaaagcgccacattgaacaggtattaaaagcccagctaaattcaaaaacaacggaatattatcacactcacttgccagaaaacttaacctcctggcaggttattacgcgtattcaacagaatagccatttgccaccggccccccgaacagcgggcggtaaactgtatgcagatatggatcgtctgatttatcagggtacaaactatctggctgttgtagcgatgcattccaatcgtactggtagctacgaatgtattaataacgagaatctaaaagggcagagaacatctgatgggatgacctggctgtatttgcccaatgacgatcaatatcgtgattactggcctgtggtcgacagtcggtttttaccaggcaccacctctgctggcgagcagggttggtgtgatgagcaataccgtgtgactcagttaggtcgggcaaatatcgcctgggcgggtggcaatactctgaataaatgggcaagcgcgagtatgcatttaaaagtgccgacttattcactcaaggcgaaaaaatcctggttcatggcaccgcatgaaatgatcatgcttgggagccagatatccagtagtagcacggcggtaacgaccattgctaatcagaaaatcagtggctcggcaaaagtgcttgttgatggcatcgtcttgcagcccggagaagagagaaaagcaacccaatctgtcgttttaaacgataaaggtaataacattatctggaagccattagctggctcaagcgcacaagttagtgtgaaacaacgtcagggtaactgggccgatatcggcacctcatccggtaaagtttcggcacaatttttaaccattatccagcctcatagcgcagaatcagataatcattatgcctgggttgtcttcccctcggggtccgcatccccttccgtaaatgctgacataacgctccttgcgaatgatgcaaaagtccaggctgtgtcgctaccaggtcagcaggttatttatgctaatttctggcgttctgcaactgtgggaggcattcatgcattgacgccaatgtccctgattatgacgccaacaacacaaggttatcagatagcagtatcttcaccacgtcgtgatagtcgggtgtcattccaactgcccgataatgcaatcccattccatatttccagtgaccctgataagcgcgtatctcttaacggggacatcgtcagcgtgaatatgaccaatctacgcggcagtagttattcttttgaattatctaaaaataaatag

SEQ ID NO: 377715 - DNA, 2688 bp, Salmonella enterica
atggataaaataattttctgtcatcgctctgctggatatggttcttccctgctattggcggtgttttcattatcttttatttccagctcagtgaatgcggctatttcttctgattgttcgggatcatcttattgcactaataaaacaatagatgccaatactgctggatatatcgataaatctcctgtttattttttagggaatacagatcttactgtttctgccagccaggcctttaataataacaaaggtacctatgagttcagagagaatacgcatgtaaaagtcaacgccgagtcaggattaaatggcggtacatacacgctaagaggcggaagtacaccagggaaagttgaaatcgatatcaatgccagttctggtataaacaatgccaagttaactgctctcgctggtagtaatggcgtagtcaatgccaatactgaaaaagcaattaatggcggtagtcagatattcaatgctggaacaacactaaacatcaatgcagccgatggcgtatttaacagcacgggactgacattcacagatgcgacacttaatttaaacgcatccgatgcctttagtaaaaatacgatgtcctctggtaaagttggcagtgttaaaggaacgtcaacggttaatatcaatgccacggggggaatgtctggtgggcagttaaacattcaggattccagcgaggtcaatgtgactggaaacggtagtgtcactggaggcacgttactgttcactgggagttcagtattaaatgcggataccgctaatgctatcgcgggagaaacgaataatacgaataaacagatatttcaatctggtacgacaatgaatgtgaatgcagccacggcactcagtggtggcaatcaaacatttaacgatgcaacattaaatgtcaatgccagtcaaggtataagtggtggatatcagatcctggcaaaaagctcagtcctgaatacagaagcagatcaggctattattggaggacaaataaaattacaggataatgcagtatttaatgctaacggtaaatcaacaattaccggggggatacaaaattttaacgataatagtatattaaatgccaatggcgaagataccctgtctggaggcagccagaattttagtggaaacagcatcctgaatggcaacagtaaaggggcgatttccggtaacagcaaacaaatatttagtaacaatgctatatttaacgccaatatcagccaggcagttactggtggcacatctaccacatttaaagacgatgctgtcatgaacatttcagcacagcatggtgtggatggcggaaatttattatttgatggtaattcgacattaaacattaatactgcagatgccattaatggtggcgagcagcgttttaaagggaattcactgataaatctgaatcatgaaaactcgttatataatacaacattgaaactagaaggaaatgccagtgtcaatataaacgcggataatgctttgaattatactgaccatatcgttttttcaaaaacgtatgacactacaacaggcagtatactggatgttaacggacactccctaaccattggtagtatcagtggtaatgataccaatgcggtaatcaaaaatagtagtgctcaggatgccattctgactaccggtttgtatgattatggtgtgtttgccgggcaaagttaccaatatgattcttttctacagcgtggcgcgatgcgtgcagatgctgtcgtcagcagcgcattgggagatattacccgtcaggctggactggcgctaataccacagtttgctgacagactcgttccggaacccagtggaatggcccaaaatggccaagggatttgggtacgtaccctttacggacaacaggaaaatcaaggtgacggagccacaaatgcggcatggaatggccacgtaaaaggtatccaaattggggctgatttatggcctgctgatgaagacagcagtcataaactgggtgtttatgtgggttatctcgacagtaatgctaatgtatcgggcaaaaccatttacacctcgaatgcccagcttggaagctaccagctcaatacttacgctacaggtttatactggcgttatacagcaacccagggctggtacacaaacaccactttacaactagcccggtattctggacaggtagaatcgaataacagtacacgtaaacctgatattcatggtcgtgggcagattctggcttttgaagcgggctatccgcgagtactaaatgaggcgctgacactggtgccacgaatttctgtatcctggcagaaagttaaattagatgactatcgttatgatgatttaaacgttaataacgatctggataatcagttaaccgcctccgctggagctcgtttgtactggaatactatgacgatatccggggtccagtggtcccccttccttgatgcagagctgaataatcaactgaccgccagagacagaaataatgttaccgtaggcagtacaggataccaggattcattacttacatcctataatggttctgctgcaaaaataagcggcggcgtgaccgtaaagctgaatgattatacaaattattatatcaaggttgattatcaaaacggtcttagtgaacgatccgaaaagacctggcagggaacaacaggggtcagtttatactggtaa

SEQ ID NO: 377716 - DNA, 144 bp, Salmonella enterica; identical to SEQ ID NO: 38763

SEQ ID NO: 377717 - DNA, 267 bp, Salmonella enterica
atgtttgtgtatgaaaaatatttaagtgatatttttcagatggttaaaaaaagatttccaacgctacaatcctgtcaacgactaaagagatacgtcgagactatcaaagcggccattatcgggtatatgagtttaatcaatattcattatggtagcggcgggatctatttaactggcacgctaaacgccatgatcctcccttcggatcacacttttcactcccggttattcactgacagaaatcgagtgttatcattcactacgtaa

SEQ ID NO: 377718 - DNA, 183 bp, Salmonella enterica
atgatgagcaaaaactccatcaataaggcgttgcgcatgatagcctatcgcgctagcagtgcctggattatccctttcgtttctcttttcttatgcgttattgctgcgattcaatttttaagaataaaaaagaaccagaagaaaattaggaaatggtttatccacaatattaattattgttaa

SEQ ID NO: 377719 - DNA, 594 bp, Salmonella enterica
atgcaaaagttgatacgtgataacccggtcagtatctccttgcaattgaagtggttttgctttttcttcaacgctaagattgccttcaagttaagtaatgctgcacaagcctgccgggaagactatgtatctgagcaaaccggtgaaaatagaacattaatgagattaaaaatgaatatcgctgaggacttcaaccggctttatgccgacgtagggcgtaacattgagcaaacattagctgatattgcagggcttcatgttgaaaacgaagatggcaaaaagcagcttaatgcgatgacggcgcaactactgattctgcaggatactttcaatcagaaattggcttatctacagcaacatgccgaatgggacaagtttacccttgctttttttggcgaaactaacgctggaaaaagtaccattattgagtctttgagaatcttgttcgatgaaaccacccgccgacagctgctacaaaataatcaaaatgatctgcataaggcggagcaagagttgcgcgaaaacttaacgcagttacgaaagtggactgatttttggcccgtaaccgaaatcacgtgtggtgtggagagctga

SEQ ID NO: 377720 - DNA, 2892 bp, Salmonella enterica
atgattggtacaactccctaccatgctaaatattttgcgcatgagctttctatcctccattcaaacaatggcgtggatcgtctttctcagtcattgtttgatgccagcgttgatctcaaccctcaccaaattgaggctgcgttatttgctatagagaatcctttaagtaaaggcgtggtacttgccgatgaagtcggcttgggtaaaaccatcgaagcgggattagtactttgccaatactgggcagaaaggaagcgaaaactactgatcatctgcccagcatctttacgtcggcagtgggcaagtgaactaattgagaaattcaacttaccttcacaggtattggatgcaaagactttcagccagctgcaaaaagaaggtgtctataaccctctaaataacaaatcgataacaataatgtccttccactatgcagccaagttagaagagaagctggtagctgaaatgtgggatctagtggtaattgacgaagctcataaactccggaatgcacaccgcgacagtaacaagatgggacaagcattaaaacgcgcgctttatggccggaaaaaattgttattgacggcaacgcctttgcagaattcgctaatggaactgtacggcatatcgacacttattgatgagcacactttcggcgcccctaaggctttcagaaagcaatatatgcagacagacagtgatatggtggagctgaaagggagactgtcgcactttatcaaacgaacattacgtaagaatgtactcgagtacgtcaagtatacggaacgtaaagccatcacaatcccattctatccaagtgaacaagagcatgaactctatgagcgtgttcaaaatctgctggaacgtgaggatagctacgcgctgcctaagcgacacagacatctgacagggcttattctcagaaaactgctttcgtcgagtacgaaagcagttttgaataacttacagatacttaagattcgtcttgagaaactaaagcagaaaggcatcgttgaagatgagctagatatcattcagcagattattgttgatgatgatcttgaagatgacatcgttgaagatgacgaaatattaagcactgatacagagcgcaaaacaatcgatctagctttacttcaggctgaaatcaatgaacttgagaccctcatcttcaaagctgaacaaattggtgttgatactaaaacaaaggagttactccttggcctggagcaaggttttgcacagcttgcagaaatgggggcagcaaaaaaagtcatcatctttacagaatcgatgagaactcagcaatatcttgctcacttcttagaaaatcatggttatctgggtagagtggttacttttagtggtaccaacaacacgccgcagacaaaccaaatttatcagcaatggcttgaagaatatcgtggttcttctcgcatcacaggttcggcgcagattgataaacgttcggcattgatcgaccatttcaaagatcatgctgaaattatgatcgctactgaagcagcagcggaaggggttaacctgcaattctgctcgttgctgattaattacgatttgccatggaaccctcaacgcattgaacaaagaattggtcgttgccatcgttacgggcaagagtttgatgtggtggttattaacttccttaaccaaagaaatcaagcagatcaacgtgttctggaattgttgactgagaaattcaatcttttcgatggtgtgtttggggcatcagacagtgttttgggcagcattgaaaacggcgtagactttgaaaaaaaaattcagtccatttatgagtcatgtcggacacctgaagagattgaggccgcctttgataaactgcgaaaagagcttgaagacgaaattaacctcaagatgcaaaagactcaagagcagctactcgagcattttgatgaagatattcacgatgtgctaaagatcaggcttgatgaaacacaagagcgcttagataaggttggccgctggttttgggcggtgacacattaccaacttaaacattgtgccaattttgatcatgagcatcaccgtttcacattgtgcgagccagtcaatgggttaccagtagggcagtatcaattactacgcagaagtgttaaccaaaaaagtgagttacaaaggcaagaacatcatagtcttgcgtatcgcatcaaccatcctctcggtgagtatgtgatcgataacgccaaaaagctagatacggagatggcagaagtcatcttcaattacagtgaccatgcaacgaaagtttccgttgctgagcaactaaaaggacaggcgggttggttgacgctgaacttgcttactgtagatgcgtttaacacacagcagtttttagtctttacgacaaagaccgatcgcgggcaaataatagacggtgaagcatgcaagcggttgtttcagattgctgcaacaacaggcgatagagaaagtatgtctgcagaggcgaacacattgcccgatgacctgctcttactcaaaaagagacaaatcgatacccaacttgctgaagtcatggagcagaacaatgccctctttgaactagaaagagataagctggaaaaatgggcagaggatgtgatgtatgctgcggaagaagcgttacgcgatacgaaaatgcaaatcaagtctttgaagagagatgcaagactggcacaatccattgaagaacaaaaacaaaaccaggaaagactaaaacaactggagcgacaacagaagcgccagcgaatggagatttttgatattgaagatgaaatatcagacaaacgagacctgttgatcagtgcccttgaagagagaatgaagcagaaaacagagatcgcagaattgtttaccattcgctggaaagttatttaa

SEQ ID NO: 377721 - DNA, 705 bp, Salmonella enterica
atggggatttctgttggtcattcatattttactgctactatcagcagcgaaacaataaataaaatgttctcttccgatgagctcccacatatgactatatgggagtgcataaaagattttttctttgatacagggcaaagagaagctttaaattgtttacataaattatgtaaccccacaccagatttaaaggatacagacattacatcttgtttctttaggttaaaagagctagcttcaccaggatatcaggaaagatttattcatgattttgctgaagagtcttctacggggagtttgtatcttaaagataactatggggatgtttttctgtatatagaaatgagtgaaggattgtgtaattatactatacttgggaaaacatttatttttaacaccagccaaatgccgcattctcaacaggaatgcgaaacaagcacaccaaatttatccataatctttcaagaaagtgaatctcaatcaagctctgatagtatattatggttaaaagatggttgttatttagcatcgtatggaataggtgaatttaacttagatttcaatgagttttaccagagcgtgttgaacttcattacctcagtacaaaaaggtgataatttcaggttgtggcaaaatgaagaaaaagaaacctatatctcggcaatggtgaataaagcaatagatattcattctggcgagaaatag

SEQ ID NO: 377722 - DNA, 354 bp, Salmonella enterica
gtgaaattatcaaaacaagtaaaagagggggtttttgaacatgtaaaaaataacttaggtgtgtgtgacctacggttaaatagttcctgtgcacaaagttcaataaagcattgtgtgttaacattgttaaataaagataaagtctggggcagttttattaatcaaacctctactgacggcgaggtcaaaaaaacaataaccaccgatatggttagcatcgtttcgaatcaaattttcggaaagatgtttggggacgaaatgaaattgcctgagaaatggagtagcatagtgtgttctttagtaagggattcaataaaattgatgagcgagccatctgattttatcatgcaatag

SEQ ID NO: 377723 - DNA, 333 bp, Salmonella enterica
atgttcgtattacacaatgataccgtgaagaatagcgtggggaatggggtttccagacagatcctcgcccacagtggttccctgatagcagtagaagtggagtttactgaaggcgctatcgggccattacatagtcatccccatgaacagcttacttatgtgcttgcgggcgagttcaaatttactatcggcaatgagtcgcaggtggtaaaacagggtgatacgttgtacaagcgacccaatattatgcatggctgcgtctgtctgaaagcaggaaagctgttggatatttttacaccgattcgggacgattttttattggccagcaaatga

SEQ ID NO: 377724 - DNA, 1932 bp, Salmonella enterica
atgaagcagttcacacaatcgcaggtattacaggctcgcaagcgcataacaccagatataataaaggcgctgatcgcggttaataatgatgttattaataacccagttctggttcctgaaatcggatgtgcaacctggaatcattactttttttgtccggatcatagtgtgcgtttaatctgggatcgccattctccagggttacatcgctgccctattgatcacgcaagttttgctggtgaaccctatgatggcgcatggtggcgttggcttaatgggttgaatgcaaaagcatgttacgaattagcggtactatggctgctaacgaatgaaccccactatctcaataaggtccgggatgttttgatgcaatacgcccaatattatccagactatcaggagcatggtggcattccttacaatggtccgggtaaagcgaatgcccagacattatgcgaggccaactgtcatacagattttgccagaggttttgacattatccgtacaacgttgacagcggaggaagaccaatatattgcagaacgtctgttgcgttccggcgctgagtttttgatgaaacaccggtgtaatcagatccataatcacgaagtcaaaataagcactgcaatcggcataattggtgccgttttggacgacaacgtttatctcgaattcgctatcaatagtcagtatggattgcgatatcaactggaacacgccttaatgccagacggtatgtggtttgaaggttctctgcattaccatttttatgcactacaaggttttttcacctatgaaaaaatggccagcggttctgattacagcttactgaaaaccgcttattacccaaaaatgttaagtgtaccactgacacagttaatgccggatatgactttaccgaaaattaacgattgtgttaatggtcaggaaaaactgacacataccgatatttatgaatatgcctggtggtattacggcacgcctgagtatggacagttattaaaacaaatctatagtcagcgtccccgaaacagcatcgatgcattattttacggtaaaacgctcccctctacgtctcttttaccgccgcaagagactctacacaccgcagaaagtggcctgactattatcaggaataagccaggacgtgccatttgtatcaaacatactccctatggtggcgagcacgatcattacgatcgtctggggttaaccgtgtttaataatggccgggccctttttccagacccagggacaacgggctacggcgctcccttgcattacggttactacaagaactccttttcacataatacactctgtattaacgggaaaaaccaggcgccagcgaatccctatgtggtgtcatatcacgaggaaaatggcacggtacagctcatcacagaagtcgaatggaaaagtactcccctactcccggacagtaaaacccgggttgaatgggatgaagaggcctataaagacgttgtttttcgcagaaatatcaccgtaaagaatgacttactgattgatatcattactgtcgataatccattcgaccaggaaattaatactacttatcttattaacgctgaaccaccgcttgctgaatacaagaaaacgctctttccccgtgttttcgtggcgaaggaagttagcctggaggttccagtgaaactgacctggtgtgctcctgataaatttaatctttactgcttatcactaagcaatagtatgcttttcctgggtaaagggccgaataatccttcaacgtcagatcttacttatctcaccatgcgctctaaagaaaaacaggtcgcccatatcactgttaccgatttttccggtgaagatgatatccagataaaaattgaaaatgagaacctcatcgttacggtaaataatcttactgctcatttaatccctttagcataa

SEQ ID NO: 377725 - DNA, 1218 bp, Salmonella enterica
atgaaaagtataatatattacctggcatttattgccagtggggttttctgcgcccaagctttcgctgcagcgctacctcattgtctgacttatgattgcgagcaaatgttgagtatcaagcaaaacattcgccgccatgacgctcagtatatgccagcctggcaagcgcttttgcagcaggctgacgccgcgctcggccattccgtttattccgtcacggataaaacactgctccccgcctcaggaaacaggcatgactattacagttttggcccgtactggtggccaaatcctgataggaaagacggaatgccctatatacgtaaagatggacaaatcaatcctgatacaaaaacagacggcaccgacagtaaacggatggtgcggttctccaacgatgtgcaggcattggagctagcctggttttacagcggtaaggataaatacgcgaaaaaagcgcaacagcttttacacgcctggtttcttgatagcaaaaccaggatgaaccctaacttgaattacgcacaagcgatccccggaaaagtaaatggacgtggtattggtattattgatacccgtgtgttgattgatgtggctgatagtattgctttactggaaacatccgggtacatcacgccgcaagcgctcacagggtataaaaaatggtacgctgactatacccaatggctgttaacaagccacaacggtttcgaggaatcaaactggtataacaatcatggggcatggtatgacacacaagtgaccgcattttccctctttacggaccaactacagcaggcgcagcgacaggtagagatcttcaaattgcgccacctaatttctcaggtaaatgcagccggtgaactcacgtctgaaactgaacgcactcgttcctttcattacaccaatttcgcactgtcggcctatgcgcgtatggggcgctatggagagaaaacgcacaacgatgtctggggattcgaactggataaccgcacgatgaaaaaagcgtttgctctggttagcgagcaaactggaaagccgcaaaaatcctgggtgcatgaagatatccgatacacaccttccgaagcaataggaccgttattagcggctgcaagggcgtaccaggatgcggaattcaccaaaaacgcagcattacttgtaaaggagaataacaaagatatcaatattctcatcccgggttcagtgttggtgaaataa

SEQ ID NO: 377726 - DNA, 699 bp, Salmonella enterica
atgaataaaacagctttattgctggcggcttgttgttgtcctgtagtcggccatgctatgacttttgatatgcgtggtggctataaagaggccagccatagttatgaatctcgctttaaaatgagccaaagttttaaatccgggtactggttaagtatggagacagataataaacaaggtgacgataactttgatcagtctactgtcagttacaatgaaattgaaggtaactataaatatatattaaaccctaagattactatacagccagggatgatttatcactggagtgctgatggcacacaaattcgcccctacgtcaaatttgtctggaatatgactgactcaatttattccggagttcgttttcgttatgactggaaccagtatgattctacagatctttctggtaatcaggataaaggaagcgtcgaacgactggatttgtactttggctggcagaatcaatactggggtattcaggataatccggtgttctatcgttacgtgaatgatttccattataataatgggaagaaaagcgcgtatgaaaatgatctggtcgttaaatataaactgaataaaacctggcaaccctacgttgagtgggattatatggaacagcaaggtaaatatgacgatgaatcaggattaaccgaaaaccgcttccgcgttgggctaacaattaacttcgaataa

SEQ ID NO: 377727 - DNA, 1257 bp, Salmonella enterica
atgaaaattaagaatctacgatggtacatcatcgtccttgtgatgttgggcaccattaccaactatctggcaagaagtacccttggcgttgctgcgcctgagatgatgagaacattggggctatcgagcgagcagtattcctggattgtctccgtctttccttttacctatgcaatcggtggtattgcatgcggctttattattgacaagtttggcctacgattaagttttgctcttcttgcggcgctatggtctattttcaacatgctgacgggattatgcagtacctggctgccaatggcatggctacgcggcggtttaggattaaccgaggctgcctttaaccctgcgggtatgaaagtcacagcggaatggttcccggcaaaagaaagaggattggcatgcggtatttatagtctgggaacatccgtcggcgcaatgctggcaccaccgctagtggtctgggcaatcgttaattacaactgggaaatgtcgtttgtcgtaaccggggcgataggtattgtgtgggcagcgatatggtacattttttaccgttctccggaacaacaccctgcgctgataaaggcagaatatgacaccgtacaggccgatcagattgaggtggtaaaagaaaaagcgacgcttcgctctatcattactcaccgtaatttatgggctatttcattaccacgttttatggccgatccggcctggggaacgttgcattactggatgccactttatcttgtaaccattcgacatatggatatggcgcatatcgcaatgttcgcctggctgcctttcctgacggctgacttcggctgcatctttgccggttacatttctcgcctactggttaaccgtggtatttgtgtgctgaatgccaaacgtatcacatttacatttgcctctatcctgatgttatcaatggcaggcgttggcttcgtcaccaatgtttatgttgctcttgcgctgttctgtattgccggtttcgctcatcagtgtctgtctattacggtcatcagtatgtcttcagacttgttccctaaacaagaagtggggacggcaacagggtttgctgcatttaccggcagcatgggaaatttcctgtttggtctttttctgggggctatggtgactgtaattggttataacgccttttttgtaggattaggggtattcgacttagttggcgcactctttttatgggttcttataaaaacgcctaaaaaaagcatacagcctatcgctgcataa

SEQ ID NO: 377728 - DNA, 357 bp, Salmonella enterica
atgaagttatatagcagaagaatgcaaatagagcagaattcccgtgatgagaaaagtgaacgcttcggattcggcctgcgggccagttacagtcgttctgccgggcggctgtcagtcctgagccttctggcgacactgagcacaatcgtgctgtggcttataggatatcatgctgaaaacacagaattacatctgagataccaggccaacagcattaaatcacggcgtgttatctcatatctgacattagcggagaatgtcctgcgacactctccgctaattttgaagcgaacagcattagacgtcgttcttcatcatctcgccagaacctaccgaagtatggtgctggtttattag

SEQ ID NO: 377729 - DNA, 609 bp, Salmonella enterica
gtggcgctaactaacagaatttttccctatttacttagtggaatagcctgtctgatgatcccctttgttcatgcagcggagttgcatgttaaaggtatgcctgaatttaaagattatccggctgatataaacaaaggcccatttaccaccaggttagatctttctagtgagcaggagaaatactccagttactggaagaaaataacaaacagtgaattaaaaaaaccagtaaatttcgctgggcattatcgtatatatactgatgataagagcactggaaatgaatgtctcgatcatcaaggtggcgtgtgtggctgggttatagataagctatcagggacggttgttgtgcagcttcctgctgttgctggaaccaatgtttatcagcaagttgctgataacggtactcctgttggtgaagatttcaggatagatactcggaaaagtagctatttgatgatattaaccggccaggcgatccctcaaaaaatagagcacgatgaaaatggtatcccgataactaatccgtgtcagacgacctattatattttgaaaaataaccaattttctaaagtggttgaggataagcaagggtgttccgttgattga

SEQ ID NO: 377730 - DNA, 417 bp, Salmonella enterica
atgaccattaagcaagtcatgcaaaatcaaatgcatacgaatattatgtttgccactggtcgttttcagatcataccgggaacgttaatagatgcggtgaaatggctcaagcttgacgttaattccttgtatgatgaggcagcccaggatcagatttttgaggagtacataattaaggttaaacggcctgcgattattgcctatttggaaggcaatggtagtgttgaagatgcaatatatgactgggctaaagagtttgcatctgctggagttcgcaaggggaatactattagtaaagggcggattgcacaggtagaaggaggttcttattactctggtgatggtcttaatcatgcacatctgacacctaatcaaatgattaatatattgagggcgtcgaaaagtggcgctaactaa

SEQ ID NO: 377731 - DNA, 363 bp, Salmonella enterica
atgtcgaatccggaaaacggcccgcagctcccggtcattcgctggccggtgccgaaaaataaccggggcggggagttcagtaacctggaggagatgctggcgcatctggagggcgaggccgccgggcactggcttatcggccgcaatggcatgtggcacggcggcattcacatcagtgacaccaccacgccgtggtgtgcgctcagcggtcaggcgatgaatgaggcggtggatttcccggtaccgtttccgggggagcaggccgtgcgcagcatggcggacggtgaggtggtggcctaccggattaaccgggattacctcagcgtgccgtggtactggggggatttatgctactatctatga

SEQ ID NO: 377732 - DNA, 1452 bp, Salmonella enterica
gtgaaaacgttaaaccgtcgtgatttccccggtgcgcggcattctgaacgcatcattcagtttggcgaaggaaactttctacgcgcttttgtggactggcaggtcgagctgcttaatgaacataccgatcttgatgccggcgtggttattgtgcgccctatagaaagcgattttcccccttccttaaatacgcaggatggcctttatacaacaattattcgtggtctgaatgataaaggggaggccgttagtgacgcgcggcttattcgtgctgttaatcgtgaaattagcgtttacggtgagtatgaggcgtttctcaaactggcgcataatccggatatccgttttgttttctcaaatacgaccgaagcgggcatcagctaccatgcgggcgataaatttgatgatgcgccagcggtgagttatccggctaagctaacccgactgctttatgaacgttaccaccattttagcggggcggcggataaaggctggattatcattccctgcgagttgattgattacaacggcgaggcgctgcgtgaattaattgtgcgttatgccgaagagtgggcattaccggctgcatttttgcagtggttggatcaggctaacgtcttctgctctacgctggtggatcgtattgttaccggttatccgcgtgatgaagccacgcgactggaagcggaactggggtatcacgatgcgtttctggatacggcagaacacttttacctgtttgtgattcaaggacctcagtcgctggctcaggagctacgtctggataagtacccgttaaacgtactgattgttgacgatattaaaccgtataaagcgcgtaaagtggcaattcttaacggcgcacatacggcgctggttccggtggcgtatctggctggccttgataccgttggcgacgcgatgaacgatgccggaatttgcgcctttgtcgaaaaagcaatttatgaggaaattattccagttctggatttgcctcgtgaagcgctggaatcgttcgccagcgcagtgactggccgtttccgcaatccttatattaagcatcaactattatctatcgccctgaatggtatgacgaaattccgtacccgcattttgccgcagttactggaagggcagcaggccaatgggcagttacctgcgcgtctgacatttgccttagcggcattacttgctttttatcgcggcgagcggtctggcgaatcctatcccattcaggatgatgcattctggatcgaacgttacgcgcagttatggcgtcaacatcgcgaccagacgatcgacaccgcggcgttagtgaaatccgtgctggctgaaaaagggcattgggggcaggatttgacgtgtatcactggtttggttgagcaggttacaacctatctggatactatcctcgaaaatggcatgcgtaacgcagtgaaaccgctttgttaa

SEQ ID NO: 377733 - DNA, 873 bp, Salmonella enterica
atggacctgacgcaactggaaatgtttaacgctgtcgctctaacgggtagcattacgcaggcggcggcaaaagtgcaccgcgttccgtctaacctgaccacgcgtatccgccagcttgaagccgaccttggcgtctctctgtttattcgcgaaaaccagcgtctcaggctgtcgccagccggacataactttttacgttacagccagcagatcctggcgctggtcgatgaagcccgcatggtggtcgccggaaaggaaccgcaaggactgttttcactcggcgcgttagaaagtactgccgccgtacgtatccccgcgctgctggcgggctataaccagcgttaccctaaaattcagttcgcgttaacgacaggtccttccggcgccatgctggatggcgtgctcgaaggaaagctgaacgccgcctttattgatggcccgctaatgcatccggggctggaaggtatgccggtttaccaggaagagatgatgatcgtcgcgccgcacggccatcccgtcgtttcgcgcgcaagcgaggtgaatggttgtaacatatatgcttttcgcgccaactgttcttaccggcggcatttcgaaagctggtttcatgccgatggcgcgacccccggtacgattcacgaaatggagtcatatcatggaatgttggcgtgcgtaatcgccggcgcaggtattgcgctgatgccagcaagtatgctcaacagtatgccaggacatcatcaagtggaagcctggccgttggcggagaagtggcgctggcttaccacctggctaatttggcggcgcggggcgatgacgcgccagcttgaggcctttatagagctacttaacgcccaactggcgagcgtcgactga

SEQ ID NO: 377734 - DNA, 612 bp, Salmonella enterica
gtgattattgtcatcaccacatgtgaatactttaaaaaaggatttggttatatcgttgatgatatccggagggagtactgttcatttactgaggtcgtctatgctaagcacattggatgtgtaaataagcaaaccctgcaaagggtgaaagcgattattgttgattatggtcaggcagatatacatttgctaagctcgctgtttgaatttaaaacccatcaccctgatagctatattattctcattacgcgagatacttgctatgagagtactattgataacattcttattaatgcgttatccgattttagcgtggattgtaaggatgcgctgaagaaaattagcggattcctcgcgaattatggagaggctaaacataatagagtgattactaaaaacagcaatctttattgccttgaaaaacaggtgaatctatcgaaaaaagaggtgaacgtactgccttttattatgacaggcaaaaaaaacaaagagatatcgcggcatcttgatctaagcgaaaagacgatttgccactatcggcgcagtatctacaagaaatttcaggtcaataatctggcaggtctttattataagattgaagataaatgctaa

SEQ ID NO: 377735 - DNA, 1188 bp, Salmonella enterica
atgaattcaggattgagacgttcaacgctggctttactcgcctcatcgctgttattgacgattggacgcggcgccacactcccctttatgaccatctatcttaaccgccagtacggtttgggcgtggatctgattggttacgcgttgaccagcgcgttaacaatcggcgtcgtctttagtcttggatttgggattctggcggataagtttgataaaaagcgctacatgctacttgcgatcatcgccttcgcctgcggatttatcgtcatcccaatggtgcataatgtcgtactggttgtcctgctttttgcgctcattaactgtgcctattcggttttttctaccgtcctgaaagcctggttcgccgataacctcaccgccacgacaaaaacgcggattttttcgctcaactataccgtactcaatatcggctggacgattggcccaccgctcggcacgctgctggtcatgcaaagcatcaatttacccttctggcttgccgccatctgttccgcattcccgctggtttttattcaggtatgggttacacgatcggttgccgccagcgagggaaaaaacgccgcaatctggtctccctccgttctgctgcgcgacaaagcattattgtggtttacgttttcggcatttctggcctcctttgtaggaggcgcatttgcgtcctgtatttcacagtacgttatggtcgttgccgatagtggtttcgcggaaaaagtggtagccgtcgtcctgccggttaatgcggttattgtggtcagtttgcaatacgccgtgggccgccgacttaccgccgtcaatattcgaccgatgatgacgacaggcaccgtattttttatcgccgggctcatcggatttattttttcaggcgacaatctgcttttttgggggctttcagcggcgatattcacgattggcgaaattatttatgcccctggcgaatatatgttgattgacaacattgcacctgccggcatgaaagccagctatttttcagcgcaatcgctgggctggctgggtgcggcagtaaacccgctggccagcggcgtgatcctgacgacgcttcccgcctggtcgcttttcgttgtcctgatcatcgcgattgtattcgcctgggcgctgatgttaaaaggaatgcggattacccctacgcaacaggctatcgcctgttaa

SEQ ID NO: 377736 - DNA, 1542 bp, Salmonella enterica
atgtctcgtactaataaaaaaataaccattccggtcagtattggctatggcttaacagatatcatggggggcggcgcgtttaccgtcattggtgcctggcttttattcttttacaccaccttcgtcggtttgtcaccagtcgaagcagcatccattgtcgccatcgcccgtattgtggatgcggtcgtcagcctgtttatgggcagctttactgaccatttctataaaaacccgttgggcaaacgctttggtcgccgccgcttcttcttattagccggtgcgccgctgatgctggtgtatatcctgctgtgggtcacaggcatgagcttctggttctatctggctgtctatctggctttcgaagtgattgccgcgatggtgctcattccatgggaaacgctgccgtcagaaatgactaaggactttaactctcgtactaaattatcaacctgtcgtatgttcctgtcggcatccgggactttcctggcgacctttattccgggcctgttaatcagctattttggtgaacacgatccgcatgcgtactttattaatggcgtcgtctttgcagtgctgtttatgttctgcgtgtttatttcctggaaggtgacttgggagcgcgaactgacgccggagatgctcgtcgagctggaaaacactcgtcaacccacgtcctttatggcgaaggttgtggcgaccgggaaactgtttaaagagtactactccactctgaaggtgcgcgcgttccgtaaacatctggcgatttatctgttctcctttaccgcgaaagatgtttataacaccgttttcgttttcttttgtgtttactgcctgaacgtgccgtcttcgctttcaggaaccctgctgtcgatgagcattgtcggcctgccggtcacgctgttagccggtgtcgcgatcattaaatttggtccgtcgcgtctgtatgtatttgcttataccctgatgatattgtgtctggccggattgtttatggtttaccacttcccgaccgacaataacgtcaccattctgctggtactggctgcgctgtaccaggtggggcgttgtgttctggagttcacgccgtggaatgtgttcccgttcattccggacattgatgaaatgatcacccgccagcgtcgtgaagggctgttcgcggcggtgatgactttctcacgcaaaacgacggtggcgattgcaacctttatcgtgggcgttatgttgcaggaaggcggatttgtgaaggggagccagatccagccggagagcgccgtaaacaccatcgcaatcctgctgtttgttggtactgctgggctgctgctgattgcactgtggcaggcggtaacatttcacctcaacaagcgtactcacaaggtttttgtcgacgaggtcgatcgtctgaaagcgcacggttcaaaacaggacgtcaccccggagacgcgccgtgtggtggaagacctgaccggttacgcttatgaaaatctgtggaatgaaccgcaaaaagcggaatccaggctttatcgaccggcacaagtgaactaa

SEQ ID NO: 377737 - DNA, 1404 bp, Salmonella enterica
atggacttcattaccgatcgtttcatgatcgatagtgaagtcggtgttcggttatataaagaagttgccgcaaaattaccgatcatcgactatcactgtcatcttgacgcaaaagaaatttacgaaaataaaaaattcgataatatcacccaattatggctagcgggcgatcactataaatggcgcgctatgcgcgcgaacggtattgccgagcgctatattaccggagacgctacgccagaagagaaatttaaagcttatgctgaaacggttgaagcggcatttggtaatccgctttatcactggacacatttagaattaaataaatatttctcctgtaacgaaatgctggacagtgataactggcaagagataatgaatcattgtaatcagcttattggtggagaagattttaaaccccgtagcctgattacgcgctccaacgttgaagtcatttgtactaccgatgcgccgctggatacgctggaatatcatcgcctgctgcaacagggcccgacctttaccacacgggtgctgccgacctttcgccctgacgatatttttgccgaaggacaggtgcttgctacctttattgataggctggcgcaggtgacggggcgtgatattcatacctacgccgactttaccgccgcgatggccgaacgtattgatttcttccacgaagtaggctgccgtatctccgaccacggcccggtagccgttgagtatcaacctgccgatgcgctgactgttgcatcgctgtttgctcagaagcggcgcggtggcgagctcaccgacggcgagacggcacagcttaacagcgccatgtttgtcatgctggggcgggagtacaaaaaacgcggctgggcaatgcaaattcacttcggcgcgctccgcaacaataacagaaaaatgtgtgaacagttgggaatcaataccggctttgattccatcaccgaccagaacaatctggcggcgggccttaaccgtttgctggatgcgatgctgcagagcaacgggttgcctaaaaccatcctctataacctgaatggtagttataacgacattgtcgccacgacaattgctaatttccagtccggcgaggacggcgtgaagtcgcctatgcagtttggttccggttggtggtttaacgatactcgccgtggtatggaaaagcagttaaatagtctggccgatcaggggttattaatgcacttcgtcggtatgctgacggattcacgcagcctggtttcttatccgcgtcatgattatttccgccgcatcctttgtaatttgattggtggctgggttgagcgtggtgaaatccctgataataagcggatcttgacacggatggttaaaaatatatgtcacgataatgcagttaattatttcagattctaa

SEQ ID NO: 377738 - DNA, 2958 bp, Salmonella enterica
atgagcacttcgttgttcagtaacaccccgacggtcacggtcctcgacaaccgcggactgaccgtgcgcgacaacgcgtattaccgccaccccgactccccgcatgtgaccagtgagcgcatcacccgccatcagtacgacgcccgcggctttctgacgcagagcgccgacccgcgcctgaatgaggccgggctggtaaacttcagtttcctcacggacctggccggcaacgtcctgcgcacgcacggggtggataacggcatcactgtggcgctgaacgacgccgcaggccggccgtttatgaccgtcagtaatatcggcactgctgacgacggcacggaagacgccagtcaggcaatgacccgcacctggcagtatgaaggtgtctccctgccgggccgcccggtgggcattacggagcaggtctccggcgaagccgcgcgtatcacggagcgcttcgtctgggccggcaactctcctgaggagaaggcgctgaatctggcgggccagtgtgtcagccattacgacaccgcaggcctgatgcagactgacagcgtggccctgaccggcgtaccgctctccgtcacccgccgtctgctgaaggatgcggacaaccccgatatcgtggccgactggcagggtacggatgcctccgtccggaacacgctgcccggtgacggggggttcaccaccctgaccaccactgacgccaccggggcggtgctgaccacgacggatgcacagggtaacaggcagcgggtggcatacgatgtggcaggcctgctcccgggcagatggctgacgctgaaggatggtacggaacaggttatcgtgaagtccctgacgtattccgccgccgggcagaagctgcgcggggagcacggcaacggcgtggtgaccacgtacgaatacgagccacagacgcagcgcctggtcgggattaaaacggaacgtccggccggccacgccgcaggcgcaaaggtactgcaggacctgcgctacgagtacgacccggtgggcaacgtgctgaaaatcagcaacgacgcggaagagacccgcttctggcgcaaccagaaagtggtgccggagaacaggtatacctgtgacagcctgtaccggctggtcagcgccaccgggcgcgaaatggcaaacgccggtcggcagggctgtaatctcccctcagccaccattccccttcccgcagacagttccgcatacacaaactacacccgtacctatacctacgacagcgccggaaatctgacgcagataagccacagcgccccggccacgggcaacaattacaccacggacatcacggtgagcgaccgcagcaaccggggcgtgctgagcacgctgacggaaaatccgtcaggggtggatgcgctgttcactgcggggggacaacagaagcagctccagccggggcagaacctggtctggacgccgcgcaacgagctgctgaaggtgacgccggtggtgcgtgacggcagtacggatgaccgggagagctaccggtatgacggtggcagccagcgatgcctgaaggtgagtgtgcagaacaccggcagcagcacgcagacgcagcgtacgctgtacctgcccgggctggagctgcggaccacagtcagcggcggtaaggaaacggagagtctggaggtaatcacggtgggcgaggcaggatgtgcgcaggtgcgggtactgcactggacagcaggcaggccggcggaactcaccggcgaccagaccagatacagctatgacaacctgaccgggagcagcggtctggagctggacggcgacgggaatatcatcagcatggaagagtattatccgtacggcggtacggccgttctgacggcgcgcagccagaccggggcggattacaaaaccgtgcgttactcgggcaaggagcgtgacgcgacggggctgtattactacggataccgttattaccagccgtgggcgggacgctggctgggcgcagacccggcggggacggcggacgggctgaacctgttcaggatggtacggaataatcccgtcacgttgattgacagcaatgggttgatcagtactggtcgggaagcccgaaaattagtgggcgaagcatttgttcaccctttgcatatgcctgtctttgaacgaatttctttagaggaaaatctttcaatgagcgtaagggaggcgggcatttatactatttcagcactcggtgaaggtgcggcagcaaaaggccataatattcttgagaagactattaaacctggttcactaaaggctatctatagtgataacgctgaatctattcttggtcaggcaaaacgtagcggtttcgttggccgagtaggtcagtgggatgcatctggcgtacggggaatttatgcacacaacagactgggtggtgaggatttggcttatccagtcagcctggaaaatacttttgctaatgaacttgttaatgcatggataaaatttaaaatcatcacgccctataccggtgattatgacatgcacgatattattaaattctctcatgggaaagggcatgtccccatggcggaaagtaatgaggaaagaggagtaaaggatttaattaataaaggtattgcgaaagtcgatccttccagaccctttgagtatacagcgatgaacgttattcgccatggtcctcaggtaaactttgttccctatatgtgggaacatgagcacgataaagttgtaaaggataatggttatctgggagtggtagctcgtccggggccattccctgtggcaatggtacatcagggcgaatggactgtttttgacaatagtaaggaactgtttaatttttataaatctacaaacacccctcttcctgaacactggtcccaggattttgttgatagagggaaaggaatggttgcaactccccgacacgctgaacttcttgataaacggcgaaacatgcattaa

SEQ ID NO: 377739 - DNA, 411 bp, Salmonella enterica
atggataaaaataaatcaaaagaacaattaattatcgacgggttttactctctgcttgtgcaacacattaacaagaatggcagtatacagttacaacaatatataaactggaaatctcatatcagcactaagttaacgtgggtgatccttcatctggccatacattctgaccgagatgacgatgacaaagaaaaaaacagatcttcttttgcattagatttcatcctgcaagaaatggagggatacgaccctaaaatattattaaattattgcacaggcatagaggctccggatctcattttcatcgatcatctgtcgtttgaatttaatgttaattctaactggcttctctatggagagggcttaccttttatagaaaacaataattccggcattgatcatacaacttaa

SEQ ID NO: 377740 - DNA, 168 bp, Salmonella enterica
atgctgcactacactgtccggtcacgttacgataatcagctacgtctgcaagatgagaactcatcccctctcaccgccatcttaaagaaagagctcgtacgaaagtacgggcttttttgtctatggaaaacccccagccaggctctgtctcttgatcagatctcctga

SEQ ID NO: 377741 - DNA, 228 bp, Salmonella enterica
gtgacagcggcgcaaatgaaaatgtttttgacgcgattgggagaaaacgtcacggttattgtcaatggcgatatcacccagtgcgatttgccggcacacgttcagtcaggtttaagcgatgccttagcccgctttaacgaagatgagatggtagggatagtgcgattcaacaaagacgactgcgtgcgctcggcgctttgtcagcgaacacttcacgcataccgctaa

SEQ ID NO: 377742 - DNA, 2277 bp, Salmonella enterica
atgtggccagttggtgattacgcgggacgtattacacccacagcatcagaagcatcccccgcagcaaatacgagctattataccttatggcaaacctgggctaatgaagccattgtcggagaaggggaacaacgagatatagcggttgaaagattgtatgcttgcctttccaatcaggagagtattcttgatttaggggagcttaacctgcgcactttacccctattgcctgcatgtgtttcaactctgaatgtcagtaataatcatttatctgcccttccagatctacccaaaggattaagagctcttacttgcgctggcaatacattggcctcacttcccgtgctccctccaacgttacaaacacttgattgctcacaaaacacattatccgaactacaaaacgtccctcccgcgttaacggcgctcaattgctcaaaaaatagtttgagagagctttctcatttacctgatacacttcaatcattagattgttcaggtaatatgatagcctcactttcagaattacctgataacttacaaatactcgattgttcaggaaataggcttgaagtcctaccggatctccccccttcattgaaaactcttaattgtgctgtcaatggattaataggctttccatttatgcctttttcgctgcaaacactcaattgctcatacaatgaactcaccgggcttcccccttttcctgattcactgataaatctcgacatcgcctataatgaatttaattctctaccgccactccctcctttattggctacattcatatgtacaaataatccacttcaccagtttccagtattgcctctttcactacaaagacttacctgcgccagcacatcactaacggcactcccgcctctgccatctgcactacaggaacttcattgccagaataatgagcttatcttcctgcctgagttgcctgcttcattaaccgatttgaattgctcaaataattatctggtgagaatgccagcgctacctgactcgctcatttcgcttgattgctcacacaatcgtttagaaacgctttctattttacccaattcacttcaattcctgattatccttcataatcgattaacgacgcttcctcaattatctgaatcactgaggtttctcaactgttcgagtaatgggattacggtactcccagatttacctaatactttaaatagtctttattgctatgccaatagactggaaacgcttcctactttgccagataccctacaagagcttggctacagcggtaatccactgacaacgttacccgaattaccggcgtcactcataagcctgaataacagtgagtctgccggaggcgctatcgctcctctttcgttcatccaaagtattggatattggtttccgttctcgcagagagctgaaatgcttactcgttttgagggaatagccaacgaagagaatgcagagatatttagtcgttttcttaacagacttcaatatcgttacagagacccacagtatgaagatttcagatcccaggttaaggagtgccttatccgactcgctgacaaacctgaattgagagaaaaattatttatgtgcgcctatgaatcaacactaaattgcgatgatcgcatttctctcacatggaatatgatgcgggtcgctgaaatggcttttaccgtagagcaagagggtcatgagggaaatcttccggaaatgatcgatatagctcgtcaagtatttagaatagaatcgttaacggagattgccaacagaaaaatccagcagatcctgagagtaaacaatacattcaatgaagatttagaggtgatattaggcctacaaacccaactgcgcgacgctcttcgcttaacgcatgtcgccccagatatgtatttcttccgtttttctcatcttactgaaatagatgtaaaaactgcagaacgtcaggtgcgagtagcggaaaatagccggtttgaatcatggctcaacaattgggaaccgtggcaaatgttgctaaaacgtatagatccactgtggtatgaaacggctgtaaatgaaaaatacgcttttgtggatggcccggattttcaaaaccgactggacgaaaaattccaattacatcaggtacctcctgaggctcgtgacgatgcccgctatcctttaggtaagatcgttcttgcagaaaaaatacacgaaatttttgttaatcagacacgcaaaattttggcagcgaaagagcactcatccttgttggagccactatggaccgaataa

SEQ ID NO: 377743 - DNA, 1758 bp, Salmonella enterica
atgctaccaataaataatcccggaggtattccgacattggtgccagaaacaccgccggctacggacaaggactatcctgctctctggcaggcctgggcaaaagaagcgcccgcaggaggccatgaattgagagagatggcagtcgaaagattactggcctgtctggcgaaacaggaaagtacgttagatctcagcgagcttaacttaagttcgctgccagacttaccgccattgattaagacactgcacgtgaatgataatcatctttcgtcgttgccggatctgcctgaatcgttacagatactcatctgttcatttaatccactggagcaactgcctcccttaccctactcgctgaaagagcttacctgttcagcctgccatctgaaaaacttgccttcattgccagacgctctggaagaactctgttgctcagggaattctctggaagaacttcccgtactccctgtatcgatgaggtatcttacctgcacaaacaatggccttagatcgcttcctgctctaccagaatcgctacgcatgttgatttgctcagacaatccactatcagcattacccggtttaccgggatcactgtgttcactttactgctcagggtgcaaattagaaacactgccagacttaccagagtcgctaaactctctcatctgcccacgtaatcagctccgggaaatgccaacattacctcttgacctggacgaacttaactacctggaaaatcccctactgcaatttcctgttttgccgccgtcactcattacacttaataatagcccctatgaaggcggcgcgaccaacactgcgcgtccgctgacggatagcgtcgccgactggtttcctctcgtccaacaacgagatattcgtgagcgctttcgggagatcacgcatgaagcaaacgccggaatttttagcgagtttttagaccggctgcgcaaccgttacgccgatccgcagtatgagactttcaggtatcaggttatgggctgcctgatccgcttagccgcgtcccctgggttacgggaaaaattatttatgtgcgcgctgggcgcaacggctcgctgtgacgaccacgtctctctgagttggaacaacatgcgcatcgcggaaatggcctacaccgttgaacaacacggcgctgaacataatctgcctaaaatggtcgacctcgcccgcgaggtattccgtatggaaaggcttactcagatcgccagtcagaagctcgcccaaattcaacgcgcgcacgaacactttaatgaagatttagaggtcctgctgggttaccaaaccgctctacaacatacgcttcgtttgacgcaagtcgtaccggatatgtatttcttcacctgttcgtatctgacaacagaagatgtggaagcggcaaggattcaggttcagacagcagaaaatcaacattttctggaatggctgagcctgtgggagccatggcaggcaatgctcaaacggcttaatcctgccgcctgggacgctgcggaaagcgaaaaaaacgcctttacggttagcgaagaatttcagcgccgaattaatgcgaagctggaaacgcccggctcgtctgaatccgttcccaataagacgatgcaggaggctggcgtcgaagtgatgaaagagaaactacgagaattatttatgccctgtacgctcagcacgctggaagccaaatcgcagttatcgctgctggaaccggtctgggacttatcagggaaccaggcaggcgtataa

SEQ ID NO: 377744 - DNA, 171 bp, Salmonella enterica
atgccagccaagccccggacaagtaagaccgtgacgaaaaatattcgtttttcctattccatgctcgaacagatagaattcgcgttaaaatcagagaagacgcaaaatttttcagcatgggtaaaagaagcctgtcgggagaagttatgtaatacgggacataagctgtag

SEQ ID NO: 377745 - DNA, 519 bp, Salmonella enterica
atgttaattattagatatagtaaaattataacgcttactgccgtatccttttatgtaactcttgtggcttttggtaatcttactgattaccagactaattttgcatttgtaaaattagtaatgtctatggagtcaattttaccgtcttccactatctgttacagagcggtacttaaccctatagcctatcatatcgcatattctattattatagcatttgaagtaatgatctctgtgactggatggtatggcggatatattatgttttgttgccggaatgcgtcaacagaacagtttactcactcaaaaaaatgggggatcgttgcccttacactaggggttattctctggctggcgggatttgctgccataggtggtgaatggtttagaatgtggatgtctactaaaacttaccacggcgttgaggcatcatttcgactttttatgatgatgattgttgtgcttatttatctcattatacctgaaggtgattcgacgcaatcgacaaattcaaagtag

SEQ ID NO: 377746 - DNA, 1290 bp, Salmonella enterica
atgacctttattttattgattcttttttcctcctccgtaccagcaaaacaaaaaaaccagggaatcgtacatactgattttattaactatttagtgaataatgatcctgtaggtgtgaaaaacactctgcaatattgtgataaatgcctgcagaatatcgaccctctttttctcgactgggctaacgctattcttgagtatcacaagaaaaattatgctgaatcaatacaatattacagaaaaataatttcagccaggcctgactggtacagtgcaaggttacaactggccacagtcttatatctgaacaaagacattctttcggctgaagagcaactgagaaagttacgcagtgaacatctgacagaagaggcggctggtctcattgacagatttattgccagggtacaaaaaacagatcactggtcattccgtggtggttttacatatctgaatgaaaaaaacattaataatgttccaccgtcaggacgttccatcagaggatggaagcccgaaaaaccgcagtcgggtaaaggggtgatgttctggggagaggcggaaaaaaggttttctcttccggataatttttttgttattacccgcctggctacttcagggaaaacatactggaataaccattcttatgatgagctggatggcagtgttggcgtgggagcaggttatcggaatgtaaataccatggtccagtttatcccattttacgaaaaaagttattatagcggaggtcaaacatcagatggtggtttgcagtcttactctgatacaactggtatcaaggtggaaacagaattccagctcgcatcacgttggcgtttatattcagatgctaagttggataaaaatgagtataagaaaaagacttaccttaacggatatcgctactcgcttaatgaaactctgatttatttccctgattcacgccagtatatttctgcgggtctgggatacagtatgctcagaactgaagaaaaagatagctctttcaataagtcagcattccgggccgggtggatgtacgaatgggatggaggtatatcaacgctcttacaagctgcttatggttataaaaaatacctggacggagacttctggggaataaaacaaatgaaccatgaatatagtacgtctgtaacagtatggcatcgcgatatttatttttttggagtaacaccaaaaataacatggaattatcagagaactgacagtaatcatcctttctacgacacagagaggaatcgtcttttcctgagtttcagcaaatacttctga

SEQ ID NO: 377747 - DNA, 126 bp, Salmonella enterica
atggtattgagcattttgtcatattttgatgagccttacgccattcagtattgctcatcatctacagaagccatgcggatgccctactatgccacacaatttatcactaccttaatctccggttag

SEQ ID NO: 377748 - DNA, 1779 bp, Salmonella enterica
gtgagaggtaaaaccgtaagtcgcctggcggtgttggcggcagtagggctaatttgtcatggcgcatgggcagggacgtggaacatcggtattttggccatgcgcggcgaggcgtctacgcgcagccactggcagccgttggcaaaaacattaaatcaacagcttcccggcgaaacctttcacatccagccgctggatctgcatcaaatgcaggaggccgttaaccggggaaccgtacagtttgtgataaccaacccggcgcaatttgtccaactgaacagccatgcgccgctccgctggttggcttccctgcgctctacgcgcgatgggaaaacgattggcaatgtcattggtagcgtgatccttacccggcgcgatagcgggatcaccacggcgcacgatctgatcggtaagacagtcggcgcgattgatgctcaggcatttggcggttatttattaggctataaagcgctcagcgacgtgggcttacgcccggagcgcgatttccatctccgttttaccgggtttcctggcgatgccttagtctatatgctgcgcgaaaaagcggtgcaggtggcaattgtgccggtgtgcctattagaaaatatggatcaggaaggattgattaataaaaaggattttatcgcgctgctttcccgaccgacgacccttccttgtttaaccagtacgccgttatatcctgactggtcgttcgcggcgctacccgcggtaagtgatgcgctggcggatcgcgtaacgcgggcgctattcaactcgcccgccgccgcgtcatttcactggggcgcgcctgcgtcaaccagtcaggtggaagcgttgctgcgtgatgttcgtcagcaccctcagcagcgtcgactgtggctggatgtcaaaagttggttaattcaacatcagttgatggttggcggcatgacgctggcatttctgttgctcacgctcaattatatttgggtcatgctgctggtgcgtcgacgcggaaaacaactggaacgtaatagcgtggtactccatcagcatgagcgggcgctggagaccgcccggcaaatgagcgtgttaggtgaaatgacctccggatttgcccatgaacttaatcaaccgctttccgcgattcgacattacgcccaggggtgcctgattcggttgcgcgttgcagatgaacagcatcccttgctgccggcgctggaacaaattgaccagcaggcgcaacgcggtgcggacactttgcgtaacctgcgtcactgggtcagccaggcgcagggcaacccggtgctgaccgaagagtggaaggtgatagccattcgcgaggcgattgatcacgtctggcaactgttgcgtatggcgcagcagtttccgtcagtgactctgcgtaccgaggttagcgccgcgctgcgcgtaacgctgccgtcagtgctgctggaacaggtgctggcgaatatcattcttaatgcggctcaggcaggcgccacccatttatgggtcgtggctgaacgcactgaaaatggcgtcagcattgttttacaggataacgccgggggaatcgatcaggcgctattacgtcaggcttttcagccgtttatgaccactcgcaaagaggggatgggcttagggctggcgatttgccagcggctggtgcggtatggtcgtggcgatatcagcatcaggaaccagaccgcaccggacggcctggcgggaacggtagtcacgatacatttcttacatgaaaatggaggcagggatggcgataattcatctattggatga

SEQ ID NO: 377749 - DNA, 306 bp, Salmonella enterica
atgtttaaagaagaaagacgtcatgccatcattaatttactgataaaagataatagtgttagcgtcagtaaactttcaggcctttataaggtcagccaggagactattcgttccgatctgcgcttttttcagaaatccggtatgcttcagcgttgctatggcggagggattttaaaccatgacgcgcttagtaagcttatcactgaaaataagattgatatctccagcactatcgccacgccaatccatcaggatgcaaaactgcgccgggaaagcacaaaaaagcaggcaaggtatgtgtcttag

SEQ ID NO: 377750 - DNA, 711 bp, Salmonella enterica
atgattgcttcacttgatgagctttaccattccgaactctttttccttcctgcaatggataaaaacgctcggcttgctggcttagaaattattgcgacgtttgctactgaagacggtgctgtgcggatgccgactgagttggtagtgccacgcctttcggtggaggaacaatactgtctgtttgttgaaaaacttgcactgttagaaacgtgccaacacttttttattcagcataaacttattgcatggcttaatttaccccccgcaattagtggcttattattattagatagcgaacttttttccagggcggcgcgttttccgtttcttgaattggctataaatgagaattatcctggattaaaccagggtaaagagaatgaaacgttagccaatctggcaatgcatttcccattaatgctggcaaattttggggcaggagaagcgtcaactaaagctattttcgatgggcttttcaagcgagtcatgttggataaaaattttattcagcagcgtgctgaaatgatctcattcgaaccgttcatgcacgctatagttgcacagatctcctctagctgcgaatctctgatgattgccggcattgataatgaggcgatgtttgcacgcgctgcgccattgggatttagcgcatttcagggaggactatggcctccggtgccggtaagccagctaattaaactcgttcagtga

SEQ ID NO: 377751 - DNA, 1359 bp, Salmonella enterica
atgacaacaacacttaataacaatataaaagaatatttcataaaaaataattgtacatatgaattgcaacccgacgttacttttccagtaacaattcctgcaaaccaggacattcttatcaaggttgccggcaatgacactacccttgttgacgaagagcggtggagttctcacgaaaaaactttactcccctcgcttataacaagtataggaaataatgcaaaagttaaaatagaaataacacaatgttcaaatgtcatcattaacaaaagattatcgttaggttcctccattaatcaaaatggaagcaagtcacaagctgcccttattgattcagtcattactggaaccataggacgtaatgtaactttaaaaatattaattgtagactcggccaatatcatactcaatgcgcaagatagcagcttaattattaatgacgccgagctaattaaagaaataattaatatagatgatggggacaaccctcttgataattttaaactagatgtagaattaataaattgcgctaacattcattgtccagaagataataaggagtgtggagttgtttctataaatgatggtcagttaatagacgaaatacttgattgtggggaaataaaaaacaagagtaatataaatatcaaaataaaagacagtgcaaacgcacatgtcaactctataaatatagttgaaggagagttagtggatgagttaatagattgtttatccattgcagatagctctgttgaaatcaaaatatcatcatctgtatcaacatctgcaaatacaatttctattacagaaggggagttgctcgatgaaacaatggacgttaaaaaccatatcagaaacagtaaaattgatgcaacaatcaccaattccgcaaatgctttctactcggcgacaatgactattacaggaggggaattaatagatgagataatagacactaatgagataacaaattcaaaaattgaaataaaattaaccactagtggctgtgcatcatacattggaaataacgcaggtcacacttttaccttaacaaatggtgagttgatcgatgagattatcgactgttccaataatattagtgataataaccctatatcaatcactgtagaaaacagcgccaatctaataacacaaaactcttcaaaccacgttccagtcttgaatataactaatagtcaactattggatgagttagtcgactgcccaaatatcaacaataactctataactgttgaaatatcatcttcaggaaacattgcattagcgaattcaattttaaattcttctaatatgaatttaatagaacgtataattgatacagaaaacactacgaaatga

SEQ ID NO: 377752 - DNA, 225 bp, Salmonella enterica
atggctattagcatcggaaacactgtaactacgaatgtttgtaagagttttaatttactctgcattttttctgtcccgttaggagaactaataaatacaaataatttatttgatagtaattttttaaaaaacaacaatatctaccccacaatttcttcctcaggtgaaccccccatttcagatgattttatccaagccaaaccatgcttcccgctatcgacctaa

SEQ ID NO: 377753 - DNA, 150 bp, Salmonella enterica
atgtttggcgacattgaaaaagcagtgcgcgtcttcgctatcaatgaacttaatccggcaatggaagccctcaaatatatcaatgactggcctggcgaagaggtggtacggtttaacccttacgcactactggaacagaacagcgcctga

SEQ ID NO: 377754 - DNA, 231 bp, Salmonella enterica
atggtgaattaccgtcttatatcactggcgctgacacgttctgcggatcagtttcgcaaatactactatgacaacggctcacacgcgggctgcattagccacatcggaacagccgccgttaaccgcgagagcatggaagcgctgaaaaaaacgttaacggaatcgcggggtggcggcgcgtttaaaaacctgctgatcccgatcactggcgggggcaaagacggggtgtag

SEQ ID NO: 377755 - DNA, 996 bp, Salmonella enterica
atggtgcacgtttatggtcctcatatttttcatactgataatgaaacagtatgggattatgtgaataaatatgccgagatgatgccttatattaataaggttaaagccactgtaaacggtcaggtattttctctacccattaatcttcataccataaatcaattttttggtgtcgcctgctcacctgatgacgccaggaaattactgcttcaaaaatgtgatcgcaccattctggaaccacagaattttgaacaacaggccttgcgtttcattggtgaagagttatatgaagccttttttaaaggttataccattaaacaatggggacttcatccttccgcgttacctgcttctgtattgaaacgtatccctgttcgctttaattatgatgataactatttcaatcataagtttcagggaataccaaaatttggttatacacaaatggtcaagtccattgtcgaacacgaaaatatcactgttgaactatgtcgctccttcgctcaggaaatgcggacagattatgatcatgcttttttcagtggtgcgctggatgccttttactcctgtcaatatggccgactggaatatcgtacattagactttaaaaaaatcctttgccagcaggattatcaaggatgtgcagtaatgaattattgttcaatagatattccttatactcgaattactgagcacaaatatttttctccgtgggagaaacatgaagcttcaatatgttatcaagaatatagccgggaatgtgaagctgatgatataccttactatcctgtccgcagagcggataaaatggatttgctgaataaatatctatcgcgtgctaaaaaagaaaaaaatattactttcattggtcgtcttggcacttatcgttatctcgatatggacatcacgatagctgaagcattacagacggcggacgtatacttaacgtcgctacatgaacaaaaagaaatgccagcttttacagtttctgtttga

SEQ ID NO: 377756 - DNA, 888 bp, Salmonella enterica
atgtcactgccatgtcgtcaggaacgctatttacaacgtttttataccctcgccaggctttttactgcggcgactgactttaccactttcgttgttgatattaacgggaaaacgcaggccgaaaatatggtctgcaatccgttttgcgccctgatgcgcgctcatgatgattacgcgcaatattgccagcaatgcgacagatattgcgcctggcacgctttacatatggcaaaaccgcagatcctgaactgttatgccggattaagctttttcgctgttccgttagtggacaatcagcaggtttgcggttttattctttgtggtaaggtgcgggtaaaatatcaggagtacagggctattgatttgatgaatattgctgactgggagaatgacgcgctcttaaaccgtgtatggcagaatctaaagatcattgataataatcgtttgacggcggcggtaaatttactcagttttgtcattaactctctctcgtcaaatagtgatgccgatgctcaggaaaatctgatagcggtaactgaggcggatcattctctttcccgacatgagaaaaaacgcgttgccgcattgcgttatattgaagataacctctatagcgaattgacgcttgaatctgtggccgcgtatgtttgtctgagtccgaactattttagccgtttctttaaaaaacggcagggtataaactttaaaacctgggttaatcaaagacgaatgcagcgcgccggtgagttactttgtcataccgatcagaccatcgataatatcgccagaaagctgcaatacgcgcaaaccagttatttttgccgtgtttttcatgctacctatcacatgtctccccagatgtaccgccggcgtaaatcgcttgtttaa

SEQ ID NO: 377757 - DNA, 1002 bp, Salmonella enterica
atgaacgtaaaattttttggcgcgagcatattaaccttcagcttattgtttagcgtaaatacgctggcgcaaaccacgccggactacgcctcgcttatcgaacaggcgcaccagaagtttaaaagcaatcatgacggtaaagtcgccgactacatccccgcgctggcgacctatagccccaacaatttcgccattacgctcgccacggtcgacggcaaaatttatcaggctggcgacgtgaaaaaagcgtttccgatggagtccctgagcaaagtcttcacgctggcgctggcgatggaacaacacgggccgcaggtagtgctggataaacttggcgccaacgccaccggtctgccttttaattcgggtttagccgttgaactcaccaaaggcgcgccggaaaatccgctggtcaatgccggcgccatgagcaccgtcagcctgattgaggcgaaagacaaaaccgatcgctggaacaaaatcctcgataacctgaacgcatgggccgatgccttactcaccgttaacgaacccgtattccagtcggaaatggaaactaatcagcacaaccaggcgctggcgatgctgatgaattcttataacagcttttatggcaatactcaggaagccgtcgaaatttatacccgccagtgctccgtagatatcaccgttgagcagctcgccaaaatgggcgcggtactcgctaacaaaggcaaatcgcctttcaacggcaagcagttgctcaatgaaagctacgtgccgcaggtactggcggaaatggcgatagcagggctgtatgacggcagcggcaaatggctgtacaccgtcggtatgccggcgaaatccggcgttggcggcgggatggttgctgtagtaccggggcaatacgctatcgctgtctactctccgccgctggatgaggccggtaatagcgttcgcgcccagcaaactattgcgtatatcgcccatgcgacacaggccaatctctttatagcgcattaa

SEQ ID NO: 377758 - DNA, 1185 bp, Salmonella enterica
gtgaagaaaaatagagacagtgctctgatatatacttatcttttccgtgctttgggtgactgggcatttcgttttgcagtaccactctttttatacgctaaaacgaattcggcactgggtacggctctgggatatattttaacttttttaccgcaggttctgtttgcaatacccgcaggcgttatggccgatcgctatgataagagaacgttattatggcttctggatttagtcggttttgcttcctgcctgatacttgcctttcaggtccaccaccaggcgccaatctctaccatctatacgatgatttttgttatatcgtcgattggtacattttatcatgccgtttttcagggcagcattcccatcgcgattggcaagcagcgtctccattgggcaaattcgatggtaaatgccggagacagtttgctcagtgcgctagggcctataattggcgcattggcggtggtggtactgggttatgagttcgtcatttatctcaatgcgtttagctatcttgttgcggtcatcgtcaccctgaggtgtatccattttgtgagtatccaggttcgtaatgttcacgtcgggcatatgctaaaggaaggtgctaaagcaataagcagtgatgattttttaaagtttggtgttttacttttcatggcaaataattttgctatgtttctttacttaggtgtgtttgtttatcatctgaaacataattttggattatccgatcttgctgtcggtgccgtgtgttcggtcggaggggccgcggcgattgccggcagttttatggcgaaaaatatccttgatgaaagaattggtgcgctaaagaaaatttctattctggccatattgctcggtgtagctacgttgtttatggcgattaaccagcctgttttcttttctgtagcatgggcgatggtaaatttcgtcgatgcattgattatggtgacttactttactgaacgccagatccgcgttcccggcgaactactcggccgggtcgtttctttttcacgtatggttgcgtatgtcgctattcctttaggggccggggtcggggcgcttgcagtgggatatttctcaataccctctgttattatcgtttcaggtattttaatgacaatttttggcgcatcttcagtattgttttgtcggtattatccggagcatgctttatag

SEQ ID NO: 377759 - DNA, 249 bp, Salmonella enterica
atgggtccaattgatttacaaggtacaggaaaagaagatgaatatagcgtcgtgaagaatagcgaaggtcaattttctatctggctccttgaattacctttgccggaggggtggcaggtttctggttttatcggcaagaaacaagattgtctggattatatcaggaaagaatggcgcgatatgcggcctttcacattgcaatgtgcagagcaacggttatcaccgcagaagagtgagagaatattgtga

SEQ ID NO: 377760 - DNA, 4284 bp, Salmonella enterica
gtgagccaacaaataagcctggaagatatttttctcttatataaagacagaatagcggtcgttgatgcggattgtgcgatgagctatggcgagcttgacgaactgagcgctgcactggccgaaacgctgctcccgtatcgacattccggaaataaggtaatcctggtacttgaccgaagcatcgaggcgttggtcgcgattagcgcggctattcgggcaggtatctgttatgtcccgcttgaatgggacgggcatgatacccatgcctttgaacgccttcagggatgcggcgatatccccgcggtagccgtcagcagacatgctcaggcgctgtccgacctcggtattgcgcatattgcaatggacaatctttcacgtgaccggggccgcaacgtatcgcgcgatagcttccctgatatcgatgcgaatcacctgatttataccatttatacgtcaggctctaccgggatatcaaagggggtggatattacccgtgccagcatctggcactacactacctcgctcatctcgcttttatcgataaacgagtcgctcagctacgcctatatgtcgagtttatcggcagatcttggtaataccagcctttttttatcactccttaccgggggaactctgcatttcatcagtgacaccctgcgtagggatgcgtgcgagtttcaacgttatatgcgcgagcagcgtatagatgtggtgaaaattaccccttcccattttaccagcctgacgatgcatcactacaccgattttacgcttaagtggttaattttcggcggggaatccttgcaatcagagcgtgtcaggacggtgtttcagaaggggtgggcacgggccgtggcaaaccattatggtccgactgaaaccacggtcggtgtggcactttttccgatgcgtaatctgaatgacgtccctgacgatctcgtggtgcccgtgggttttcctattggtcaaagccgttttgaactggtcgatgaagaagggcagaggctggccggagaggctgtgggtgaattaatgataggaggccctggcgtagcggccggctataccaacgatcctcaactgaccactacgaaattttatcggctgccacatcgaatggcggacggtccgttttatgcctcgggagatctcttcagaaggtcgaaaacaggagcgtatatttttatcggtcgcaaagatcgtcaggtaaaaatccgcggttatcgcgtcgatcctgacgcaatcgaggcgctgatcgcttatgaagatgacgttgaatctgctgcaatctttgcctgcgacagcgacagacccggccattcgcagctggtagcgtgtatcgttccaaagcaacccgctgaggattcggtattgtccatgcagagcttactgtcgcgtattcttcccgcgcacatgatgccggggcggatagtactgctgtccacaatgcccgtcaccgacaatggaaaagtggattataaggcgctgaaagctcagctatccgttccagcccggcacgttgagaataccctccacgtcgccgggctggagggtaacgaacgggttgccgcttccgcatggcgtcagtgtctggggagccatcctcaccgctatgatgaaaatttttacgacgctggcggtgattcgatactggctatccagctgctttccctgctgcagaatgaaaactatccagttcgcgcctcgcacttttaccaggatcccacgtttacccggctgattcaggccatggatactgaacttcaacccgccgtttcccctcagcaaggcatctctgaacggtacctggctcctgttcaacactggttctttgagcagtttcctcagggggtcgatcgctggtcgcaggctatggttattgatgcggcgcagaagatcaatgttgcggcgtttcgcaaggcgctggacgggttgctgaaagcgcacccgattctggggacctgcttcattcagcgtacaggaggctggagcgtagaggataacgtgtgcgaagtggcggacattttccgttgcctggagctgcaggggagcgccgaagagctggaaaatatgatagaacgcgcgcatcaggagattgcgatccgtacaggccagctcttgcgtatatggctactgaaggggctcgacggtcacgatcgtctgctgatggtttgtcatcatctggtaattgacggcgtctcgtggcgaattctgattgacgatttggcgcgattatacgaatcggcccgggataatatccagcgcagcgtggcgattgaaccgcggctgtactggtcctggtctcgtcaactgaagacgctggcggcgactctgcctgcggaggaggtatactcggaagcagccgcaaacctcgcgaagctgcgtaatgattttaggctgggtccaaacagcgaaggaagcgcaaacacgctctggattgggtttgacgagcggcagtctcacgcgctgttgcgtgatattccccgacagcactgcgtggcgattcaacacctgctattggccgcgtatgtgcgaagcgtcgctgacgttctggcatccggcggcacgcatctgtctgttgatattgaaagccacgggcgccagctgttcgaggatgagctggagatgaaccgtgcgatgggatggtttaccgccgtctatcccctgatagccgaagttgtggatggcgaacctgttcttcttacggcccgccgactggcgaacctggcggaaaagcaagccgacgctggcgcactatacggtatccgccgctacttatccgatgctccccggaaaagcgttaaagggtctgaactctgttttaactttctcggtcattttggcctcgattctgatgcgtcgcttggctggtcatggtcgaacctctatcccggagccgcgcgacaccctgatgtatctcgcgtgcatctactgaagctgacgggacgcgtggtggcgaaccggctgacacttgatttgtcctactccagtaatgtccattcccgtcagaccattacccgtattggggagcggtttattgggctgctcaatgatgccctgcagaaggcgggcgtgaatgcggctgcggaacaaacctcaaccttgttcagcgagcacaacagcacgggtcttctcacgtatattccgtccgccctcagtgggttgcgtgaaactcgaccctccggtgcgcttcgggcggtgctgctgacaggagcgaccggctttatcggcatctacttgctaaaaatgttgctggcaaccccttgttgtgtcgtgcattgcctggtacgtggcgacgatcagcgctctgcccaggaacggctgtgggaacgcttctgctggtacttcccgcacgccgatcgtgatgcattgagcgcccgggtggtggttcatgaagggagcctgaactcagtcggctttggccttgctccggcagcgttcacccggctggcaagagaaatcgatacggtggtccatgccgctgcggatgtgcggctgatggcgcctctggatgaacttcgccagaccaacgtggagggcacctgcgccatcgtcgagttttgccacatggaacgcgccaagcggcttcattttgtctcgacactgagcgtggcgggcatcgtaacggataagcaaagcttcagtgaagatcatttgcacatcgggcaaagctttatgacgccgtatgagcaaagcaaatatgaggccgaacttgtcgtcagggcatttatccgggagggcgggagcgcatgcatttaccgaaccggcagcgtgtctgcagattcaacgggaaccttccagatcaacattgaaagcaaccggttgatgcagtcgttgaacacctatgtgctgagcggactgatccctgaccgtgaggaagaccttttgctctgccgggttgacgatcttgcgcatgcgatcgtcaggattgtgatgaatacccgtatctcgggcagaacattccacatgacgcctgatgcggaatttatgcataacgacctggtggaggtgttacaagcctccggattctctgtgcaactggcgagtaccgaaaagtacttgtcggcgctgcgcaagatggatgcagattttcctcgcgaagcggctctgggccaaatgtggtcgacgcggccctcgcgtaaggtccgcatcgatgctgccgtcacgcacaccttgctgaaacgtctggatgcagaaattcccccggtggatcgggcctggtttactcgctttttagcttgctgcgtggagagaggttttctccccggctcgacaaaagtctaa

SEQ ID NO: 377761 - DNA, 780 bp, Salmonella enterica
atgaacaattttgaaaatcgtattgctgtcgtgacaggcgccagcgcagggataggttatagcattgttaacgcgttactggaggctggcgtccgggtggtgggaaatgccaggcgcgcccaaaggcttgacgatatgactactggggctgaaaaacgctacggcgaacggcgcttcgtaggggggacgggagatatcaacaaagaggaaaccctcgtcaaattgatggccgccagtcaggcggcgtttggtgaaacgccagatatcttcgttgtgaatgcggggcgcgggctgccgggctcgttgctccagtccgaccagtcgttgtgggcatcgttatttgagttgaactgtttatccgccatggcgcagatgaagtcagcggcacaggtcatggttgaacgtgcgaaaagacgcgccgggcagccgctggcgcaggacattatcatcctgggctccattgtcggacggcatctgtcacccgttaatcccatctatggtgcgaccaagtacgcggttaattccctcgcggaagcgctcagacgtgaagtttgcgaacactgggtgcgcgtcacccttatcgaaccgggaaccgtgaaatcggaattccaggaagtggccgggtacgatgcgcaggcctttgctgcatatgagcagcagagcggcccttttgtgacgggtgacgatgtcgctaacttccttatgtttgctgtgagtcagccaccgcatgtgcactttaacaatgtcgtgatccgtccgacacgccaggtttatccgtaa

SEQ ID NO: 377762 - DNA, 8937 bp, Salmonella enterica
atgacgctggtgtcactgttcgaagagcaggtcagaaaaacgcctgacgaggtagccttagtttcagatgagatgacgcttaccttgcaggagctaaacacgcttgctaaccgcctttctgaacctctcagagagcatggcgtcactgcggggagtgtggtcggcctgtgtatgcagcgctctgcgatggctattgcaacgttgctgtccattctgaagtcgggtgcggcctatctacccatttcgacagaggcacccgccgaacggcgagcgtttatgctgcgtgacagccaggctattttggtcgtggccgatgacgcgcaactggtgcattttgccactaccgacgtgatggtattgtccgggaaagccctggccgcagcggcgcaaaccgcagtggatacccgtcccgctcatcctgtgacgtcttccgatgtggcgtgggttctctatacctctggatcgacagggcaaccaaaaggcgtgctcggtagtcatcgcgcctgtgtcgtaaggctccaggctatgtggttgcaccagcccttcatcaggggagagcgctgtttcctcaataccgctttcactacggtcgactccttctgggaaatttttggaccgctgtgtgcagggcatgcactctgcgtgctgaatgatgacctgttgcgtgatccttcgcgcctgctgccggaactggcgacgctaaagatacgtcgtatatgtatggtgccctccctgttggcgacatggctggaaatctacccctcgctttcacgtgtcgtcccggcgttgcagctttgggtggtgagcggagaggcgttaaccgtttcgctatgcgaacgctttcggatggcgatgcctgaggcgcatctgattaatcagtatggcctgacggagagctgtgcggacatcacgaccttcgatacctgggactggacagctcccccggactatggaagccactatgtgcctgtcggcaagccgtttgaggggacatcgatggtggtagtggatgcgggacagcaaccgctcccggatggacaggctggcgagctatgcatagcgggactctcgctgtgtaatggttatctgaatcgcccggatcaggaagggcagcgatttgtctccctgaatattgagggtgagaacgtgcgggtcctgaggaccggcgataaagtcatcaggctggcgagcggcgatctgattcatcttgggcggatcgacagccagataaaactacgtggttaccgtattgagccaggggaagttgaaaacctgctgggtgaccatccgtctgtgaaacaagcggctatcgttttcgatgctgaccagcagcgtcttgtcgctttcctcgccgtgcgtgaggggacgtatgatgctgaagatgcgctgatcgactcattgcgtcgctacgctgagacaactctgctgccatatatgcgtccgaccacctatgttctcaacgacgtccttcccacaacggcgaccgggaagattaaccgtcaggcattgcgcattccggatgagaataagcctcctcttacggcctatgttgaaccgcagcagggtatcgagctagatattgcccaggctatggctgaggtactgggactacagcgtatcggcgcgactgataactttctttatctgggcggaaattcgttgcaggcgatgaaagtgatggccctgttgcgtacccgagtcaccgtggacatcgtaccttccctgtttttccctgacccgacgccgcgggctatcgcaagggcgctggcggatgccggtgccagccgcgctgagacagaattgcggccagtgcagcatggacgttactgccgggcttcatttacccaggaaaggctctgggttctcgaccgtctggggggtggcaaagcggcatatacgatagtctggcacctgcaaatgcagggcgaggttaatatccctgcattgaacgcagcgctgaacgtgatcgttgcccgacatgactccctgcggacccggtttctggaacgtgacggtgagtgtctgcaggagattatgcctgctgaaaccttgtctcttgacgttgagtctctgaccgcaggtgaatgcgaacagcgtttaaaccagctcgctaaccgggaatttgatttaacgcgcgggccgctataccgctttgaactgctgcaatccggcgacagaaacttttcgttagccatagcacttcatcatatcgtctgtgacggctggtctgtcgacgtcctggcgcgcgagctgtgcgagctctacaccgccagggtggaagagcgtgaagctatcctgccggaactgcctgttcagtttgccgactttgcgctgtggcagaggcagatgctggataagccggaagcggcgcggcgcctggcgtactggaaaaacaaacttcagggcgcaccggccgggctggagctgccgacagatcgccccagaccggcagtggcaagctatcgcggggcacatgtgccggtctcgcttgctcccgaaacggttgaagcgctgcgagccctggcgcagcgccagggggtgactctttatatggtgctgctggcggcatttcaggtggtgctgtcgcgctggagcggtcaggacgatgtcgtggtcggctcgcccgtcgcggggcgtatgctggcggaaacggaaccgatgattggctttttcgctaacacgctggcgttgcgcggagatttgtccggcaacccgtcgtttgagacgctgctgcaccggacgcggcagaccgcgctggaagcttacgagaaccaggacgtcccctttgaacggatcgtggaggcgctacagccggtgcgagatctttcacggcaggccatttttcaggtgatgctggccttgcatccgcagttcagcgatctacagatgccggggatatccctgcgcgccgaagagaggctaccagaaagcgcaaagttcgatcttgcgcttgagctaacggagacccgtgatgggctttcaggtcagctagagtatgccctcgatctctgggacaaagaaagcgcagaacagattgtccagtgcttatcaacgttgctgcaatctctgcccgacaccgttgaatgccctctatcgcagcagccgctgctgacggctgccgggcaatatcagttgcttaccgaatggaacaacacggcggaagattacccccacgatcaatgcatcgcgtcgttgtttgaggctcaggcagagcaaacgcccgatgcgctcgccgtctattttgatggcgaggagatcgactatcgtgaactggaccgtcgggcggagcaggtggcttcccgcctcgtgcacgcggggattggcccggattgcgtggtcgggctgtttgtggagcgctccattgagatgatttccgggctgctggggatcctgaagtctggagctgcctacctgccgctggatacggattatccgccagaccggatcgcttatatgctggaggatgcgcaggttcccgttgtgttgacccagcgccgtctcctggcgaggctgccggagacgtctgcctgctgcatgttcattgatgacgaaacttcagagacggcgctcccgccccggaaagcgcgcaacatcaatgctcatcatctcgcgtacgtcatttatacatcaggttctacggggcgtcctaaaggggtgatgattagccacttcagcatcctgaatcacctgagctggatgcaaagaacgcaccggctgacccccgacgaccgcgtgctccagaatgcgcctgttagttttgatgtctctgtctggcagctcttctggccgctactcaatggtgcggggctggtagtgaccagccccgaagggcatcgcgacctgagctatctgtccagtttaattgagtcgtcccgggtcacggttatgcatatggtgccatcgatgcttcaggctctggtggacattgtgtcgccgcataccctgcgtcgggtccgcgattttattgtcggtggtgaggcgttgcccccgtcactgctacaggatttttcccaacgttttgactgcagactacataaccaatacggtccaacggaaacctctgtagaggtaagctggcatcagtgctctgccgatgaagatcgtctggtcgtgccgattggtgctccgctaagcaatacccgactgtacgtgctggacaggtatttcaatttatgcccggttggggtgcccggtgaattgtatatcgccggagcgggtctggctcgtggttacctcaaccgaccagacatcaccgctgaacgcttcctcccggatcctttcagtgacgggcagagaatgtatcgtactggcgatcttgcccgatggacagccagaggcgtgctcgaatatcttggccgaatcgatcaccaggttaaaattcgcggcttccgggtagaaacgggcgaaattgatacctgcttgctggcgcaccccggtatccaccaggcgattgtcgttccctggtccagtgagcaaaagccgctgcagcttgttgcttaccttgtgctgaaggatccggcattgcagactgccgaggtgcaggtacatctgcgccggttcctgccagaacatatgattccggcggctttcgtgacgctgggcgcactgccgttaaccccaaacagcaaggttgatcgtaaggcattaccaccgccaactttcgtgacgcgtcagcgccaagccgtgccgccgcggacttcagaagagtttgcgctctgcgaaatctggggcctgttgctaaattgtcctgaggtcgggattgaggacgatttcttcgcgctaggtggacactccctgcttgccatgcgcatggtggcaatggtacgtgcgcgtctcggagtcgaactgccgctgcgtgagatttttgatgcgccagtaattgtgcaactggcatcacggctggcgcattatcaggcccgggaggagggctcttctccgattggcattacgccacgggacggcaatcagccgctgagactgtcattttctcaggagcgtctttggttcctcgaccgtctggttgaggccggggtggcctataatgtaccttggtcgctcgagatgcgcggcgagctacagaccgccgcgctggagtgggcaattaatcaggtgatttgccgccacgaaagtttacgtacagtattccgtaacagcaacggcacggccgttcaaacgatcgtgccagccgagaatgagtcccttgtgtcgcaatctgtcccggaatatgcgctcgataatgtcttgcagacggtagctgagtataagtttgaactgcaaaccggcccgctgtatcgcttccggctttaccggctatctgctgaacggcatgtgctcgcctttgtcgcccaccacattatttgcgacggctggtctgtcgacgtcctggcgcgcgagctgtgcgagctctacaccgccagggtggaagagcgtgaagctatcctgccggaactgcctgttcagtttgccgactttgcgctgtggcagaggcagatgctggataagccggaagcggcgcggcgcctggcgtactggaaaaacaaacttcagggcgcaccggccggtctggagctgccgacagatcgccccagaccggcagtggcaagctatcgcggggcacatgtgccggtcacgcttgctcccgaaacggttgaagcgctgcgagccctggcgcagcgccagggggtgaccctttatatggtgctgctggcggcatttcaggtggtgctgtcgcgctggagcggtcaggacgatgtcgtggtcggctcgcccgtcgcggggcgtatgctggcggaaacggaaccgatgattggttttttcgccaacacgctggcgttgcgcggagatctgtccggcgacccgtcgtttgagacgctgctgcaccggacgcggcagaccgcgcttgaagcttacgagaaccaggacgtcccctttgagcggatcgtggaggtgctacagccggtacgcgatctttcacggcaggcgatttttcaggtgatgtttggcctctactcgcccgaccatcagctgcagatgacaggcctggaactggaggggcgcgaaggtcgtacccacagggcgaaaatcgaccttaaccttgagctgaccgaaacggctaatgaggtatctggccacattgagtacctcaccggcttatgggacgaggagacaatgttacgtttcagcagccacctgctgaacgttctgcgagacgtggcggtggatagcacgcgccgcctttctggggtggatatgctgggggagcagcaacgctatcaactgctgacatccttcaatgcgacgcgtgcgggttatccgaccgggtatttgttgcatcacttgtttgagcgtaatgcgcaggaaaatccacagcgtcttgcgctggtattcagacagcaatcgtacacctacggcgagcttaaccgtcgggcgaatcggctggcaaatcatctgattcattccggtattggcccggacgatcgcgtagcgctcctgctggagcgaacccccgcgatgctggtggcacttctgggcgtcctgaaagcaggcgcggcctacgttccccttgatactggttatccggaggagcgggtcgaatacatgctgcgacactgccagccgaagctcttactgggcggtgaagatgatgtggccccctatggcagcaccggcataccttgcctcgttctggatgatgaaggccatagcccgctgatctctggcgtttcagactgcgatcccgaaccggtgctggtggggctgacgcccgagaaccttgcctacattatctatacctcaggatcgaccggacgcccgaaaggcgtgatgctgccccacggtgcagtcatcaacttcctgtatgcaatgcgcgaccgtctgggctttacggcgaatgatggcatgcttgccgtgacgacgccgtcatttgatatcgcggtgctggagctctatttaccgctcatcaccggaggtcgaattgtcttaaccagtcgtaaagagatgcgcgatggtgccgctcttgcccggctcgtggcccatcgagacgttactttcatgcaggcaacgccgtcgacatggcgaatgatgctggaagctggctggcagggtagtccacagctcacagcgctgtgtggtggagaggcgctcgatcgggagttatgcaatcgactggtttgcgccacgcgtcgtttctggaacatgtatggcccgacggagacgacggtctggtcaacctgtcagcgtattgaggatgtcgacacgccgatctcgattggtactcctgtcgcagaaaccaccgtgaggatccttaacggtcaaggattgttgcagcccgttggcgtggctggtgaactgtacatcggcggggccgggctgtcgcgcggctatctctggcaaccggagttaactgctgaacgtttcatccccgataggtactcggaggaaccgggaatgaggctgtatcgtaccggagatctggcccgctggcgcagagacgggaccattgaatatctgggacgtaacgatcatcaggtgaagctgcggggattccgtattgaactcggggaaattgaagcgtgtttacaggcgcatcctgccgttcgcgagtgcattgttatggtccgtgaggatcgcacaggcgaaaaacggcttgttgcttatattgtggctaacgcggatttggggacatccccggttgcagtgctgcgcgctcacgcttcgcaaacgttgcccgagtttatggtacctacggcaatagtcaccctaccggctttcccacttacgccaaacggaaaagtcgatcgtaatgcgatgcctgaaccggatctgacgtcactggccactcgagagtatgccgcgccgaagggccacgtggaaatggcgttggcggagatctggcagcaactgctgggggtttccagggtggggcgtaccgatcacttctttgagctggggggacattctctgcttgctctgaggctcatagaaggcatcaacgctacgctgggcgttgagtttgcattacgggatctctttgccaatcccgttctgtctcagatggcgaaacagctgaccgcccaggataagaaggacgtggcaacgtcggacaggccgaatctggttcatctgcgtcgcggtcgttcacccgttaagctcgtctgtattcatcccggcggaggcgggggaattggggaagcttacgctccgttgattggcgcgttgagtaaggagatggacgtgacaggcatcagcgccgtcgatcttgatacgttgactagaccggaggctagcgttcctgaaatcgctgcaaattatcttcaccagctgtctgacattattcagacgccgtggatccttgtggggtggtcagctggagggctcattgcgtatgagatgacgcgactggcaatgaaaaacggttgtatgccactggggacgctgcttattgacagctatccacatacccgtgacacgatgcctgatgaacgcgaagttcgagtggaattttacgaatttcttcagcggattggctggctgacgccgcagacgggtgggggaaataatgatgcactttcgtcgacggaaagcgccttgttcgaagcaattctcggcaggatgcaatccagcggtgaagagcgggtcaatattacaagaaatgagctggaatatatttaccaggtcttctcaacattgcaggaggcttattataaataccagatcccagattacgacgggaatatagatctgtttattgccagagattcagacacggatcccggtgagttttgggccaacagggtgagggctggattaacaattacgccagtgaatggcactcactacagcatgttgttccaggaaaatgttacgccgatagctctgcgtattcagcagctctgtgtgaactacgacgctctcacgcagtttgatgagtcattttag

SEQ ID NO: 377763 - DNA, 1239 bp, Salmonella enterica
atgaataagcaacagaaaattcgcagttttgcggatttagaatatatcacggggcgctgcaagcgaattttgaccctgtttagcggtgggttagacagcagctacgtgctcagcgaattagcaaaatacgagcactgtgagatcatagccctcactatcgatatgggggaaggggtcgaacgtgaagacctggcgaatatcgccggacactttggcgcgcggtctattgtcattgatgggcgcgaaatctttgcccgggaggcggtattgccagccttgcgctgtaatgcgcaatacatggggctgtacccgatcagtgcctctttgtcccggccgctgatttgccgcatcgctattgaggtcgcggcgcagcatggatgcgatgccatcattcatacagccaaccagtcacaaaacagcctgcgccgcctgaacggcgcgctccgccaactgggttttgacggtttttacggtagcccgtacgaatattcagcattgactcgtcaggaaaagcttgaggcattgcaacgctgtggcctgagtatgtttgaagcgcgtggtacgagcggggatgccaatctttggtgtcgggagtttgagtccggctggctggacaatccggaagattttcgggttccggctgaactgtttacctggacggcgcagcctatgggggaacgagggccagcccgaatagcggttcgctttgaagagggcgttcccgtctctgttgacggggtccggctcccgttggtcgagttgattgctgagctgaatcatcgcgttggtgcctacggaatcggacgatactgtggcctggaacatctggatgacggtgaaaaggtgcttgaggttcgtgaggcgcccgcagcctgtttgctgatgaatgcctgtcgccaccttgagatggcgacattagatcctgagctcttacgcgaaaaaatatcgctcgagcaggtatgggtgagagaagccatcgaaggtcgctggttctcagggttaaaagtgtcagtagaacagtttatcaaccagtataaagaaaaaatcactggcgacgtggaatatattctacgggaaggcgtagctgatgcgtgttcaatacgtgcgcagcagccgctttatttaactgaacgggatgaatgggaaaaggaaatagcggctattcgtggagcgcgcacgctaaaagagctggaagaggttagctctgtttatccccattcactggttaatcaaaaataa

SEQ ID NO: 377764 - DNA, 738 bp, Salmonella enterica
atgaatatgactgatgaagtgaataccgctaaatacacggatatggcatctgaccttaccgacaaattctatattacgggaaatgttgatgaagccttttctaataccatcacccgcacgacggcgtggagaaactttgcaaaaagctggtttgatttgcagcaggacgggtacatggcggacggggggacttatcgcagccggcgctacgccgagtttctcgtcgatccggcccgccagagcgtggaggtgcagccgcaggtgccctacaggcagtcaaaggccctgaattacctgaacggcgatgttgatcggcattacctgtccattgcgccagagacgattagcaatgaggcattctgtcatattttgctggagtgcgcccggatactggcggtaaagcacccggaaaccctctggcgtgcgcgaatattccagaatcgtatttctgcccagcgtcgtgaaccgggttcacctacgccagagggtattcaccgtgacggtgcagattatgttcttaccattctgagcgacaggcagtccgttgttggcggggagagttccatgtatagcgctgatggtaacacgcggttaagttcaatgctgatgcgcgatccgggggactttatccttttagacgatcggcagaccatgcacggcgtcacgaatattgagtgcgaaaagcaagctgacacggggtatcgcgatgtcatggttgtaatgtacaccgcagagtaa

SEQ ID NO: 377765 - DNA, 1269 bp, Salmonella enterica
atgatagatatgcaagaattgagtgccagaatggatgaaatgaagcgtaacgtggtttcccgtggtattcaatgcaatgtggatgagatcgtcctggcgtattcgaaatacaaagcgtgcacgcagaaactggactcgctgcgtgccagcatgaatcaattatcccgtaaaatcggaacagacggctctctggatcgcgaggctattcagcaggcgagtgcacttaaaagatcgatagtggatcttgagcctcaggagaagatatatcgggagagtttccagacggcgatgctgactctacctaactggatcccctcagacacgcctcaagggttaagtgataatgagaacgtcgaaatcaaacgttggggggcgctgccagcaatagacaatgcccgggatcatcttgagatcgcgcagcggttagatctcattgatttcgagtcaggaacgaaggttgcggggaaaaaattctatttcttaaaaaatgaagccgtcatgctggatttggccctgcaagcctttgctctaaagattgtgcagaaacacggtttcattccgctacaaacccctgatttagcaaagaattcaattctggaagggatcggtttttcacccagaggcaatgaaagcaacatttatcgggttgagagtacggatttgagtcttattgccactgcggaaattactgtaggggggatgcactctgatgaaacattagcactggataagctgccgttaaaatatgttgccctgagccactgtttccgcactgaggctggtgcatcggggaggacatctaagggactgtatcgcgtacaccagttcaacaaagttgaaatgtttgtcttttgcgcgcccgaggatagccagcgtttgcatgaagagatcctgcaaattgaagaagagatttatcagttactcaatctgccttatcgtgtgttgcgaatctgcgctggagatcttggcgctccggcgtctaagaaatatgacattgaagcctggatgcctggtaaagacggtggagaatatggcgaggtcacttcagcgagcaactgcactgatttccaggcacgtcgtttagggattcgatatcaaaataatgataaatcgctgcggggatatgttcatacgcttaatggcactgctatcgcgaccagtcgtgttatattagccatcctggaaaactatcaacagccggatggtagtgtggtcatccctcaagttcttcaggattatatgggcctggatagtattaaaccaaggtaa

SEQ ID NO: 377766 - DNA, 717 bp, Salmonella enterica
atgtttacgaaacaatttacaaagtatagtaggggatttgtacataccttacaatgcgggtttgttactgctcatccggaggtgaaatactgcatcgttgatttcgatcctgaacattataacgatcggttatttgacagtttagctatacagctaccattagcactgaagcaatcttgtatcaaacgaaaggctgaatatcttgcagtaaggtatgcggctaaaggcattctatctatggctggctgcaaacatattcctggaacagctatggatagaagtccagtctggccagttggttggtgtggcagtttgtcacattcgaataattctgctatcgcacttatagcatctgaagctataggcgttatgccgggtgtagatttggaatttttaagaaaaaatgaaatattaggagtagcgggtttattagccagagatgaggagcttgctttaataaaacacactaatatagattatgagaatggtctgtacttattattttcaattaaagagagtttatttaagtcactttatcctgaactgggtgagaggaaggcggggtttaaagatgttcgtgttattggtattgatacaataagtggggatgttacccttgaattaacgaaaacgttatcattatattatgttgagggttttcaaataactggtaaatatatcattgatactaatatgataatcacgctggtgctatga

SEQ ID NO: 377767 - DNA, 300 bp, Salmonella enterica
atgacaaaaccagcatcaaccaccaaaaagccacgcaagcaacatacgcctgaatttcgcgacgaagccctgaaactggctgaacgtattggtgtggccgcagccgcccgcgaacttagcctgtatgaatcacagctttatgcgtggcgcagcaagctgaagaatgcacatttctcttccgagcgtgagcaggaaatggcggttgaaattgcccgccttaagcggcaactggcggagcaggctgaggagctgaccattatccaaaaagccgcgacatacttcgcgaagcgcctgaaatga

SEQ ID NO: 377768 - DNA, 201 bp, Salmonella enterica
ttgatccacgccctgcaggaaaagctgagcaaccgggagcgcgaaatcgactatctgcaggcgcaactggacaagttgcgccggatgaacttcggcagtcgttccgaaaaggtatcccgccgtatcgcacagatggaagctgacctgaaggtgcttcagaaagaaagcgatacgctgaccggtcgggtgctggcaacctga

SEQ ID NO: 377769 - DNA, 348 bp, Salmonella enterica
atgatcccgctacctccgggcacaaaaatctggctggttgccggcatcaccgatatgcgtaacggcttcaacggcctggccgcaaaggtgcagactgcgctaaaagatgatcccatgtccggccacgtcttcatcttccggggtcgtagcggcagcctggtcaaactgctgtggtctaccggtgacggactgtgtctgctgaccaaacggctggagcgcggtcgcttcgcctggccatcagcccgggatagcaaagtgttcctcactccggcacaactggcgatgctgatggaaggtatcgactggcggcagcccaggcggttgttgacatccctgactatactgtag

SEQ ID NO: 377770 - DNA, 402 bp, Salmonella enterica
gtgtcagatatgcagaaaaatataactcctggcaggcgtaagggctgccctcattattctcccgaatttaagcagcagcttgttgctgcctcctgtgaaccgggtgtgtccatatcaggactggcacttgaacacgctatcaacgctaatctattgttcaaatggcgtcaacagtggcgacagggaaagttacggttgccttcgtcagactttccgctgctacttcctgtgacgctcgatatccccggcgtaccgccggcagtgcaggcagatcagtctgcagaggaggtggaaatcctcaatatcggctgtgaggtgacgttccggcacggcacgctccgtctgaatggcgctgtcagcgaaaatctcctgactctgttgatacaggagctgaagcgatga

SEQ ID NO: 377771 - DNA, 669 bp, Salmonella enterica
gtgaacaatgattctgatggtgtggagaatactctgcaatattgtgaacaatgccttaagaatatcgaccctctttttctcgaatgggctgatgccattcttgaacgtcggaagaaaaactattctgaatcaatacggcattacagaaagataatttcagccagacctgactggtacagtgcaaggttacagctggccacagtattatatctgaacaaagacattctttcggtcaaagagcaactgagaaaattacgcagtgaagcgttgtctcaggatacggccggcctcattgaccggttcattgccagaatacagaaaactgatcactggtcatttcgtggtggttttacttatctgaatgaaaaaaacattaacaatgtccccccctccggacgaactatcggaaaatggagacctggaaaaccacagtcgggtaaggggctgctgtactggggcgaggcagaaaaaaccctttctcttccggataatcttttcggtgtcacccgactgaccgtatcagggaaaacatactggaataaccattcttatgatgaactcagtggcagcactggcgtgggactgggttacaggaacgttaacacaatgattcagattatccctttttacgaaaaaaagttattatggcggtgggcgtgtgtcaaataa

SEQ ID NO: 377772 - DNA, 201 bp, Salmonella enterica
atgctcggtgaacatcctgaccgggatacttttactgacacggttaaccgcccggttacgctttttaccggcagtggtatgtgcttctttcaacaggcgatcgatggactatacactgactttcagaaactgctcgcgaagtgccggattcagactgagatgcccgtgtttctccatcgctggaataagctggggcagtaa

SEQ ID NO: 377773 - DNA, 237 bp, Salmonella enterica
gtgaacaatgtattgttgcctatggatacccgtcgtcagcttctgcgggcgctgaaaacgcgatatcaggcaaccagtaaagccgagaaaacccggatactggaagagttcatactgatcagtgggtaccatcgtaaatcagcaatccggttgctgaacggtgccatcaccagcggtaatcaccggcgtcgctcagccccggctcggtttatggcgcagctgttcagcaggctctga

SEQ ID NO: 377774 - DNA, 765 bp, Salmonella enterica
atgaataatcaaaccagtaaaacatccgtacctgcactcgataaaactgtccggatttgcaattatctttttaactccccgggtgccaccttcagtcagatccagcaggatctggggctgcccaaaagcagtacttcatctttactgacagcactggttgagcatcactttttacgccaggagagaggtagatttttcctgggactgaagctgtacgaatggggaaaccgttccctggaacagttcgacatcagtaaggttgccaggccggtgctggagaaactgagggacagtacagaccttatttgccacctggggatccttgatgaagttgcgcccatttatatcctgaagcttgaaagcgcccagccaatagggataaagacatgggtgggcaagaaactgccactccacagttctggggtaggtaaggctctgtgcgcgtggctgccgccggagaccattgatacgctgttaccggatgaaaccttgccgcgctatacggataccactatcacctgtaaatctgagctgatgcaggaattcgcgcatattcgtgagcagggatgggcttttgataatgcggaggattcaccgggaatttactgcattgccgcgccagtctttaaccgggcgcaggaggctgtggccgcaatcagtgtcagtggtgttgaggttcagttgcctaaggaaagaattccgtactattcctccctggttctggaagcctgtcaggaactgtcagtaaagttaaaatatatctga

SEQ ID NO: 377775 - DNA, 900 bp, Salmonella enterica
atgtcaacgaaattcaggggtatcttccctccggttccctccattgtcgatgaacagggggaactggataaagcaggtatggcccgtatgcttgatcatgttattgaaagtggcgcggacggaatgctgatcctgggcagtggaggcgagttctcacagttttcttccctgcagcgaaaagagatagcggcattctgcctgcatcatgtggacagcagagtaccggttctggtgggtattgcctgtacagggactgcagagaccattgaactgggccgtcatgcgcaggagcacggtgcggatggcgtgctggttgtaaacccgtactatgtaaaactcagcgatgacgccaggttcatgcattacaaaaatattgctgacgcgctcgatacgccggtatttctctataacttccctgacctgacaggccaggatattggcctggatgtcattacccggctggccagagaagtaccgaacatcgtgggcatcaaggacacgatcgataatatcagccatacccgggagatcatcaaccgtgtgcatacttttcgcccggacttcattgtcttcagtggatatgacgaatatatgctggataccctgctgctgggtggccacggcggcattccggccaccttcaactttgcgccggatatcaccagaggtatttatcaggcttttcaggataacgacctggagcaggcccgttattttcagcagcaactggccaaactttctccactgtacgcgctggagcagcctttctttggtgtgataaagaccgccatcagactgtgtgggcttgacatatctcccgccgttgtggcgccagcactgccgctcagtgatgaaaaaactgctcaggtgaaagccattctggcaagtattcaccagtaa

SEQ ID NO: 377776 - DNA, 1518 bp, Salmonella enterica
atgaataacagtccggtactcaaactaaacgcagcggatgatgttgtgattgcccgacaggaccttcctgcaggaagcaggctggaagctgagggtctggaaacgtgcgatctcattccggctggccacaaaattgcacttcatgatatatcagccggcagcgtggtaaagcgctatggacagattattggctttgccactcgtgacatccggcagggtgaacatattcatgtgcacaatctcggtatgggcaattttgagcgggactatgcctggggagcggacagtcgtcctccggaacgggaagcgcatcaggatacctttatggggatccgcagagcagacggtcgggtggcaacccgcaattttatcggtgtactcagttcggtgaactgcagcgcgacggtcgtcagggcaattgaagatcatttccgtgcccgtggtctcagtgatttcccgaatgtggatggcattgtggccctgccacaaagttttggctgtgccttcggatctgacagcgaaatgatgacagtcatgcgccggacgattgcgggctattccacccacgtaaactttgccgggatagtgatcgtgggactggggtgcgaatcctttcagataaaggacatgatgaatgtccataaactgagtgaaggcgcaatgttccataccctgaccattcaggaaagtgggggaacccgtaatgctatccaaaaaggtatctccctgatccacgacatgttaccggaggctaaccgggttaaacgcgagccggtaccggtttcggaaatcattcttgccctcgaatgtggtggctctgacagctactccggaatctctgcaaatccggcactcgggtacgcagtggaccggctggttcgccaggggggaaccgcaatactgtcagagacctctgaaatttacggcgctgaacatctcctgacgcgccgggccatcagccgggaagtgggggaaaaactgatccgccggattaagtggtgggaggactactgtgaacgaacggggagtgaaatgaataacaacccgtcagcagggaacaaagcgggcggtctgacgacggtactggagaaatcactggggggtatcgccaaagccggtacgaccagcctgatggaagtctacgagtatgccgaaccggtcactgcgaaaggcgttgtctttatggacacccccgggtacgacccgatggctgtcaccgggcaaatcgccggcggggcaaatcttgtgtgttttaccaccggccggggatcagccttcggctctaaaccgacaccctgtctgaaaattgcgaccaacaatactctgtggcgccgtcagcaggatgatatggatgtgaactgcggcaccattgtggaaggcgaggaaacaattgaacaggccggggagcgaatttatcagagacttatcgagatggcctcgggtgcccggacgcgaagtgaagaacttggttatggcagccaggaatttgtcccctggataatgaacgcaattatgtaa

SEQ ID NO: 377777 - DNA, 1008 bp, Salmonella enterica
atggaacgtaaacctgttctggggatatttctgggtgaagcagccgggatcggtcctgagctgattgctaaagtggtggctgatggtaccgtttataagtactgccgacctatcctgattggcgacgcacgggttatggcgcttggtcaaaaaattgccggcgtggattttcagtgggatgtcatcagcgatccgtctgatgcggactggaataccgggaatattccgctgctggatttgaaaaactttaatcctgaaaatctggtcatgggcaccattgatacctgctccgggcacgcaacgggcgagtcactggtgacctgcatgtcattacttaaaaccggaaagattgacggttttgtcttcgcccccctgaataaagaagcgttcaagaaaggcggctgggatattgaggacgaacattatctcttcgctgaacaactgggatgtctggacagaccgcgtggattgctgaacgtgctcgatgacctctgggtatttcgtgtgaccgggcacatcccatttaaagatattgccagccatattacacctgaaaatgtcagccgttcggttcagttatgctatgacacattacgtatggcgaccattgaaaacccacgaattgcagtagcagccctgaatccccatgccggcgatggcggcacctgtggcaaggaagagattgacgttcttatcccggtcattgaaagcttccgcgagaaagggatggatatgtacggcccggtaccgggtgatactgtttttattcatgcgtttaatcatgaatacgatgcggttgtgaccctgttccatgaccaggggcagattgccaccaagctccatgcttttgacgtggggatcacggtggcagcaggattaccgtatgcaatcacaacgccggaacacggtactgcatttgatattgcaggcaagggcgtggccaaaacactggcaacagaacgcgctattgctgttgcagccagaatggcgtccacaacacataaataa

SEQ ID NO: 377778 - DNA, 1302 bp, Salmonella enterica
atgtcattcagtgataaattaataaactctgtttcttcgagcaatatccaaaagccaactaatatccgatggcgaatatttttcgttcttttccttcttgttgttgtcagtatgattgaccgtgcttcaatatcaatagcgatgccgacgattgctaaagacctgggtctgagtgataccatgcaggggctgatcctgagtggttttttctggacttatgcctgtatgcagatccctggaggattcctggcggataagtttggcgcaagggttatactgactttatctgcagtcctctggggtattgcagaagccctgttagggctttgtccaacaggctttgctttacttgctgctaaccttttactcggtgcaagtgaagcgcctgtgtttccctccggcgccagactgaatgctatctggttaaacaagaatgaaagagcgcgtggggccacgctaatggacgccggtggtccgtttggtgccgcaattggtggaatattagtagccgaaatgattctgtatttttcatcatggcggattacttttattatctgtggtgtagctgcagttattcttggactgatagcctactggattattcgtgacaaacccgaagactcacctaaagtaaatgacggtgaactggaaattattaatcttgatcgaactgaaaatgaagttgttgaagaaaataaggaaccattgctaaaaattattccgctgcgttccttcacaggtatgcttctgggtcgttgttcatgggcaatgtgtttctttggattgttaacatggggacctggatatctgacacgagcattaaatctggatttgaaatccgttgggttcgctacgatgataattttctgtgcagggggatgtggtagcctttgtggtggctggcttgcggataaattatcaagcaaaggtttaggtcggggtcggtcctgcaaattattactgacaatctcaggcgtttgtacactctttgcatttgcggtattacctagcatcccggatgtcaaaacatccattattcttctgtcctgcgctgcatttgtattaatgtgggggagtatgtactggacatttcctccattgctggctccacgctcccgggtagcaacagtgggtggtatgatgaatatggctggtagcgttggtgggatctgtattccattaatagttggtcttattttagacctgacaggttcatttgacccggtactctacttcttcgcaggttgtgctgtaatattcattattatgacaaatattattgacttacgtcatgtacgctag

SEQ ID NO: 377779 - DNA, 957 bp, Salmonella enterica
atgaatactgaaaaattgaaattatatgatggtccggttattgacgcccatcatcatttctgggacccaattgaaaatgaccatccgtggctgaagcctgatgtgttgatcccttttcgatatggtgattatacagccattaagaaaaagtattacccggaagattatttcctggatgtcgggaatattaatgttgtggaaacctgctatatggaaacagaatgggacccaacagacccctgtggtgaaagtgattttattacctcggtggccaaaaagacggggtatccgaatgctgttgtcggtcaggcctggttacaccatgatgacatagagtccgtattgaaaatgcaaagtacatacgaactcatgcgcagcatcaggcataaaccggagggacctgacaaacctgaagatgtagggcagtacaccaccctgatgagtaatgaaaaatggcgatatggttattcattacttgcaaaatataatctgatgtttgatctacagactccgtggtggaatttacatgaagcggttaaactggccaatgatttcccggatacgatgataatcctgaaccatacgggactacccgcccagcgttctgttgaaggacttgccggatggcattcatcaatggcagctttagccgagtgcgaaaatgttgtggtgaaagtgtcaggtattggtttaaagggtatcccgtggtcggtggaaaataacctgtggattatctctgaagttatatcaatgtttggcccagacagaatcatgtttgcaagtaatttccctgtggatagtctttgcggtagtttcagtgacatatttcatggatttatgacggtatgtgaaatgaaaggatattctcatgcagcacaacggaaaatgtttcatgataactgtaaacgaatttacaggaccataccgccacatgagataaaagaagacaatagttaa

SEQ ID NO: 377780 - DNA, 804 bp, Salmonella enterica
atgtgtcgggtccttaaggttgcccgtgccggattttatgtctggctccataacccagtatccgccggagaaaaggataaccagcggctgctggaactcatccgcgactcttatacgctgagtggcggagtttacggttatcgcagagtccatggcgatcttcgtgaaattggtgaagcgtgcaacagaaaccgggttgccaaaatcatgaggaaaaacaggatacaggccatacatggttataaagtgccacgcggaacccggggaagaccgtccgtgatagcgcccaatcgcgtgcagcgtgaatttactgttgtgaagcccaatcaggtgcgggtaaccgacatcacctacatccgcacctggcagggctggctgtatctggcagtggttatcgatctttttgcccgtaatgtggtgggctggtcgatgaaaccgacactgtcgcgcgagctggcactggatgcgctgctgatggcggtctggcggcgtaaacctgcagaaaacgtcattgtgcacagcgatcagggcagtcagtatggcagtgatgactggcagcggttctgtcgggccaataatctggcaccgagcatgagccgtcgtggcaactgctgggataatgcagtggcagaatcgttcttcagttcactcaaaaaagagcgcatcaggaagcggatatataaaacccgggacatagcccgggcggatatcttcgattacattgaagtgttctacaaccgtacccgacgccacagccacctcggtggcgtcagcccagaggccttcgaaaaggcctcaccgtga

SEQ ID NO: 377781 - DNA, 285 bp, Salmonella enterica
atgggcacaccacgttttacacctgaatttaaggaagaggctgtccgccagatcaccgagcggggctattctattgctgaagtatctgaacggctcggcgtgtcggcgcacagcctatataaatggctccgtgctgttaagcctgacaacagtggacagcaggcacaggatttactggatgccagaacagaaattctcaggctgaaagcacagcttaaacgcactgaggaagagcgggatattctgaaaaaggcagcgcggtactttgcaagggagcccgactga

SEQ ID NO: 377782 - DNA, 1002 bp, Salmonella enterica
ttgtttgtttacttatatgcaacagtctgtttgattatttttcatattcatttcgatagcttttcgctagatttaagttactcaagaattattgttgaaatgatgatgaataaaaaaattccgatatctctcatggtgttagttatatgcctctctgttggcgggttgatttccaccgacatatttttacccgcgcttggtgaaatgcgattgttttataaagtgactgaagcgcaaatacaggacgcaattgcgttatttttatttggtgtggcattttcgcaacttatctatggcccattgagtgatagccttgggaggaaaaaaacattaatcggagggttactgatatggctgatttccactgccagtgtgatttatacgacgcacattaatgaattgctgggtttaagattatggcaggggatcggctcatgcgctggtattaccatcagtcgggcgatcattaacgatatgatggataaaaaatcatctgcgcagctctacctggtcatctttccgtttgtggggatgtcacctgcgattgcgccgatgatcggcgggattttgactcagcatttcggctggcgggcatgttttatctttttaaccctctttatcctggccacgctggttctctgctttacggcactccgtgagacattgccgatagaaaaaagacaaaaactaagtgtactgacagcaacaaaaaataccgttgatgttgtgcgaaacccaacctttctcttttatgctgccattccctgttttgcctatgcggcttattttgcctatatcgtcgagtcgccgtttatgcttgcgaaactggggctttccccagcctatgtgggttatacatatattctgctctccgccagttatgtcgccggaaatttgacggccaaaaggcgttcaaggcgcgagggtattgaagatacgatccgtcagggataccgcatttttgtgctggggggattatttttgccttgcagatgtatgtga

SEQ ID NO: 377783 - DNA, 330 bp, Salmonella enterica
atgtatgtgagtccatttcccctgccgacgacgattatcgctatttccattctgacctttggcaacggctttttgctgccgttggggacggcatcagccattgccgcccatccgcaggcctccgggacggcatctggtgtgatgggagcactgcaactcgggagtgctgccatcgccacttttttaattggcaaactgtccgcccatgcaccaggaatgaccgccctgatcatcgcatgtgtgtgtgtattcggttttctcatttatgtgttgggtcaatcttcatttatgcaatttgtctctaacaaagagagtaagatcaatgattaa

SEQ ID NO: 377784 - DNA, 942 bp, Salmonella enterica
atgattaataatatcgatgtcacattacgggatggtggttatcagaatggttttcactttccgacagactacgcgattaaacatgttcaggcgctagtggaaagcggtgttgagtggattgaaataggttatcggaacgggtcttttaagccgattcctgatattggtattacgggggtgtcacccgatgaatatattcagcagatccacaatgctgtgccggatgctaaattagtggtgattgcccatccgcataatattaatcacgatgatgtgattcgtatgaaaatgcacggtgtgagtctgctcaggatctgtattaaaacagataatccacaaccagcattggcattatgcgaatttgccaaaatgagtgggttacgtgtgagtatgaattttacccgtgccagccaaattaatatcaatacgcttattgatgtggctgcacaatgcgaaaaagccggggccgatattatctgtatcgccgattcaaatggtagcttacgcccggaacagacatcgcggctggtcaacgtccttaaatgcaccacgcgtgtggacgtgggttttcacgcgcatgacaacctggggctggcgatggcaaatgcaattgaggctgtcaaagccggggcaacgtttatcgacagctcattaaccggaatgggaaaaggcgcgggcaatctcgccatggagacttggcttgccctgtgcaatttcaatagcggcgctgacatttatcagacggaagtgatcttcaggcaggttcaacagcttcagtctcaggcctgttttaatgcttcgcaccgcagcgtggtggacatgatcctcggggtgaaaaacctgagcgtggactaccgcaaaatgattgaggagaaactttccgaaaatctcagcaacacctttacggccattgatcacgttattaccgggacggcagcatga

SEQ ID NO: 377785 - DNA, 717 bp, Salmonella enterica
atgaaaaagagggaggccgttatcctcgccccggtgatgcccgtctgggatgaaggtcagttttgcgcgccactggttatgttgctggtggcaaaggggtatcacgtcaccgttattgatacgttgaccctgattcaggatgcctcgccagagagggcggttgaggcactctgccaggcactgaatgcccggttccagtctccctatctgctggtggggttcgccatggcgggcacgttagtccagctgttggctccgcacctgcacggcctcagtggtgtgatgtctgtcagtgcaccgggttttgcggatgaacaactcaacaggcgtttgggcgagcttgtctcgctgctggagaagggcgaggttgagcatgcggtggacgttctgcatcaattcgttgtccctgaagggcaagccgcccaggaggggcgtttcacgttgcctgacgcggcgaaagcatctgccattcagcggatgttgaccggatttgccttgctactgaacatggacgctcgcgctgccattgctcgctataacgggaaataccttgccatcgtgggggataaatcacagctggcgtcctgggaaaaccaaacccatagcactcaaccgacacacctctacaggcgcatcccgaaagcgggtatgcgcccatggaatgacaatcccgcagcgatgaatgccttacttaatgaatgggtcgacacactatga

SEQ ID NO: 377786 - DNA, 2163 bp, Salmonella enterica
atgaaaaaaaatgtgctggttttaccgggtgatggaattggtcaggaggtttgcgaggctgcgctacctgttatcagtgctatggatcttcccattacgctcacttttggcgagattggctgggcatgctggacgcgggagggaaaccccgtaccagatcaaacctgggaaaaaatcgccggggcagacgcggtgctgcttggcgcaataaccagtaaaggtaaagcgcaggcgcagcaggctttacctctgcctctccagcagaaaggtatcgagtatgtttcgtcggtgatccaactccgccagaaactggggttgttcgccaatatccgcccggtgaaatatgtcgcaggcgatcgacgtccttttcgctgctgcgtgattcgggaaaataccgaaggtttgtacgccgggatggattttaaaggggttagaccggcggtttccgactggctgaagcatcctaatctgaacaagtatggcccggaagaggctgcctggacggttcggctgcaaacccggtatgggctggagcgcttgtttcagacggcctttgagtatgcccgcaagcaccactttacccgcgtcacatttgccgataaacccaatgtgatgcgcgagagtggtcactttgcggggagcatattccatgaggtggctgcgcgttttcctgagatcacggcagatatccataatgtcgatgctattgccctctggctggtgcgtaagccccatgagttcggcgtgattgtcgcagaaaatatgtttggggatattttgtccgacttagccgcaggggtgatgggcggtttaggccttgcaccaagcgccaatattggcagccatgttgcctactttgagccggtacatggcagcgcgccagggatggcaggacaggggaaagccaacccgtgtgccatgttttacaccattgcactgatgctggagtatctgggctttgagtcacaagccgaaaaacttcaacacgcggttgaccgggtggtccgggacgggaaagtggctacctatgatttgggagggacggcatccacacgggaaatggcgcaggccatcatccgggagctgcttcacccgactctcgggaaaacggccagcgtgatcaccatcggtgatgaactgttgtccgggcaatacccgaacagcaatcagttgcacatcagccagcggcttgaggcggcgcagcatcaggtgagatttcaggcgtcctgcgcggacaatattgcccagatcagcgccctgatcacctcacgtatagggcaggacgatctcattgtcatttgcggcggacttggccccacctccgacgataaaacccgcgaggcagtggcacagtctctcggcaggcccttgatttatgatgaggatgtctgggccactattcaggcgcagctcagggcgtttggggtgaaaaacgatccgtctaaccgtcaacaggccagatttccagacggcgctagcgttctggataacccgttcggtactgcccccggtttttacaccagcatagccagtagcctggtagttgttctgcctggccctccttctcaagcgttgcccatgcttgatgacttgttatcaggccgcgagcatagcgaaccggcaaagactacatcctcctggacgcttattggtataagcgaaagcgaagtaggttcaattgtgagcgccttagtctcttcgacggcgtgggatgtgcattttttatggaaaagtccctatgtcattgtgcaaatagaaacgccggagcacagcccgttaccacttccggtgtggcaaagtctggatcgggcattacgtccgtatctggtgagtaaacgtaacaaaaaggcgagtgagatattgcaggacacctgcaacgtccgctggcagacggccgatgtggagctgtcatcttatttgccagtggccagaaaaaagacgggaggtgagccagtgctttgcatcgacgtcgcggttaacccctctctggtcgacgtgctggagagtgaaacatggatggggcaaatgacgatgtcggttcgccatcaggatggcaagaaacaccagatgacctttccccttaataaagcccttctggcgcaaaccctgcctgagtatgcggcctggtgcgtactgaaaaccctgacaatacaaaatggatga

SEQ ID NO: 377787 - DNA, 669 bp, Salmonella enterica
atgacaacccaaaaaacgattaaagagcgcctgttggccctggacacggcagcagtctctgatgcgctggacagcctgtacatttcgggggggctgttggggattaagccgcaggtcagcggaaagaaaatcgcggggccggcttttaccgttcaatatgaagcttgtacaccggaaaaaaatcgcttcatgaatgccggtaactatattgatcaggttccggccagagccgttattgtggtggacaacggcgggcgtctggactgcacgagctgggggaatattctcaccactaaagcggtgcaaaagaagatcgccgggtctgtcatctatggttcagcccgtgatattaccgatattcgccagatggattaccccctgttctcctgcaatatctatatggtttctgggaaaaaccgggcgcgggtaaaagcggtgcagtgcacgcttgatatccacggtgtgacagtctgccctggcgactgggtgtttggcgacgacaatggtgtgctggtgatacccggcgaacacctggaagaggtgatccggcgtgcggaaaatgtcgaaaataccgagcggcagatcctcagtaccattgatgccggcacaccgctggacgttgcccgtcagcaactgggctatgatgttccctgggaaaataacgtatga

SEQ ID NO: 377788 - DNA, 894 bp, Salmonella enterica
atgacccgtcaatttttcgcgtactgggcatcccggctgcagtttctggacgtgcattatcacgcgcgtccggatagctaccatcggcgctactcggcatttgaagccgggcagcagtatgcccggtatcagggcggggtcgtgttgaagaaccacctggggagcgtgagtgcgctggcggcagccatgcaggagatatctctgcctgtgtttggctcggtggtgctcaatgcggctgcgggaggagtgaaccttaatacggtacgccaggcgctgagccagtatcagtttgagggcgctccccggttgctggtgcatttgcccacggtggtttccaccgtacacaagagcacactttcaagaaccttcagtaacaaatatgcccgctattttgccggacaaccgctctctgtgaccgatgaatacggtaagttacaccctgatgttgaggcactaatccatttcgcacgacatcatgacattgtgctttcttctgggcatacctcgaaagatcaaacgctgcgtctgattgaagccgtggagcgtgttggcggcgtccggttgatgttgaaccaaccggcaaatccgatcacggggttttcggcggcagaactctgcgcgctgggagaatacgactggctctatgtcgagcagtgcgcgctgacgctgtatctgggctaccagaccccgcaggacatgtatgatgttctgacgcaggtgaacaatgtggtttatagctctgatctgggccaacccgctcagccggacatcggcgaatggctggaaggcagccgacgctggttccagaccggcggactcagtgcagagcgaattgatgctgtgacccggttaaatccgctcaggatgctggatccagagcggtcgccagattga

SEQ ID NO: 377789 - DNA, 894 bp, Salmonella enterica
atgctggaaaatatgaaagcattcaggatggtggtggaatgtcagggattccgggccgccgcgattgccatgaaactctcaccggcaatggtaagtcgcagaattgagaagctggagtttgaagtcaatacacagcttatcaagcgtaattcgcgtcgcatatcccttacggccgccggtgaacagttttatcagcgctgtctgctgattattgatgagtatgaatcctgcctcagggacgtgaaaagtctcagtaatgtggttagcggcaacctcaaggttgggctcccccattccataagtcatctgcatgtaatcccgtgtctgaaaacattccttgaacgctaccctgaccttaagctggatattgtcaccggaaaccactgcatggaactgttcagccacggttttgatctagcgctacagtgtggccccctcccggacagcaacctgtactactcgctcattggttactggcgtaaacatacctgcctctcgcgcggctatgcgcagcagcacggtatgccgtcacatcccgacgagctgcacaagcatacctgtctgctgcactttgataatcaccgacgctcctggaaatttatgattgataacgaatgtacagaaattcggcctcattacatctccagggtcagcaacagccttgacctctgtaacatggtccatcaagggcttgggatttgttacctccctgatttcaccatcaaagccggtattgagtcaggcgaaattattaccgtgctggaagaatttatgcctccgccattgccaatgtatgtggtgcatatcaatccgcgcccatcccccaaagagcaggcattcattgattttattcgtcccctcaatctggcgaccgctctggatccagcatcctga

SEQ ID NO: 377790 - DNA, 1503 bp, Salmonella enterica
atgaagaaattttatcaatttagggatgaacagcgaaaggagcttgaacaacatgatttttatagtttgatttcttcagattgtatagcgttgaaagacaaactattatttgctcctgttatggctcatttcataatgaacttcagagacatgaataaatgggttatcaggtttgataacaatgataatgaatataaatctgttataaacggtggaacaatcgaggatgaaacacattcaagattgtttctggaagactggaggaagctatatatagatgacaaacttaactggaaagcaagtgatgttatatactggttgtttattagtcgagaaatggagtgtttccgaaaatttggtattgattttatgagactttgtgtagatgatggaggagaaccaatacttcgatattctcactccgagtcaggagaaacttgcggtaatatattcttttcaaaaattagtcctattgctgatcaagttgccaatcatttgggaatatcactccgttattttggaacatttcaccttaatcttgaaaatggacatgtatggaagtcagaaggtgtttttgaaaatatagagttgtcaccagattcttataagaaaatggctactctctcaaagagaatgtttgacatatttgaaggaattcatgactctttttataattacctgtccagttatgttcttaatggaagtcatccgtcattttttgaatcattacctgtagggaaaaatgttgcacctatataccctgagtttgtgatagaaaacaaaagccataacgatggtagacatattgaacatataaacaattacctggaaaaaatatcgagtcatgagttctttaaatggctgattaacacctcaatagaccctcaattgaaattgaaaagtttcatacctctttggattgttgatattatggggtatagagatattaataaatatgtttttacatatgaacagcctgaatcagaaagtgaaaagattataaatgattatgcattacacctgtcagagcatagccgtttattttatcatgactggaagtcacttcaacttgatgatatgttacgttggagtgccagtgatactcttgagtttatttttcttaatgcagatatggatatgcatagagaaaatatagttaagttttctttgttcggattaaaacacagagatcctgttatcaggttctggtttatgatgatactggagttaagtggaaaagaatttttctctcatgttggagatatagctttacaggtggaaagtaaatataatatttatctcccatatttatgtggacgccatgcaacagaaaatgagcatgaagcatacaataatatgtatgagcattttatggtaaaggaaattagccctgaacaaagtgatctaataatacaaattacagacatggttatgcggtcattattgaataatttggatatctcatatcgatatgtagtgaataatttattggctgctcgttag

SEQ ID NO: 377791 - DNA, 444 bp, Salmonella enterica
atgatctcttaccaaagagatttggcggctaattttaagctcgctttgcctggaggttctgatgcagatgtgaaagatgtcattacttatgttgaagatgttttttttaatactaacgaccattcttatattaattcacaagggtttaaagaaaccatctttccagttgtaagggcattttatattttgatcaagatgattgatgagtcatccgaggatgaagtaagtgcaaatattgcatcaaagtattacgaatgggtgattaacttatctgattatcattttttgaggctcgttttcttttgctctttttattatgataatatatcttcattcacttatataaggtcgaataaaaatattattagtagtttgacaacgatggggtggaacgtatacataaatgaaataattaaaagaaagcaacagctaggtattgcttga

SEQ ID NO: 377792 - DNA, 831 bp, Salmonella enterica
atggcagtcactgatgtggatttcgagctaaagatagagtctggagctaacttggttgatatggagtacggactggaaaccatgacggggttttcaggtgccattgctattaccactgattgtattttgtctaatgaagtaccatcaaaaatgagctattctgataatgttagggcaaagctaatgggagcttgtattgggtcatataagcaagattttaagcttgttatttcagaccctgtgaaaagtgctaacttaaaaagaataggtaactctgttttatctgagttaataacgtactttatttgtgaagctatgtatgttgaacccccagctttaaccaagaaggctgaaaaagtattatctaaaatggaaaaaatagaaagcaaagtaatagataggatttctgagcgagtgaaagatatgcataaaatttcccgttctaacaaataccctgttgttttgaaaagaaagacgaagttgaggaattttaagctttttgaaataaataaaaatactgcaagcaatctttttaatctaactacagatagtaactctattgaaatagatgctatcgttacaagatttaattctttcacagggaacgggcgacttcttgctgatggcgattcagttactataccatttagtttctccggtccctatagtaaggtaaaggcgtcaacaaagaggcttatgcccgagaatcttcacgataacaacgctgttgctgatgagttaataacgagattaaaaataacagccaatgctaagcgtaatacgtcaggggacatagttaagtacatgatattgggtgcaagtaagccatga

SEQ ID NO: 377793 - DNA, 447 bp, Salmonella enterica
atgattcagtcactaggtacaattatgagttcgtctgctgccgtaactgttctgaccggcgtaaccgtttttgttgttggtcaactcatcgcaaaaagattcattgagccttatatatcattcagagaacaattagggaggattacagcgcttttattacgtgagcaagcgacgatcacaaatttcagagctaatcatgaaaccatccacgatttgaaagatgctgcttctcagttaatggcaaagtatgcagccttgcctggtagcctaaaaagaagctatttaggtatgaagtttgtaccatcaaagggtgaagttcttggtgcagcacaaaaccttaatgagatcacctcaatacttgctggcaacagtaaggaaaatacctacaatctcataaaggagattggactcaagctcaatataccaactacctattcttctcattaa

SEQ ID NO: 377794 - DNA, 315 bp, Salmonella enterica
atggctaatacaggtttggcggccacttcgttggttatcaataattataaatgtggaaatacacgtttacttaatgtcgcagccatgatcgatgattatattgttgatgaggcttattttattaatggtatgacggcgattcctgatgagttgacaaataaacccaggcgccgaaaagacgggcgttacgtcaggatctatcaatgggatgtaccggaaattggtaatccaccttatatcgtttacgagacagaaggaaaaatatcgtcactcctgacagaatatagtaatgatatatgtattgttttaccctga

SEQ ID NO: 377795 - DNA, 249 bp, Salmonella enterica
atggcatggtatatagatagtaagaacgttaagaaaaatacaaatgaaaaggcaaatacaaaatacgaaaaaatttggaaaccgggagaaaaacctgattgtgctggcatttatagatgccaagcatgtggttatgaagatttaattaatcgccaatgtaacaaacttccaccatgtagcaactgtgagaagaaatcacacaagaacaatacgtggaagctactcgtaagagcggttgatgcagaataa

SEQ ID NO: 377796 - DNA, 498 bp, Salmonella enterica
atgaacaaagaaataaaaaagctcatacatgcattcagaaacgctctggtaatggctgccgacactcattcacatgcctgttttgatatgccaagatgggatgaactaaatacatttcctcatggaagttgtgatctggcaagtaattttttagcaaaatatcttggtgaacacaggtacgaatctacagttatatgtcttaatattgataatgatcctgaaattaatgaacatatccatgggcacgttttcttgcaaattggtgaacactatgtagatataactagaaatcagtttgaggattcgaacgcaagaatagtaatagaaaaaaataatgattcacttgcgaaactaatcaaagctgcgaaaaataagggagctagttattatgaggagagaaatataaatttagataacttcgtagagtcaggtgcagatctttattattacgtcaaaaaactggcaaataaactaattaatgattctacgtcagaataa

SEQ ID NO: 377797 - DNA, 1065 bp, Salmonella enterica
atgaaaactatttcactatttaacaacaaaggcggggtaggaaaaacgaccctgacttggaacttaagtgtatctctatcggcaaagggaaaatctgttttgctgatagatttcgatcctcaatgcaatttatcaatagctttacttggtgagactggcttctctgaccttttaaagaaggatgcaaataatccttatggtaaaacgataagagcattttgccaaccatttatacaacaagatattctccctgtcgtacatacattcccaccacaatttcccatggagcctggctcaggaaggttagacatagctccaggtgacttttggctcaataatctttcagatgtgattagtgtaggtacagatttaattgctggaaacgcagtaaacagattcttgatacctagtttaattgctagtaaagctcaaaagttaaataattgtgaatacgattatgttcttattgatgtaccgccgtcatttaatacgatagtcagatcggctctctactgttctgattatttcttggttccatgtactgccgatatattttcggcttactgcataggactcattggtgaaactttaccaaaatttagagacgactgggaacagggtattagaagaacttcagcccaaaataactctctaataagccaaaaaggttcacctaaatttgcaggttgggtcttcaacggatttgataaaagaaagaatccaggccaacaaaactcatcagagatcgcggctgatgcagcccatagagataaaataattgattcagtaaaaaatgaccttcgccccaaattagcatctataaaaacatactcagcagtggcttcttttactccagacactcctgtcgcaaaagttgaagacctaaatgttatggctccagatagtatcttacagggggtcccgctcagatatctatctaccgtagcacctactaggggggtgttggccagaggggcttggtcaggacctcagaaagccctaatgcaggctatgtcggcagaacatgacgttttagctgattatataatccaaaatttcgtttaa

SEQ ID NO: 377798 - DNA, 354 bp, Salmonella enterica
atgaaatatctggtcaaagagtttattaacgagaaatattctaaggctgttaatattttaaaggataatcttaaagaacactatcatgttttttatggtgtgagattaagtgagattctttttcctaccagtgaatatggcacagatgctttctttaaagaatttgaattaattaacagtgtaatacttccattagtaatatttgattttatagaccgaaagccgatcatggttatcggctttgaggaagtgcctgggattgattcacttattgattcaggtatggaagttgttttgttagatggtttaagcgatctgctactggttgaaaaactgatgccattgtttgattaa

SEQ ID NO: 377799 - DNA, 834 bp, Salmonella enterica
atggaacaaataaaactacacaaagatagtaatgtttcaataatcgttattccaaatcatttactcaaaaatatcggatgggatgatggtacgttattggatgtggtaaaatcagataatgcacttcatattagaagaaaggaagacgtaccttgcgtggatatgttaacagttacggttaaaaatattaaacctggaaaaattataaagtataatagcaagctgaatgaaagtcttaataagctccacgtctcagcaaggagagtcttttttatttgtttgtatctttattttaatggtaggtataactcagatgggtctattttaatcagagctgataagtatgctgaatttattggtatagatcgcacaatggcatacaaacagatgaaagacgcagcagattatttttcttccaatataaaattaatatctctttgtgattatataaaaaatgaagggctgttaagagtagctctttctactgagacaataaattttatttctgctgtagatggtagaaaaaatcaaactacagttgtattgtatcagtctgctgtaaaactcagtggtcgatattcatggaatttatatcagttgataaaatctcggctgttagataaatccggtgcttttagcattaaactggatgaattaatgattgaattgaactctagagtaaatttggaatttaaagattataaaaaatcagttattggtcggtctatagacgaaattgtagaaaaaacagaaattaaaagtattaaatgcgttaatgctgagaggcagggtagaagagtcagcaaagtccgttttgagatcgaaatgaggtaa

SEQ ID NO: 377800 - DNA, 285 bp, Salmonella enterica
atgaaaaagtcttttgttttgattggtacactcagtattttttcccttgtcggatgtgaggaaaccaaatctgttgattggtggttggagcatcatgaagaatcattgaaaaaagaagctgagtgtaagaaaaccggaagtgacagccagaattgtcgaaatgtcaaagaagctaatttccgttatcaacaacttcatgccaaagaactaaattttaaagagtattttaaaaaatataaagatgcttctaatcatgaagaaaaaggtgatatgcctaaaaaataa

SEQ ID NO: 377801 - DNA, 1062 bp, Salmonella enterica
atggctgaagcaagtaatttttttgtcacagcaaaagaagagatcctctcggttctcgatgcttcggtttctggtcagttaacaagtttaagtaatatagcaggcaccctaggacgctatggggtgtccatctatgtgttatggtatgcttttactgttctggctagaaaacagcaaacacctgtgcctgattttatctggaacttgtgcaggttttctataattttaatgtttgtacaaaatgcaggtgggtggctaaatacttccctagtagcaatagatggtttaaaggattcattatctggtaataatgatgcttggttatggttagatcagttatggacgaaagtacaacaggttgctgcgcatgttatgtctaaggatacttcaacttatgtaaaaacagatggcgctatagctgctctttttacttattttggtgggatattagcattagttgcatgtgctatagtttttcttgctgcggaagtaaccctgaaattattgactgtcactgcacctgttttcatcttttgcctgatgtttggttttttgagacaaatgtttaatagctggttgcagcttattttcagttcatgcttaatatttatgttcggttcattagcgttaagagccggaacatcatttctcaatatagttttatctctggcaataggcacggtagacaaccgtaatctaattaagattggcgctactgcggctgttgctggcattttcatggcctggattatctggcaggcgaaaagttatgcttcacagattgcaggtgtgggtgttgaaggtgccatgcagggcgcagccgctatggggattggtgctggcgttttcggtgcatcccgtatggcgcgtggcacacttggtatgggcagaaatgccggtattggtgcatggaaaggtctgcgtcgtcaggaaggcgggtttggtcagtctccgggaataacgggtaagacagctaacctggccggacagggtgttaatcttggtgccaaaaagcttcgtcaggcagctattgagagagcaaagaaaatgtatggtgggtaa

SEQ ID NO: 377802 - DNA, 237 bp, Salmonella enterica
atgaaaatgaataaaggagcgttaattatggcgcttctgatggcggcgcacgtctgtcatgcagctgttcttccttcaggcagtcgctttgacccacgcaatcagatagtcagttataaccccaataataccaccataattaacagtgccgttggatacaccaccacactggtatttgatgaagatgaaaacagttatcagtgccagaactggttttccgcagggatgggcggttaa

SEQ ID NO: 377803 - DNA, 303 bp, Salmonella enterica
atgaaaaggatatgcaaaggtctaatcgtaatttttactgtgtcctggctgacagcgccagcgtatgccgctgatccctgtaaatctgttttttgtctttatggtaaagctgtcggtagaagtggagggagtgagtgcagtagtgccgaaaaggatttttttaacaaaattgaaaagaaaaagggaaaaatacgctggagtaaaacatttaatctccgtaagaattttttaaatcagtgttcaacggcagacccggctgcaatcttactgatcatgagtaagtttggtcgcgtcagaggttag

SEQ ID NO: 377804 - DNA, 543 bp, Salmonella enterica
atgtctacaatggaagtgattaaaaccatgtcagaaataaaagatttggttgataacattgacacctttgttcctcaaggtgcacctaaaaataattactttcgctctgacttgtctggattactcgttgtatcattagccgcaacgtatgaaaattgcgtaaaagatattattattgagcacgcagaaaactatcatccagcatttggtcgatatgcggaaaaacagtacgaaagactaaacagccgagttaatttaaatgatctgtatggatacgctaaaaaattaggccaacatcttaagctgcagtttaatcaagagttgttaaaagctgagagacgtattacgaggaatccagcgatggatgataatggaacgccaagatacaataagtttcagatcgtcaaagagtaccatcgcctacttgactctcgacatgcatttgctcatgcaaggcaaacgagcattaccattcaagaagcatacaggatgcaccgatatgcccgttttgtaatcctggctttctcgcgggcattagcgtga

SEQ ID NO: 377805 - DNA, 1098 bp, Salmonella enterica
atgagtgaagatttaactaaaaaagatgttgacgatgaaattctaatggaggaagagtctgatgatactccatttgttgaatttgatatatctgtatcaccgtcagacccaactttagaattattagtcaatcaaataaatcgtaaggatattgtaattcctttttatcagcgccgttatgtttggaaaattgagcaagcgtctcgccttattgaatcctttttgatggggcttcctgttcctcaaatatttctatatataaatgatgatgatcaaatggaagttattgatggtcagcagcgggttctttcagttaaatattttatggaaggatactttggcgatgctgatgataaaggacgtcgtcaagtctttaaattaaaaggattatctgaacgttcagcgtataacggtaaaagctttgatgatttaccgttaaaagaacaacgtaaattaagaaattctacattacgagctattaatattaagcaattaaagcccagcaatcgtaatgatagcgttttccatatttttgaacgcttaaacaccggaggtacacagcttaaacctcaggaaataagaaatgcagtttatcgaggtgaaatagtaaacaaactacaagaacttaataatgcagatggttggatgaatatacttgggttaaagaaaaaagacaaaaaccagaaagatgttgagttggtgttaaggcttctttctttatataagcggcatgctgaatacgaaaaaccaatgcttaaattccttaactgttcgatgaaggatgaatcttcctttaatagtgagcgggctatcgaattttcagtaaggtttcctctggttgtagctcgtatatccaggctaattcagcggcctttcaggcctaaaggggtgttgaattcggcttctttagaggctgtaatgttagctttgatggagagtgaacttgatatatcagatgctgaactgacagaaagataccatcgagtaatgaataatgaagagtttcagaggctaatctcaggtagtacaacagatgctttagttttgaaaggtaggattgatgtggccaaacgtataatggacggtggtgttttataa

SEQ ID NO: 377806 - DNA, 648 bp, Salmonella enterica
atgctttcttcactgatggatagcaatcatttgactgcatcagaattggcttacctatcggggttatctgcgcaatcaacaagtaatcacttatcgaaattattatatttcaaagttgttacttttgagaaggttggacgaaataggtactatcgcttatacaaccaacttgttgcgcaggctattgagtcaatgatggcagcaacttatactgatcttgctcttcaacagcggcgtaagcctgcaggattcaaaaaactatgttatgcacggacatgctatgatcacattgctgggcatgttggtgtatctattcttgaaagcttgtcgaaacaacagatcttgattactgaacgagatcacctagaaattagcgaaaaaggctatcaatggtttataaaggaactggacattgatatccgttctgttcccccatcccgaagagcgttggtaattccttgcatggactggagcgaacagagctaccacttgtcaggcgaattagggtctatattgcttcggtgtatgcttgataggcgatatataacaaaggctgatgaatatcgaactttaaccatcaccacttcaggtttgcggtttcttcaacaggcgttagagatcggtgggctgttggaaccacatgaatag

SEQ ID NO: 377807 - DNA, 876 bp, Salmonella enterica
gtgaacattctgcccgttgtatccaccaaaggtggcgaaggaaaatcaacccagtctgctaatcttgccggttttctggcggatgctggtctccgtactctgctgatagacggagaccatgcccagcccacggcaagtaatatctttccgctgacgtatgaagcgccggccggtctttttgaattactgatgcgcacggctgacctcagtcatcccgacaacatcatctcccgcacggctatcgacggccttgacctgatagtctccaatgacccccatgaacaactgaaaacggccatgcttcatgcgccggatggtcgtctccgtctgcgtaatgtgctccagcatccgcttttccagagctatgacgtcattgtggtggattcacagggcgcgcgttccgtcatgctggaaatgattgtgctgtctgccacggagtctgtggtggggatggtgaatccggttctgccggatgtacgtgagttcattcgtggcacagtcaacgtcatggaaaacctgttgccctaccgtgaactgggtatccccctgccgaaagtccgcaccctggttaactgcatggattatacggcgctggccagacaaacactggcggagctgaccgacattattaactcaggtcgctacagcaaagtgcttccggaaggcgcggtcaccctgctttcaacacagatttatgacctgaatatttacaaacagggacacgcagccggtcagccggtgcaccgtcttgaaaaagcgtctgcccgtcgcagtgattctgcgctggtcaccatgcacagcctggcctgtgagttgttgccggagtggagtgagttttttgatgtactgctggaaaacggaggtgaaagcctgtga

SEQ ID NO: 377808 - DNA, 390 bp, Salmonella enterica
gtgaacagaaaactgatatggcgcgctgtggcttcagcttcagtttcctgccccggacacgatgaagtgcatgtgtttgttgaggctgcagattacgaagaagcgaaaaaacatttgtatgaccgtctggaggaggaatggcagcttcctgtgagccacataactttccacaacgtgtggaatgaaaacgagctatgtgaaatgtctgcaggtccgaaggcaccttcaggccttcccctgcttgagtcgggtgggggaaatggtgaggtcttttatgaccataatccgctgctcctcattgcttctcagcgtctcagggctgtgattgaaggggcgctgagtgtcctgccagagcgtggtgaacaggatgagtgtggtcgtggaatttaa

SEQ ID NO: 377809 - DNA, 258 bp, Salmonella enterica
gtggtcgtggaatttaagtctctgacaggtcgcagccagacagtatgtgtcgggtgtggttattccggtgttcggtttggtgatgctgcaggccaggacacccggcagtgggtgaaggtgaatcatgagagcgggctggggctgtgctccggctgtgatgcatttcttttgcaggaacgcctgcgtcgtcagcggcatgacccgcttttttcatgtggtgtttccggcaaacatcgaaaaacagagggggcgatatga

SEQ ID NO: 377810 - DNA, 429 bp, Salmonella enterica
atgaatacaaatcatcaacaactgccgtccggcattgattacttcgctgcgttcagtctgccggaaggtgaaaatacgctcatcaacatgtctgaggagttctggcgtatggcctgtaacacaacgaatgaaacttacaaccggcacaaactgtatcgcctgcagtggccgggtgactggctggcggttcagcagggactgaaaaacatcaataaaaatgtggcaccacttaatatcctgcacagctacctcattattcgcgacaaccgctctgcggccgatgttgctgccatgacagcaacagaaatggaacaggctcttgctgctgaactggaggcatatgcatccaccccgggagcacaggacgtgttgcgcaacgcagaaagacgtctggataagctggatgacccgttcacgggtaaaggctga

SEQ ID NO: 377811 - DNA, 498 bp, Salmonella enterica
atgaaccgtaatccgtctgaaaatctgtctgaaaacacgtcccgtcagttcctgtccctggcctcgccagcagaggctgcatgccatgcactgcttcgtttcattgaacgtgagattcttgagaaaaatgcgcctgaagagcaggtccgggaacgttgcagggtattcaccacactgcttaatgagggatttactgccctgtctgataaggcagggcagaatttagctgacctccgggaacagtgccggcaactggagcatcacatcaccagacttggagatgaatgcaacgatgttaatcgcagaagcgcagagattacccgcaacatcaatcgggctttcgatatgaacatagcgcttgatattgccagtcggtcatgtaattcaaagccttctggttcgtccagtactcactccagtagtccgtcagggcaagagacatctcagcaggcgtcatctgctcaaccgttgcggggagccagtgatgctgatgaataa

SEQ ID NO: 377812 - DNA, 453 bp, Salmonella enterica
atgaatacagaaaaacaactgccgtccggcattgataacaactgtccttatgtcactgacagcaatgaaaaatactttgaagactggaaagccggacgcatgaaacccgacgatgtggaacgttgtaaaaccttctttgaccagggaactgaaatctttcccggcgcagaccataagctcgcttaccgactctgctggctcgggcactggctgattcacagccgccactggtttttccgggatgatagcctcaccagcattccggaagctgttaagtttgcgcttattcatcagcatcactggctccccgcaacggttgagcagatgacgcctgctgagatgtctcttgccctgacggactactggagtgagtactggacgaaccagaaggctttgaattacatgaccgactggcaatatcaagcgctatgttcatatcgaaagcccgattga

SEQ ID NO: 377813 - DNA, 903 bp, Salmonella enterica
atgtcttcctcagtgaaatattctccggttccggcggtcttaacccgccctgaatcgctggctgaactgaacctgctgatgacccggattgccagtgggtgccgtgtggggcttccggcgtcaggtcgtccggtcattgcggtgcatggtggttatgtttcatacagttctccacgcgccggacatgtttttcaggacggttcccgcccggagacagtgatgaccgtcagtaaccgggaacggatgtgtgaatggttcagtcaggtctggcttccgttgcatctggctgcccttgaaggcgatgagaacgcttttttcagtgcggaggtcaacatggtgcgccgggagctgcagcgcgttccgggggattcagtgaactgcatgtgctgggcaagccttgctgcactggcatttgatgctgaagagcgggtggaactgcagaaaggcaataatgagaacatcgcaacatatgatgagagcatctcgacatatgcattccgtgctgcctgtactgtgagtcgctgtctgagccggaatgcttccggaggtattccgcgctcataccctgaatggaaagcgattttgtttccccgtgatggtgctgacattttccccgacgggtggctggaaaatatgacccgtcgggctgaacgtgtttttacgagtgcgaaacgtcagtgtggaatgctctcagccagtcagccagcgcttttttctcaacaaacacgtcagtgtgccagtgagcaatgcaccggccgtattcaggccggccggcatcattcagggagccaccctgacgtttcagtttatgcagaacgctgtgcacaagaaatgtctctttcaccggtccatccggcccgacagtgtccagttcaatccactgattctgctgaaacggagtaa

SEQ ID NO: 377814 - DNA, 1368 bp, Salmonella enterica
atggctgaaatgtcagttctctgtgcatacgaagcagagcaggccgttctgggcggtctgatgctggagaatgaacgctgggatgaagtggtgctgatgctgagtcctgacgatttttatgtggctccgcaccgggccatcttccgtgccatgtctgaactggcggtgaatggtcagcctctggacctgattacactgtcagagcatctggaacatcagggcaggctggacgtcctgggtggttttgcttatctggccgagctcagcaagaacacaccttctgcggccaacatcatggcctatgcaggcattgtggtggagaaaagcgttctgcgtcagttacaggccaccggaaacaccctgattgctgatgtggcggcaccgaacgccacatcacgggacgtgctggatgctgcagagcggcgtctgtttgctcttgcgcagaacaggacgctccgggagcgcacggaagcctctctttcatccgcgctcgatactgttctgcagcaactggaaagtgtgctcggctccggtggtgtgaccggtacccccacgggatttgactgtctggatgaaatgacctgtggcctgcagcccggcgacctggtcctgctggctgcccgtccgtcaatggggaaaacttctctggcgttgtccatgtgtctcagtgccgcccggcgacggacagaagagagcgttctggtattcagcattgagatgccgaaggagcaactgattctgcgcatgctttccatgctggggcgtgtggagctgaatcatttgcgcagtggcaacatggatgatgaggactgggcgagggtgtcatctgcggttggcatggcgctgggtgacggaggcatggatacgctgggtgagcgcctgataattgatgactgcagccagcagacaccgtcatcgctgcgtgccagtgcccgccgttatacccgcctgtacggtaaacccgctctgattatggtggattacctgcagctgattcgggcgccggagctggagaaccgcacacaggaaattgctgaaatttcccgttccctgaaagcgctggggaaggagctgggatgcccggtgctggccctctcccagcttaaccgtcaggtggaacagcgtgcagataaacgccccaataacggtgacctgcgtgattccggggcactggagcaggatgctgacctgattatgtttatttaccgcgacgaggtctataactccgattcactggcaaagggggaggctgaaattattgtcagcaagcagcgtcaggggcccacaggcacggtgcgggtcagattcgacggtcgttacacactgtttacgccctctgaaaatgacgggcagggaggatatgcgtga

SEQ ID NO: 377815 - DNA, 1659 bp, Salmonella enterica
atggcacacaagccactgaatctcggggctgccattatgcagcccggtcgtcaggccagtgccgccggtaatgtggtggcgctgggggaaacccccatgattctgacgctggaccagttacgtccgaatccggataatccgcgttatgacgacatcaaaaactccattcacgcccgcgggctggatactgtgcccaaagtcacccgtatgccggacagtgagccggatgtgtatatcttcagtgacgggggaaacacccgttaccagatactgacggaactctggaaagaaacgggggacccgcgtttttaccgtattcatgtactgttcaaaccctggccgggacggcttcagtgtgtgattggtcatctggcggaaaatgaagttcgcggtgaactgacctttattgagaaggcacagggcattcacaaagcacgcctgatttatgaggagtctctgcagcgtcaggtaacgatacgggaactggcgaccttactgactgatgaaggattgcctgtcagccatacctccatcagccggatggagcatgccctgaaatatctgtacccctggatccccgatctgatggagtcggggctgggaagcccgcaagtcagaaatctgcttgcgttacgtcaggacgcagaacgtgtctgggggcagtttgcgctggcgtccggcacggatgcggaatttgaccgtgtgttcggggaaagctgccggaagtttaattcgccggagctgtggtcactggagatgtttcgggatgagctgatcggggatttgttgcaggcgctgccacatccctccctggactacgaccggtggctgctggagctggatccaaaagagcggaaccgtcgtcaccattttggtgagccggaaccggtggtggtgccgccttcagtccgtgacagtggcacagggcagtccggtgcacaggtatcccgtatccggcctgaggtaccggaaatctctgcccctgatactgagcccggacagcatgatgttgcccgaccggagaacgctgtttctgacacaggcctcactgaaaaatgcgggtttccttccccggaggagactgcagacagagcgccttcttctgccgggaaagtccggcgttcagagatgcagccggatatgtacggtggtgagccggtcttcagcggtgatgctgtggacgcggggattgccggggccgctgtgccatccgttatgaccggcgatacagcgccgtccggaacacctgatgcacttcccgcgtctgtgacgcattttgctgaaggacgggatgatatcgagcatctgcagaatgaggccttccggctggcatgggaactggctgagtctgccggctgtgctgaagaaattgccatggacagggaaagtgacctgtcggctggtttcgggactgcagaggagaaatgttcgccggtgacggcatttctgatggggctgaccggtgatgcaccgctgacagtgtctcccgtcagtctgacagacctgctgacaggtggcagtgcgccggaggcatggccactgctggatgatgaacatgccgtgaagctgctgcgtcttctgagtgtgctgcgccgtctgcgcgccctgcagcgtagtgtgttacccgaagatgatgaggaggatgaaagtgatgagtga

SEQ ID NO: 377816 - DNA, 726 bp, Salmonella enterica
atgagtgatatgccgcatcaggagcgtctggtcagacgggtcaggaaactgctggagctgagccgcaataacagcaatgcccatgaggccgggctggcgcttgcaagggcgcaacagctgatggcgaaacacggtatcacggagcaggatgcgggactttcttcggtgcagacgtcttcatcacagggggcaccttctgaggctgaaaaagttccggcgtggatgtttcgtctggtcatggtggtgtcacagacatttggctgcagggcgtattacgactggcggttgatgcccggtggcaggtatcgccggtgtgtgacgttttacggtttcagtgaacgtcctcaggtggcggcttatgcgtttgatgttctgtgccgtcagctgagggacgcaacggatgcgtatctccgtacacagagccggtggctgaaactgagcacccgccgtgcccgggccgcccagttccgtgatggctgggttccgggcgttcgtcaggtggtgatgccattcagtgtgacagaagaggaaagccggctgatgcgtctctggctggagcagcaggcgatggagacggtggccccccgggaggtgaaagcctgtcgcggcggtgacctggtccgctggcaggggtgtgaggccgggaaaaatgccttactgcatcatggtgtggggggaactgtccgccagatggtgccggggctgatgatacgggaggcgtcatga

SEQ ID NO: 377817 - DNA, 579 bp, Salmonella enterica
atgaataacagcttatctcaggcaaccaacggtctgctgatgcaactggtgatggacctcaaaagcggctacctgcgtcgttgtgaatctctgggactggcccgggaagaaatgcagatgctgcagggactgaccattgaggaaatccattacctgtcgaactcggaagtgtcggttatccggctggacattaatcatgaaaacctgctgcgtatgctgcagcaggcccggacggagcagaaacgtctgcagcgcattgaccgtgcactggcgctgggtggctccattgagctgatggcgttttactttggactttccagtgtggatgttgcggcgcgccggcgcattgccggtattgatgttcggccgggacgtggtgtcatgctgagcgatgaggaaagtgcagagctgtggcgtttatggcagaaggcgggcatcacggatgtggagagtgcggacggactggatgtcatgatgctggctgcggagcagatgaatatcccgctgacggccatctggcatgcagtaaggggatggtgcgctgaccggcagacggagccggtaaggaatgcgtcatga

SEQ ID NO: 377818 - DNA, 249 bp, Salmonella enterica
atgaaaatgacagaactggcaccgggcattctggccagcccgtgtgtaccgccggcctgctgtcgtaaggcggttcagatggtcagtctgttccggcagggtgtgcgtaattaccggcaactgaatgaccgggggacccgttattacaagataaacgtcggacgcgcctggcgtctgctgagccgtaaccggggagagacctgggaactgctcagtcatgagcgttacaactgcgccagacgtaaatga

SEQ ID NO: 377819 - DNA, 276 bp, Salmonella enterica
atgaatgagcttagctggaaagcgttgagtaaggcggtaaaacgatatcaggatgtgctgtcgtggagtcgttcagacagacacagtccgggcgctgagcgggaattagctgctgcagccggaaatatcaggaaggccattggtgatcaggaaattgacgtgattgtggaactggtgacggaactggaagatgcagaatggagaattacagtatacggcttcctcttattattgacgtgggcattaatcgccctgtacatcctgtttttccggtga

SEQ ID NO: 377820 - DNA, 429 bp, Salmonella enterica
atgaacagtattcattatcaggcactgcgtgaggcagcgcaaaactatcagtcgatgctggcgtggtatgaggctatcccggatagtccagacgccgaggttaattgtgatgaagctttggctgcgtttaagcgtcaaattcgtcacagggaagtggatattatcgccgatctgctggatgaactggaagccgcaaaaaagcgtattgcagaactggaggaggagaaagaaacgttgcgtccggttggtgttatgagcaggagagcattttggcggcttgagaatagagagtcacgatttattgcactctggcccggaccgggaatatgcctgctgcgtaaacgtcctgatgacggcgttattgtttacgccagaaccgacgccggcattggcgtgaagcagcaaaatgacacagggattaaggattaa

SEQ ID NO: 377821 - DNA, 1245 bp, Salmonella enterica
atggcgttacctgcggaaagcctgattgcgtataccctggaaaaaatgaagtaccgtatggccaccggagcccggaaggaggaggggcgaatacgcagcggactgttgttcaccggcaatgtgcacgatgccattccgcgtcgtctgttgctggatacgcgtctttcaccgctggataaggtggcatggatgatgatccggctgtatgcgcagaataatgagggggccatttttcctacttacgatgaactgcaactgcagctggcatcgccgggaaagggaaaagcctccagagaaaccgtcagccgggtattactgatgttgcggatcacgggctggctgagcctgtgtaaacgggttcgtgatgataaaggccgggttcggggaaacatttacgcccagcatgacgagcccctgacgttctgcgatgcagaggcgatggatccacgttatctggatatggtggtagaagcctgtatgagccggaaccggaccatcagtcagacggcacgggatattctgggggaaataaaaaatgatccgggaatgcgtcactatcgcagccatatcagtcagctggaaacccggataggaagtgcccagacaccggggcagatggctgcccgtcagcgggtgacggagggcagaatgcagccgggttcggaaaccgaaccggtggtggaaacactgagttcggcaccggaaaatctgagttcggtttccgaatcgggtaaaaaaatggggcaagaaagacagagttcggatcccgaaccatcaggaaaatcagcaggttatcacagagtccggaaaccgaacaattacgtacgtaatatcacacacagtgtgattaaaaacacgtacgtactgccggcgtcgctgacggggcaaatcagggaggaggatgccattatgctgaccagtcagttgcaggcgttgccggaagcgctggcacagggggtgctggaaagtctgtctgggatgctgggcagtcagtcactgcagaacccggtgggctggctgcttgcggtgctgaagcgtgcccgggagggaaatttttatccgccgaaacagaaacagtgcgtcgctgcatcagccaccacacgggcgggagaaggagagcgctccacttcgcaacctgttgtcacccggaaacgtacagaacctatttcagcagaacgtctgagcggcattgtggcagggctgcgggcctccctgcgtaaccgttccgcgataagagtccggtga

SEQ ID NO: 377822 - DNA, 747 bp, Salmonella enterica
atgaccaaaattaaaattctggcactcagtatgctgaccgctatatcggtgaacacagcttatgctgaaagcactctgacactgggggccggtgtcggcgtgattgatcagccttataaaggttacgactcaaaagcctggcttatcccggcagtgtcttatgacggcgacagcttctggttccgtggtctgggcggtggatattacctctggaacgatgctgcagatactctgtcggtgatggcctactggtcgccgatgtatttcaaaccggatgacagcaatgatcatcagttacgccgccttgataaacgtaaaagcacgatgatggccggggtgtcctggtcccatcacacgccgtatggttttctgcgaatgagtctggcggcggatgttctggataacagtaatggcgttgttggtgatgtggcgtggttataccgttatgtgaatggcggattcaccctgacaccgggtattggtgtggcgtggagcagccagaaacagaacgactattattatggcgtatcgcgtcgtgaatctgcgcgcagcggtctggagcggtataaagcggataatggctggtcaccttaccttgaagtcagtgcaaattacacctttgccagcaactgggggatctacggaaccgcacgttacagccgcttatctgatgaagttaaaaactctcccatggtggataagtcatgggatggactgttttccaccgggatcacttatcgtttctga

SEQ ID NO: 377823 - DNA, 693 bp, Salmonella enterica
atgagtgaagataaactgaaccagaaagaagtgcgggccggcgcattgcagtcctcgctgtccattctgttacatacccactatgccatccgcctgtgggaagggcgcaaaacggagaaggtttccggtgacggtaaaccccgtccgggtatcatcagcatgcctcaggtcattgcccgggcagggcaggcaacccgggatgcggagcgtgataatccctgggcggatatgctgctggtcaggctggaggaggcgttatcgcaggcatcggagcagatccgccagcaggtcgccggactggaggcggtgctgaacaatattcccggcaatatcgtgatctcagatattgcatcatcttcgcccgtgaacattggtgttttcagcagttctccgctggggtatcgctgtgtctggctgcttgtggggtatgacgaactggtcatgaaagcgtttcatgcctttcactacgggctgatttcgcgggcgcagcgggacaacatactggataccggaggacacgctgtccgtaaggtgtatggcgtggcacagtcctataaaacggttcatgccacccggcaggatattttatccggcacggagaagggcagggtggctgtcagccgttttggcaaacctgatccggatgtcatgagtggtaaaaaacgctctgttttttctccgcctctgaaataa

SEQ ID NO: 377824 - DNA, 2010 bp, Salmonella enterica
atgcaactctatttgtgtgaaaaaccgtcacaggcgcgggatattgcccgggtgctgggactcagcgggcggggagagggctgtattgaaggtgatactgtcacggtcacctgggctgtggggcatctgctggagctggccgccccggaagcgtacggggagcagttcggggttccctggcgtatggagtcgcttcccgttctgccagaaaactggcagatgacggttaaaccgcagacgaaatcccagtttacggtgatcagccgcctgctgaagcgtgcgtctgaagtggtgatcgccacggatgcggacagggaaggagaagtcatcgcccgggaactgctggcgtactgccggtaccgtgggccagtccgccggctgtggctgtcagccctggatgaggccagcgtccgggaggcgctggcaaatattctgcccggtgagcagacggcccgtctgtatgatgccggcctggcccgtggtcaggctgactggctgatcgggatgaacctgacgcgtctgtatacccttaaagcccgggcgtcggggatcccggatgtgttatccgtcggaagggtacagacgccgacacttgccatggtggtcagacgggatcaggagattgccagttttgtaccacgcccctggtggcaggtgtttgtcgggctggagaacgacgggatccggttccgggccgtctgggtggcggcagagcagtactgcgatgaagagaaacggtgcgtgaacgttcaggcggcccgggccgttcttcagttgtgtcagcagacaccgtcagcggtggtgcatgaggtgacccggaagcgtgaaaaagcaccggctccgctctgtttttcgctggggacactgcaggaggcctgctcccggaaatttggtatgggggcgcagactgtgctgaatatcgcgcagtccctgtatgagacgcacaaagccacgacgtatccccggacggactgtggctatctgcctgaatccatgcaacaggaaagccgggaggtactggcggcaatggcgcgctcagatcctgccctgacgccggttctggcacagctcgatcccggttttgtttcacgtatctggaatgacaaaaaaattacggcacaccatgccatcatcccgacccggcaggtctttgatatcagggcactgagtgaagatgagctgaaggtatatctgctcattcgccagcattatctggcccagtttctgcccctgcaggagtctgatattaccgatgcaacactgacactcggcgggcaacggttcagggcccgcgggaaagtgaatgtggtgacgggctggcgaggcctgttttccggggaagcagcagaagatgctgaaggcgaagatgaacaaacgacggaaatggcgttgccggcgcttgaacggggtgaacactgccggattagcggttcagaactgaaggaccggatgacgtcacctccggccccttttacggaagggaccctgattgccgccatgaaaaatgctgccagtcaggtcagtgatccgaagctgaaaaaagtgctgagggagaatgccggtctggggacggaggccacgcgggccggtgtgctggaggtgttatttgtccggcagtatctggagaagagcgggaagaatatccggtcaacgcaacggggcagggaactgacggccgccctgccggaagccctgaccagcccgggaatgacggcgctgtgggagcaggctctggatgatatagcacagggcagaatgtcgctggatacctttatggacagacagcagcagtgggtgcgtcatctggtctcatccgggcgggaacagcccttcagtatgacggttccggtgacgccgccgtgcccgctttgtcaggggccgacccggcagcgaaagggaaagcacgggctgttcatgagctgtcagcggtatcctgagtgtaagggcgtggtgaacacgcagaaaaaggccgggcggcgaaaaaaatcgggaaaaactaaaacagagtaa

SEQ ID NO: 377825 - DNA, 456 bp, Salmonella enterica
atgtctgtaaatactgccaaaactgaatactttaatctgaccctgaaaggtctggggtatctcagtaatgtacgtcaggtgaatcaccagaacggctcgtttctcagctgtgtggtgaatgcgctgagcggacccacggacagcccgtcctacgtccgttttgatgtcacggttgccggtaaagaggcgaccgccctgattgcccgctgccagaaggcggtggatgaagatcgcaaggtgctgcttggcttcacgctgagcaacctgtccactgacattttcaccctgaacaagggagagcatgccggtgagcaacgcgtcagcctgaaggcccgcctgatcaaggtggactggatcaagataggccaggagatggtttacaaggctgaaaaatcagactccctgccgccacaaaacggcaccatgcaacagcaatacgcagaaaactctttctga

SEQ ID NO: 377826 - DNA, 204 bp, Salmonella enterica
atgcaacagtcaaatggcattctggccgcacaggccggttatacgttaccccttcaggttctcagcagcgtacgtggttattatattggtactcagtgtgatgagggaccggtgtcccgcgaatccatggagtattacaggaaccatgagcaggcggcacaggcgctggaaaacggcacctggacgcagcggacgtgtgcgtga

SEQ ID NO: 377827 - DNA, 537 bp, Salmonella enterica
atggcgtcacgcggtattaataaggtgatactgataggacatcttggacaggacccggaactccgttacttccccaatggcggcggagctgtggcgaacctgactttggccaccagtgaatcctggcgtgataaacaaagcggtgaaatgaaggagcagaccgagtggcaccgcgtggtgattttcggaaaactggcggagattgccggtgaatacctgcgtaaggggtcacaggtatacatcgagggccagttaaggacccggaagtggttcgatcagcagaatggtgttgatcgctacgcaacggaggtggtggtgagtgtcaacggcaccctgcagatgctgggctctccgcgccagcagggcagcggtgccgcacccgcacacagcggtcagggaactgccggggcgccggcgggtaactcaccgtcaccggcttccgggaacggcgggggaatgccgatggattttgacgacgacattcctttcagtggaccgggatatggcgctgaacggcggattatccatgccatgtaa

SEQ ID NO: 377828 - DNA, 897 bp, Salmonella enterica
gtgagtgaaaaaaatcataccacccccacgccacacgatgcggcgttcagggcgatgatggaaaccccttcggttgcaagggattttctggaggctgcgttgccgccagcacagttacagcggtgcgatatgaacaccctgaagctggagtcggccacgtttgtggatccggatctgcgtcagtttgccagtgacgttctgtggagcatgaaaaccaccgatggccgtgatggttacatctacgcgctgacggaacatcagagctctgcggatcgttttatggccctgcgcatgatgcattatgtgctggcgataatgtatcgccacctgaaaacgcataatcgggctcccattgtgatcccggtgcttttttatcacggtgaacccagtccgtatccgtacagtctgaactggctggactgtctggacgatccggcgtttggtcgtgagctttacggcgaaggaaagccgccccgcgttattgatgttggtcttcttgatgatgagggtatccgctgctatcagcagatggctgccctgatgcttctgatgaaggtccgtcagcggaagggcgatctgatgacgcagcttgactttctgtcacagttgcttcagatacagggaacacacgatcaggtggtggttctgttaaactatatggtgaaggcgtgcgattcggcttcaccggaatttatacgggcgatggcagaacatctgccccggtatgaggatgatattatgactatcgctgaacgacttcgtcaggaagagagagaaaaggcgcttgagaagatgcttgaggcagcccgtcggatgcagaagatggggatgtcgcctgagagtattcaggagatcctgcagctttctgatgaagagctgcagaaagcgctcggttaa

SEQ ID NO: 377829 - DNA, 651 bp, Salmonella enterica
atggttgattgtaaagaaaatgcgtatatggacgggatgcgtgatgcggaactggcggttgcatggaaattacttatgtgcagatgcttttccaccatgtccattgaaatactttcgaatgccagcccgggggattttcttatgcttctgatgacgagacataaacaggaaatcgcatgggcattgcagaatgagaatttttcggaagagaaaatttgccatattgcacaaatttcaccagcggaaataaacgcgccttacagaccgcggtatacccggaaacaatacatgagagaagttgctaccaggttgcgtgaggagggcgtatcacggcctgatatctgcaggatgaccacgctgggggcagagttactgtcggatgataactggcaatgttatgaggaacattatgctaaaggatacacggatgcactatatgaaaccgtatggcgaatggataaagcgaaatattgcaccagtactgtccatcagattacagggttatcgttgcaggagattggtcgtgtgctgagtcaatgtgaatttttgtgtcgggcgcgccaactggcaaaaaatgatgatgatttcgaagcgtttaaatcggcctgtgaattatcagatagtgttattagtactgtgcttcgggggtga

SEQ ID NO: 377830 - DNA, 603 bp, Salmonella enterica
atgaagatgcaacccgggatcttattttccctggttaccctggccctgctggccgggtgtaacagcccacaaaaacttcagcaacgtgcgccggccatgccggtaccttccgtcagcgtttcccgcaatgtgcagccggtgtcacaggatatttatgcgcagccggcaccggaagtggtgcgttacgaccgttacctgctggtcagcacggcaccacaggccgcacagcgtgacccgctttcccaggtgattgatatccgtattccggcgtcgttaaagcccaccgtggccgatgccatgcgttatgccctgaaacagtccggttacacgctgtgtgccaccgggccggccaatggtgtgctgtaccgccagcccctgcccgccgtgcagtatcagcagggaccggtacgactgcgtacggccctgcaggtgatggcgggaccggcctggcaactggaagtggacgatgttcagcgggtggtctgccacagtctgcgggaggggtatcagttaccggcaggccagctggcaccggtgccggcttctccggcaatcacggctccggtggcacaaccggctaagggaggcttcctgaaaaaatga

SEQ ID NO: 377831 - DNA, 774 bp, Salmonella enterica
atgagcgaacaacaggagatgatgacacccgttccggcagataaacccacaacacgccggtgttcacttctgcggggcgtggcagtgagttccctgattctgctggttatggtgacgggcgtggcgctgtatctgacagggcgcggcatgctggcgatggatacccgtctggcaacactggaacaacagcagcgggagcgtctgacaccagcggcgctggccccgttgcagtcacgactgagtgaactggaggcgaagctgcagacagagagtgcgcgtctggcgcagctggcccggcagcccgttctgacggcgtctcagcagacgcagcttaaggaactgccggcgtcccttgagcagattcaggcggcacagaaggccctttccctgcggctggacatactggcggcactggcagagaagtcacagtcccgggcggttcagtccgaatccccctcggcttccggcaccgggaaaaaggacgtatccggaacgaaagaaccctctccggtggtacagaaaactgcccgccctgcaacggcacgtacaggtatgtcgcgcacctcccgccaggcgccgtttgtgctgaccggcaccgagcgccggggggcgctgtcatatgcggcggtggcaccccggggatataccagtctgtcgcaggtggcactgctcggggaaggtgagagtgtggccggctggacactgattcatgccggtcatgaacaggcgacgttccgggtaaacggacgtcaggtacaggtcagggtggagtga

SEQ ID NO: 377832 - DNA, 720 bp, Salmonella enterica
atgagactgaaatccctgttactggtgatgctgatacctgtactggtacaggccgcagaccagaacacgaccgggacggacgcgtcccgtacggatacgtcacagcatacgcagagcgccacgcagtcgctgcaacagcaggccgggcggtggggactgagtgaggaggactgggggcgttatcaggcactgatggcgggaccccgcgggatacagtcgccgggtctggacccgctgacagcactgggtattgaggcccgtacaccggctgagcgccgggcgtatgccgaaaagtgggtgaaggaagagtatgcccgtacggagaaggagctggcttttcagcgggaggttgatgcggcatggaagcgtctttatcccggaaagctgccggtcagtatgggcaataccggtgttctggccggggacaccggaggcagactggcgttgtttgtgaaggcgaaggactgtgcgtcctgtgatatccgcctgagtaaggtgctggcatccggtaagccggtggatatttacctggtggacagtcaggggaaagacgggctgcttcgtcagtgggcgcgtgaacacaatatcccaccggagaaggtccgcagccggcatatcaccctgaaccatgatgcggggcgctggctgcgttctggtgagggacagatgccagtggtactgcagcagggggcagacggatggcgcgtggctgcattctga

SEQ ID NO: 377833 - DNA, 651 bp, Salmonella enterica
atggcgcgtggctgcattctgagtcttctgctgatgacgggcatgtgtcaggccgttgcgcagaccattcctgacgggtatgtgcaggtggcccgtgcacacggtattccggcagaagtgctgtatgccgtctccctgacagagaccgccatggctcccggtgatatggccggcgtcatgcagtattcccgccgcgacgggcgtcttccggatgcctcccgtccctggccctggacaattaatgtggccgggaaggggtaccgttatgccagccgtctggaggcctggcaggcactgcaggtgtttctgaaacgttatccggccagacgcattgatgtcgggatagcgcaggtcaatctggggtggaatggtcatcgtttcccgtcaacatgggcggcctttgacccgtacaccagtcttgagacggcggcagtcattctgcaggagtgccgtcagcgccatcccgacagctggctgaaggcagccggttgttatcaccatcctgccggtggaaagccggccgcccgttacaccgccgtggtcagacgtcatctggaccggctgaatgcaaaaagtatgacgtcacagcagacagccatgctggcaccggctgcggattatatctggacagagccccggaggcgcgaatga

SEQ ID NO: 377834 - DNA, 525 bp, Salmonella enterica
atgaacagactgagacggattactttttattttcctgtatggcttttgttttcagcgagcgtcagtgctgaactgacggtgattgctgacctgggcggcagggatgctgctcctttttttgagggtatcaaccggcaggcaccggcttctgctccggttgtttcaccaccgcctcttctgcagggggaagccgcgatgctgccggtcagcacacctgaaatgtcacccggtgaggtgactccacgcccgcttcagctaccgggcatcggtgcacttttccttgtgggggatgatgcgtattcccgcgagtggctgcagaaaaatgctgctgcgctccgggcgcgccatgccgccgggatggtggtgaatgtggctgatgaaaacggcctgcacatgctgcgtgaactggcccccggtgtggcgatggcaccggcatccggttctgcgctggcccgccggttacagctgaagtcttacccggtactgataacggacaaggggctgtcacaggaggtggtgccatga

SEQ ID NO: 377835 - DNA, 480 bp, Salmonella enterica
atgcgcccggacctgccgccatcagcgttaccgcgtcaccgcacccgggtgctggccagactgaagacgctgccgggggatgctcagcgtctgacgtatctgcgcaaaatcaacccgtatgtcttcgaagaactgctgttactagccctgaagcagcaggggatgacggttatccacaatccctgctacagcggtgatggtggtctggacggacaggtggtgattaacggtgagcgctggctgatacaggcaaagcgctacggacggaccatccgcccggcacatattgatgccttcggggaactgttgcgccgggagggctgccggggattttttattcatacaggtcgtacagggtcggccagccgggccaggctgacactgtggccggatatcgaacttgtcagcggtcagcgtctgctgaaactgctgaacggaacattactgacagatgaacttaccaggggggagcggagatga

SEQ ID NO: 377836 - DNA, 513 bp, Salmonella enterica
atgatgacggtaaaacggatgtttatgcttttattcagagtggtgattgtctggccggccatgctgacgggatgcctgatgatgctgtatttcgcagaggttgccagcggtggtgtgacagggctggcgcagcgttatgaggcggagtctgcccgctggcgtgatgcgccggaaggggcggtgatgatgctccggtgtccgtcgcgtccctttgtggtgccggtaacaaccggggagtggcgtgcactgtccgccactgatgcagaatgcacccggacgccgcgctctttcaggcaggctgcagaggcagattttcagtcactgcacatactggcgctgacactgctgctggcatccgtggttctggaaggcatttcggccggcatgttgcgccggaaaaccgcatccgtaccggtatcaccacactgtggatgtggccggggccgtggtgcggttgcacactggcctgaccatgataatgatgaaattccgcagaagggaggtcaggtatga

SEQ ID NO: 377837 - DNA, 789 bp, Salmonella enterica
atgacggcttcactgctggcccgtgtgcaggcaaatgttcctgtctgggcacatgaacagctggctgcatgggatgccgcagagtttgcggcaatgtcggattttattacggaacactactggacgggacagggcagtatcaatgtgtaccgcattgtggggactgaccatccacagtatgccggaatgacctggctggcgctgctggagcgcggtaaacgcatggacatcaatatcccgttactcgaaaagaatccgggatattacacgcaggcagagcaacagcatgccgggatgagttttgtcagcacggatggcattcactggtatgtcagtgctgacggtaatcaccgcagctgtctggcccgctttctgtttcacctgcagggggaggggcgtacacagcttcacaatgtggcccagagtgtttatcacacagaccaggcgttccggtctgcctgtcgggagattcacaacctgacagaaccgttgtcccggcatggtgtgtatcttcgtctgcagacccggcggcagtgtgtttcccgcgaagaccaggcctgctggaaagtggaccgtttcagaacagaggcgcagctgacagtggatgacggtcatgtcggcggacatgacgggccaccggtgtataaggcattactgctgaatgcggcagatgcatggcgggaggtgatggtgttacagcgcagactggaggttctgtcagcgtcaccggagaacgatttgccgcgctcatggtggtggcgtcttttacagagaggtacccggtcatga

SEQ ID NO: 377838 - DNA, 2097 bp, Salmonella enterica
atgagtaaccgttatgtgattgaggccctgctgcgaccggcggtggagctgaacactgccgtggtggcggcaacggcggccggtgtctgtgtgacagcgccctgggcggtggcgctggccccctctgtcagttatgccactgccgccggttttggcgttctggcagcggtccgtttccgccagggaatgaaggtcatccgctaccgtcgcaatctgcggcgtctgccccgttatgtgatgagtacccggcagatacccgtgagccgtcagcgcctttttctggggcggggatttcgctggacacagaaacacacccagcgccttcaggatacgctgcgcccggaggtggccaggtaccttcagccgggctggctgtaccggatggcccgtcagcttgagctgaaaacggagcataccgtcccccgtctgggcgcacttttgcgcaaggactctccgctgaatccggtacgccctctgccgccggtgggcgggaatccggcactgcatggtattgaaccggatgaacaggatgtgacgctggcgctgggagagcgggtgggacacaccattgtttatggtaccacccgtgtcggtaaaacccggctggcagagctgctggtcacacaggatatccgccggggagaggtcaccattgtctttgaccccaaaggggatgctgacctgttgctgcgtgtatgggcagaagcacaccgtgccggcaggggcgatgagctgtatatctttcatctgggctggccggaaatctctgcgcgttataacgcagtggggcgttttggccgggtatcggaggtggccacccgtgtggcgggacagttgtccggtgaaggcaacagtgctgctttccgggagtttgcctggcgttttgtcaatatcattgcccgcgccctggtggcgctgggagaacgcccggattacacgctgattatgcgctatgtgaacaatattgctgacctctatattcgctatgccggaaaggtggtcagtgaacagatgccggaactggaaagcgccattctgaataacatgaatgtgctgggtgaggatgatgtgccccggaccatgcagaaccagccggatgctgtgcgtatctgggctattgaggtggcgctcagcagtgaagccgggaagaaactttatgacccgatactggatggtctgcgaagtgccgtacgttatgaccggacctatttcgataaaatcgtggcctccctgctgccgttactggaaaaactgaccacaggaaagacggcagagctgctggcaccggactacctggatatgagcgatacccgtcccgtgtttgactgggagcaggtgatacgtaaaaaggcggtggtgtatatcggtcttgatgcgctcagtgacagtgaggtggccagtgccgtgggaaactccatgtttgcagacctggtgagtgtggccggacatatctacaaacacggtatgaatgccggattgcccggtgccggggagagtaaaaatgtggtcaacctgcactgtgatgagttcaacgaactgatgggcgatgaatttattccgcttatcaacaagggcggtggtgccggtatgcaggtgacggcgtatacccagacgtcttcggatattgaagcccgcatcggtaatgcggctaaaactgcccaggtacagggtaacttcaataacatgattatgctgcgcgtcagggagaaccggacggcagagctgctgaccagtcagctgcctcaggtggagatttacaccaaaacactggtgtcggggcatcaggataccgccgatgtgacgtccggccaggatttcacctccagtacccaggaccgcgttggcacagtaaaggtacccttactggagccggcggatatcgtcaccctgccaaaggggcaggcatttgccctgctggaaggtggacagttgtggaaaatccggatgccgctgccggcgtcagagaaggacgatgcgctgatgccggagagtattgcaaaagtggctgaagccatgcggcgtcattaccacaccggagagggatggtggcatgaagccccggccgtgaatgtgccggaaggagacggacatggctga

SEQ ID NO: 377839 - DNA, 753 bp, Salmonella enterica
atggctgattcccgtcgtgatgtgaatcgccctgacaccgcacaaccgccacgccggcacgggctgctgtataacctgctgtggggctggccgtgggcactggccgggatggtgctctcctccctgttgctgagcctgctggttgagtacgtgggtattacgtttttctggcccgggcagggggccgggcacagtgaagcggtcatgaacaccgagctgggctggttatcctcggaatttacccgcagtctgctgctgtccacgccgtcagtgacggtgatgaagtgggtgtccacggcgtaccagtggctgtttgtggacagcggatttatggcctggatgaagcagggagcttcggccgataacagtgtgatacaggaagtggataccctgggccgctggctggcgcataacctgcatgattacctgatggccacggtatatgtgacggtggtgacgctggtccgggtgacgattctggcactgtcagtgcccctgtttgtgatggtggctctggtggctgtggtggaaggtctgggaagacgtgacctgcgccggtacggtgctgcgtatgaatccagttttgtttatcaccatgccagaaagtccattaaaccggcgatatacattccctgtattctttatatgtcctggcccacggcggtatacccgaacctgctgatatggccggcggccatgcttctgggagttgccatcaccgtgaccatggcatccttcaagaagtatttataa

SEQ ID NO: 377840 - DNA, 951 bp, Salmonella enterica
atgctgatttctcgttgcctttttctgacagccttttttgtcagttttggtgtaaaagcaagcacaatttgtgttggttattatgtcgggaataatgttgggtttacaagctcttttgtgggggaccagtttaacaaggtaaatattaaaacccatgggcgatggaatggtggtggtcagaattctctttataagtctttgcgaaattttgccggtttctcttcctattccgttgctgtccctaaacaaatatcactgcctggttcttcagtacagttgacgctgacattatctggtaatgtcattacagttcccacagataacagatggcaggctgtttttgttcagcaaacaaatgaaggatgtgccgttaatacacagggagtctggcaacagattcatgccggtattcgggccgggcaggtaaatatagccttatcaggcaacgggcttccttcgggacgatatcagctggatgtaccctatatactggcatggggctcctcaacggatggtaatgcaaacagggattttcaggatacatggaaagcgggaaatgtcgggacgagtaatgtgaccggatatttttctcttgactttacgattaaaaataagtgtgaaataacatcagtgaataatgagctggtattaaaacatgggacaatgactccggatgtggtttccggaagcaaggttatcagtaaagagttgtctttatcatgtgagacacccaccggggtgaggtttcagttccagcctcaaaaggtggatctggggaatggtgtcagtagccgactcacacttaaaatctcagacagagaatattccgataaccccgtttctgcagtgatagataacagtaaattaagggtgatttcaaccctgcaggggaaacccggtgctgccggcgaattatatggtgtttcagtccttacggcactttatgattaa

SEQ ID NO: 377841 - DNA, 1014 bp, Salmonella enterica
atgaaaaaaataatttttctgttagcactgactggcatctcagtttcttcatctgttcatgctaactaccgatggtttctttttgagcctaagaatgatgtgttcagggatattgatgtcacttatgacgattacaccgtttcagccactgccacaatgacatcgtcattaggcggatggtcccccgggaaagttattcgtcgagcctgttccggtggacctgactcgctaccggcttcacaacaaaaaacaggatggatagccattccaaccagagaaattcaaagtggaggcttaaaattcaaagccgaaccggttctgagtggtgcatggaggaggcccgatttctcctatcctgcaacatattcaatggctgtaaatcagataaccaaacaaacaccgttagattcatgctggactcttggcgcaacagtttcaggtgttgactggtgggcacccgcagcatccgtaaaattgatcattcccaaacagtctgtacctgcaggtgtatataatgtatccatcccctataaatacgcctatgaggaacacaaacacgcaggttcaacatatcctggcagcagcattatttcagaggttctttctgtcccggataaatatattaatgcacgtgttacagtagtttctaaatgcgatatcagtacgaaatccataaatctgtctcacggtgaaatggcaggcaggcttgccgacaaaaacaaaacccgaccctataacgtcaatcttacctgtcgtgagggatcttctgtctctgtgaagctgacagggagtcacacaatatcaggaaaaactgaaaattttacccgatgcggagatggaggtgtttgtgagctgctctttaacgacggaaacggagataaatataaagatacattccacataagcggcaccaaaacgcttgccgtcacatccacttatcatctgaacgatatcagtcatccggttgctggctcctttacaggaagcgggattatgcagattctcgtcaactga

SEQ ID NO: 377842 - DNA, 390 bp, Salmonella enterica
gtggcgttgacatttgccaacgaatttgacctgaatgttaaaggatggatcttaaatgaacccgattaccgccttggcctcatggcggggtatcaggaaagccgttacagcttcaccgccagaggcggttcctatatctacagctctgatgatggattcagagatacaaccggcaccttcccggacggagaaagagccataggctacaaacagcgttttaaaatgccctatattggcctgacgggcagttaccgttatgaagattttgaactgggggcacatttaaatacagtggctgggtggaatcctctgataatgatgagcattatgacccgagtaaaagaatcacctatcgagaaaaagtcaaagaccagaattactactctgtag

SEQ ID NO: 377843 - DNA, 1542 bp, Salmonella enterica
atgacattaattaccgaaatggcggcagaagacgcaagggatttttttttaaaacacaatagttattgcagttttccacttcctgtttactttgatttttcgcctcttctgcacgcggtgagtgatgcgctggatcagaagcaaaacggtattaatgatattggctacaaaaaagcatgcaattatgaaaacgtaaactatatattgcaaacaaacaaagatggtcactactcttggcgaccattcgatttgattcatcctgccatttatgctcacatcgttcataaaataaccgaagaagaggcatgggatctcttggtcgataggtttgatacttttcaaataaatgaaaaaatagtgtgcgcaagtttgccaagagaatctgaagatgatgatatttctgataccgctgagactgtatcgggatggtggcgtgatgtcgaacaagaatctatcaataaatctcttcagttcaaatatctgttcactacggatatagcaaatttctatccatcgatttatacccactctattccttgggcaattcatactaaagaagaagcgaaggaggtaagaggggataatacaaatcttggaaaccgaatagatcacgccttacgtcaaatgcgttggggacagacaaacggtattcctcagggttctgcacttatggattttcttgctgaaatagttctaggctatgccgatgaattgctaggggagaagctcgaagaagaagatattgatgactatcatgttattcgataccgtgatgactatagaatatttacaaatagtaaagaggattctgaggcaatagcgagatatcttactgttattctgcaaaaattaggattacagcttaatgcgtctaaaacatctctttctgaagatattgtcctcagctcgatgaaacccgacaagcaagaagctttaatactctttggcaaaagtgttaatactacgactattcaaaagacgcttttgaagcttgttattttctcacgtaaatataagaattcaggtcagcttgaaagatacttagccaagataaataagcgtttagaacgcatgaacaagctgaaagaggatgttcgaccgatcgttagcatcattgctgatattatggttaataatccacggacatttccatcttgtgcattggtattaagtaatgtactaaaatttttagaagatgatgatgagaaagtagagttaattgaactgattaaatataaatttgaacctatcttggggactgggattttagatatctggctacaacgtatctcttatcacattgatagcgatatagaatataaagagaccctttgttctatcgtatctggcgcacacgataaaccacatgagcatgtttggaattcggagtggattactgacaataattttaagaacatagtgatggctaccacttttattgattctgaaaagcttgaagactgcgagccagtaatacctgaagatgaagttgtgctatatccttatgatagtgactatgattatgaggaagaagaagagtag

SEQ ID NO: 377844 - DNA, 252 bp, Salmonella enterica
atgattgatgagttccacgttatgtttatgtataaaaaaatccaagctgaagccgctactactgatatcaaaacacttaatcagcttttgaagaagttccgaaaagtggtagaggagcggcgtgaggagtattatcagagtattggtgaaaataaggtgcgtaagctgaggatgaagaggctcctcaagctgatggaaaaggataaggtatcaccagaggaactatgctattttggctcaggcatgagctga

SEQ ID NO: 377845 - DNA, 303 bp, Salmonella enterica
atgtctaaaaataataaagttaaaaacaaatctacaaaactgttccttgatcttgctaaaagatcatttgaggaaagttggatcagtttactaaaagatcacgatggggatataagagagtatattagtgatcatgattttatgagtgcaactatcatgagcgtgataatgcatattaaaaataactttgagagtttaacacagaaagaaggaaataatggaaatattgacgaggttgatcttaaggtaatcgctaatctgctggtgaggcattcgtatttatttgttcacaaatctttgtag

SEQ ID NO: 377846 - DNA, 285 bp, Salmonella enterica
atgaataagaaaaataatggttttgataggatcgctactgagatgtttctaatatcagcaatgcaagagtattatcttatctattgggatatagtcaaaaaaggccccaaagaggcatttaatttacttactgataatcatcacatggaaacagtctatgaccaagtaatcgaacgagctaaaaagggtgtagcaataaataagcactatcttatcgattttaaaggggtgagaatggaggtaatgattctgcataccaaagccttagtgttagcctatatgtaa

SEQ ID NO: 377847 - DNA, 201 bp, Salmonella enterica
atgacaacaagaagacttattcgcctgccggaagtgatgaataaaacaggatatagcaaagcatggatttatcgacttattagcaggggcgtattcccagaaccgataaagattggaataagagccagagcttttgttgaaagtgaaatcgatgaatggattgaaaacattattcagttttcacgtaaacacgctgattaa

SEQ ID NO: 377848 - DNA, 1215 bp, Salmonella enterica
atgaagctcaatgccagacaggtcgagactgccaagcccaaagataaaccctacaagatggctgatggtggtggcctctacttattggttaaaaccaatgggtcacgctactggcgtttaaagtatcgtatcgatggaaaggaaaagttattggcgctgggggtatatcccgatgtgtccttggctgatgccagagcaaaacgtgatgaagctagaaagggtatcgctgggggtatcgatcctttggaggctaaaaaagaacaaaaagttgagcgtgaagcgcaggtcaaaaacacctttcaagaaattgcgctcgaatggcacaacatgaaagtgaagaaatggtctgcagggtatgcctctgacattcttgaagccttcaacaaagacgtcttcccgttcattggtcaacgcccaatcgcagacattaagccgctggaattgctgaacgtgctgaaaaagatggaagaccgaggcgcgaccgagaaagcgaaaaaagtgcgccaacgctgcggcgaagtgtttcgctacgacatcgtgacaggcagagccgagtataatcctgcgccagagctcaccagtgccatgcaggggcatgaatctacacattacccattcctgaccaccgaagagcttcccgccttctttaaagcccttgcgggttactctggcagtgaattgatggtgctggcagcgagattgctgatcattactggcctgagaacaggtgaattgcgcggtgcgttatggtctgaaatcgatacgaataaagcgctatgggaaatttctgctgaacgcatgaaaatgcgccgtccccatatcatcccgctatctacccaagcgttagccattatcgaacagatcagagcaatgacggggcaatttcctttactgtttccgggacgcaatgacccaagtaagaccatgagcgaagccagtatcaatcaggtattcaagcgaattggctatacaggccgggttacgggtcacggcttccgccataccatgagcaccgttcttcatgaacagggctacaacaccgcatggattgaaacccaattggcgcatgttgataagaatgctatccgtggcacctacaaccatgcgcaatatctcgatggcagacgtgagatgctgcaatggtatgctgactacatggcaagccttgagaaaggcggcaatgtggtgcagggaacgtttaatcggcgtggatag

SEQ ID NO: 377849 - DNA, 312 bp, Salmonella enterica
atgccgacgccggcagcggcggcgcaagtttccggggccggtatgcaggaaggcgtaagctaccaattacacaacgtagaagtgaaaccttatgttgagctggcttacgttgggcaatttggcgcggagacagatttccataccgacgattatcgttttgccggtcagaatcttaacggtggtaacgccggactgggaatggatatgaagttttcagaaaactggagcgcaaatacccgtatcaatacggtatttggtcacgatgttgacaacgaagtaaatgcttatatcggcgcaaaatatcagttttga

SEQ ID NO: 377850 - DNA, 783 bp, Salmonella enterica
atggcaacgggtaaactctggcagaggaaacccaatggtccggcagtaagtatacctggctcaacttatgaggtacgtgccatcagcgccaggaacatcgaaaatctgaaaaaaaggttggggaaagcaagccaggaacaactagatttttttcaaaggcttaagcagcttgaattccagatggtgcatcacaccaatgcctggataaccaatcctgaaacattagaaacgacttttttaagccgcgatgagttaataaaaagaaagatggtgtttgataaaacccataccaccaaagctgatgttgttcaacttgctaataccgggttcgctttctttgccctttcggttaaagggattaaactgcaaaagaacagtagtcgctttggcagcaacgcgcatgtgacatcgatagacaaggcgaaacagaaaagtccctatatggctgaagcgcatatgattcttaacgatacattaaaattccaggagagaaaagtatcagatagattagttaccctactgggtggggatgatatagcgcgtaaagatgcgatagcgtttagtaagcaggttgtcgcagaaaatgccgtagatacgctttttcatattgatgatcttcatatgggcctttcgttatctattctctggagtattaaaacagcgcccatttcggaaagatccaggaaaattttattgggtgttaagggcgaagcacagtttgaacaattaattactaccttattcaggccccagatactggttcctgtggaattgacggtttaa

SEQ ID NO: 377851 - DNA, 2106 bp, Salmonella enterica
atgtgcactgtaacagttgctgcaggcactccggttatcagcgttaatgataatcggggatttaccgtacgtatactaaactggaaccgtgaaaaagcgtccgttccacggcgtcttttggttgaccacagctaccatgctgatgagagcccggtggaagaaaaacgtgatcccaggctattttcagcatggctaaatgaccggagtgtggtggcaaatttgcgcagtatgtcatctcttgccgggcaggtaatcaaaagggagagtaccgacagcggatggttggtcacgctttttgatgccgcggctcgcctggtgtggttcactgatggtcggggcaccacgcaagagcaaacctacgatgaactgggccgaccggtacagacaaaggagcagcaaaaaggcggggaaaaacgcgtcagccggataactgaatatggcgataaaggtctggagggcgataatctgaaagggctacctgtacggcagtatgatgacagcggcctgcaaatcatcgattctgtcgcgttgagcggagcaaccttacaaatatcgcagcaattcctggcgtcaggtgacatcgcgccaaactggcccgcagacgacactagcagaaaacgtcttctggattcggaaatctatgtgacttcactacaagcagatgcttccgcaaatacgctaaacagaaccgacgccatggggcaccaacaaagctggcgctatgatgtcagcggaaaagtaacaagtcaggccataaaactggctggtgaaactaaacagacgttacttgaacatatcagttggagtgcggcgagtcaggttttagaagagaaaacaagcaacggcgtaaccacggcatacggctatgagcctgaaacacaatggctatcgacactggcagcacagcgcgctgataacacagtacttcagtcactggtatatggttacgacaatacaggaaatgtcacctcgattacggataacctggtagcaacacgctactaccaaaatcaggtcacggacgggcagaaagaattcagctatgacgccctctaccagttgctggaagccacggggcgggaaaacgccgggaacaaaataataccctacagcagtttacctgccgcactgacgcctatccccacggacaacagtcagtatgtaaactacacccgcacctggatctgggatgacagcggcaacttgcagtcactggctcacacaggggccggaaactatacgcgaacgatggtaacagagacgacatcaaaccgtagtgtacaaatgaacgacggtggagcgcaggattcagatgaggtaagccagtggttcgataacaatggcaacctgaagcagttacagatttcggcctcttcatccagtaataacatgctctgggacggcagcaataacctgcagacggtagtgctactgtgccgcgacgccacggatatgacgcagaatgatcgggaaatttaccagtatagcggcagcaggcgcgtgcgtaagcagacccgcaccctgacgaatgccagccagcagctttggagcgtagatgaagtacgctacctgccgggtcttgagctacggcaaagctggcaggagtcagtagaggataacaacgttatttcagtaaacacatcgcaagaacttcatgccgtaaccggtcaaataggccgtgccggcatacggatattgcactgggaatcaggtaaaccggatggcattgataacaatcagctacgctggagcctttgcgacaatatcggctcagcatcgctggaactggatgctgatggccagcaaattagccgggaagagtactatcctttcggcggtaccgcggtgtgggcggcacgcagcgaactggaagccagctataaagtgattcgctactctggtaaagaacgtgacggcaccggattgtattactacggctaccgctattacgccccctggctatgtcgctggacagccgccgacccggggcgggagatcgacggcctgaatttataccggatggtgagaaataatccactgacacttgcggatgccgaaggcctcgctccgacagcatcaggtagcgctgagacgcccaaactctaa

SEQ ID NO: 377852 - DNA, 2880 bp, Salmonella enterica
atgactttagcaatcgccacgccggtgattgccgtctgcgataacctcggtatcaccattcgtactcttaactggaaccgcgaggataaagacagtccgcgccggcttctggttaaccacacccggctggatacggccagccgggccaccgtacagcgcgatcctcgccgtttcgccgcctggcaacaggacgatacggcgttgccgaacctgtactgtatggcatcgttgacaagtcagacgctgaaacgcgccagtactgacagcggctggcaggtaacacgctttgatgccgccagccgccttgtgtggtccattgatggtcgggacgccgtacacgctcaggtttacgatacgctgggccgcccgcagagcggtagcgaacagctaaaaggcgaggcattgcgggtaagctggcgtcacgcctacacggatacctgttctgcagatgctaacgcgcagaaaaacaacctgcgcggattatgcgtacagcgctgggatgatagcggtctgcaaactgtcgaatcgatggcgctgagcggagcaattctctgccagacgcagcagttcctcttatctgcgcaagcgcagcctgactggccggaggatgatgccgacagacaggcgctactggaggataagatttatgtttcgacaatatctgccgatgcgcgcggtattagcctgaaccagaccgatgcaatggggaatcagcagagctggcgttatgacgtcagttcccatgtaaaaagccagtatgcgacactttcagagggtaaaaaacagacactgcttgaggacattatgtggaatgccgcaagccaggttctggtggaaaccacgggtaacggcgtgaccacaacctacagctatgagcccgaaacacagcgtctctcggcgatgagtgcactacgcgccgacagcgctctgcttcaggatctggtctacggctacgacaatactggtaatttaatttcaattactgataacaccattgcgacccactactttcagaatcagcaaaccgacggattaagggagttcacttatgacgcactctaccaattgctggaggcaaccgggcgcgagaatgccggtaataccgccgtcccgtatgctgctctccccgcctctatcccaatagacagcaatcaaaccatcggttatacccgctcctttcgctatgatgacagcggtaatctgctctccctctctcaccagggcgccgcaagctttacccgtacaatggtgataagtgatatgtccaaccgcagcaggttgcaaaacgacaccggaacgctgacgccggatgacgttgatgctgcgttcgaccctgatggcaacctcctcaatctgcaggtgtctgccactgcctctgacccactcatctgggacgccagtaaccatctacaaacggtcaacctacttgatcgtaacggcgacatccagcagagcgatcgggagatttaccagtacagcgccgggatacgcatgcgcaaacagacacgccgcctgacaaaagccgaagataaccggtggactgttgatgaggtgcgttacctgcccggtctggaactgcgacgtcactggcaggagacggtcagcggcgacaccattacgccgcaggcggttactgaagaactgcatgtgataaccacccaggcggggcgcgccggtgtccgactgctgcactggaaaacaggtaaacctgacagcattgataatgaccaggcacgctggcagttgagcgacaatatttatgcgctggagctggatgcgcaggggcaaactatcagccgcgaagagtactaccccttcggcggtactgcggtgtgggcgacacgcagtgaggtggaggccgattataacgtgattcgctattccggcaaagagcgtgacggcaccggattgtattactacggctaccgctattacgctccctggctgtgccgttggacggcagccgatccgggccaggaaattgacgggctgaatctgtaccgcatggtgagaaataatccgatcacgttgacggacgttgacggattaatgcctaaattagcgttgacgaaggaggaaatcgcagaatttgagcatttatatgaaagcgcgctgaaaagtggaaaatatgaaaaaaattcccctgccatgaaacgcttcgttctcaccaaccattcacgcgccagtacatattccttaaaaagcgaaaccattataaatgttctttttcacatcatgtatgaacagtcaaaatatgtccttccacctgcatcctcacagaaagccatgagtgcaagtaaagaagcaaaagctaaagcagctcaggcggctgccgacaatgggaaaaaagcaatactctatgtttgggctgcacaatcccccttgatacaaaacgcctctcccacagataaattgaacgcagacaaaattgttagacatataagaaaactaaacagagatccaaatgcaaccagagatcggtatgacattttcgagcaaaacgcacataaaggtgtggcgaacggcatatatgaacttgatggtaagactggcgcagaacttgccgaccttcttgatgactatattaagaatcacgccacattaataaagaaaaaactctatcggggaacaacggcattgccatccgttaggcctggtcaattcaccgcgacatcggaaaatcgggatattgctggattgttcgggccacatatcgaaacctttagtggcggatatgcagtacgggtacccaatatttattgcaacagagatgaaaaagaatatttattcagtcggatcgccccgcccaaactggctcactctactaatcctcgccagagagcattagatcctggcgctgggtgtagtaaagccgcctga

SEQ ID NO: 377853 - DNA, 1866 bp, Salmonella enterica
gtgttgaacaacgccgatgaagccacgcgctggtggatgttccgtgcattaaatggaacagagctgcgcagcgaaacctatggactggataacagtagcgtcgccacttctccttataccaccacacaacagcgaatgcaggttcgtctggttcaggatggcgcgatgcccgttgtattgcccgtcgcactggagcaaataacgcatcattatgaacgtctggttggcgacccacaggtttcacaacaggtgacgcttcaggctgacgactatggttgcgttacccggcaagttagcgttgcgtacccccgtcgcgcttatcatgcccttcaaccctacccggccaacttgcctgatgatgcctgggaaaatacctatgatgaccaacagcaaaaactgcggctggtagagagcctggcatcttttattcacctggaaaattcacaaacctggcgattggggcttccctctcaacaacgggtaaatcaactgcaattcgattctgttcccgccagcggtatcagttacgaaacgcttcgggcagataacggcctgttaagtgccggacaaactcgctatctggcccaacaaaacgaaattatctacacgtcgacgccccctgatttgccggcgctggtacactatcaacgcacggcggtactggatgaaacagcgcttaaagcctatgacgggataactatccctgctgaatacagtttcgataagctaggttatgttaagacaccggcactcttttcctttacaaccgaagccgacctttgggcagttgagcacagctttacgctctataacgatgccagccagttctcaacggttgcaagccagcaatctactggactcgtcggggctataacctgtcagtacgactcgtattatctggtgccaattagccaacaagatgtgctggataacaccgttaaaatggaatacgactatcgtttcctgagcccatggcgcatcactgatatcaataataattatcaggagtgtcaactggatgcgctcggccgtctgctggcaaccagtgtatatggaacagaaaacggtggtcaggcggtagggtttgcaaaaatcgcagactatccggtctcgtcttcgcttaccgttgagcaagccattgcgatggcgacaacggcggggtatctccagcaactggccgccatcaacgtcactgatatgttcagttggatggggtgcatttccgctgaccaggcaaacagtgtcactgctgatggctggtcgactctgctgcagaaccgctttattacctttaccgggcatattcgttcatcaggtcatctttgggcgcgtaaaaatccacaacatcctctggcaaatttactggctgaggcaacccgtaatcccatccacaatgtgaccctgaccgcagataactatcctgcaacgcttgatccagatgactcaacgacacccttgcaacaaacccgtatttcgctgagctacagcgatggttttggccgggcattgcagcaatgtgtcctctttccggatgggaaagcctggcacagagaaagcgatggggaaatcagtacaacagagattgatgccagccctcgctgggccgtttccggacgcactgagtatgacaataaaggccagccggttcgcaactatcaaccctttttccttgatgactggcactacgttgtcgataccgctatgcgtacgaatggctatagcgacacgcattattacgatgcaacgggccgcaatattcgcacggttacggctaaaggctatctgcgccgcaatacctactatgcctggtttacggtcgcagaagatgaaaacgacacggtgggcctggagaatattcccgtatga

SEQ ID NO: 377854 - DNA, 342 bp, Salmonella enterica
atgatatcaccatttatcccatcaaataataacgtattcgtatgcaaagatatttatattaatttcctgaaaaatatattttcaaaaattttaagagattctttacgtgacattaactttgttgaacacacttacgatctttcctctttgatctacaaagtaaaaaatggcgacggccatgcattgctcaccaacaaattagcacagtactataacctcaatggaataaaaaaaacgccaataaaagaatataacagtcgcttagtcatttatcatgatgcgtctgttctggatagcaaacctttgttaaaattgaaacaaatacttaatgattttatttag

SEQ ID NO: 377855 - DNA, 2289 bp, Salmonella enterica
atgtcgaatccggaaaacggcccgcagctcccggccattcgctggccggtgccgaaaaataaccggggcggggagttcagtaacctggaggagatgctggcgcatctggagggcgaggccaccgggcactggcttatcggccgcaatggcatgtggcacggcggcattcacatcagtgacaccaccacgccgtggtatgcgctcagcggtcaggcgatgaatgaggcggtggatttcccggtaccgtttccgggggagcaggccgtgcgctgcatggcggacggtgaggtggtggcctaccggattaaccgggattacctcagcgtgccgtggtactggggggatttatgctactccgggtcttttgtgcttattcgccaccgtattcagccagggaaaacggcagagagcgggctgaccttttacaccctgtatatgcacctcgcgccctggctggcctacccggagcgggacagtacagcgtttcaggtggctgacggccagcgcctgaaggcgtatgtggatgcgtcccggcagtgggtggcggcagagctgccgtccggcacgcgggtgacatgggataaagcggtcagcgccgacaccatgaccgggagcaacgggcggcagtatgcgcacgtcacgctggcggagccggtcacgggctgcatgagcctgagcaccggggaccgggtgtggacggtgtgcgacagagagaatctggttccggcccgcgacagcgccacccgtccggcgtggtggtccccgttcctgccgccgtcacgtgaaacggtgcagtttgatacggtggtgtgcccgaccccttacccgattaaggccggggacccggtgggtcatctgggctggtttcaggtgcccggtgaagacggacatgaaaaacgctatcaggtgcatatcgaatgcctgacgacggacgacctgccgcacttcctgagcaacccggaaggcacggggcgcgacatgcccgcctttgcccgctgtccgaaggacattccggtgtacctgcaattcagcggcggagaaatacagaaggggctgataaccacgcagaccgaaacggtgatggcgctgtccgggcaggcagtgacggacaaagagggtaaacgctactggccgggcgggtcgtcgcgggggctgctggcggagtcggatatgcagttgttgtcccggtacgatctggccggccggggttttgagacgacagaagacagcccggcgagctttgaccatctcgacgggaagacgcagccgaaagggctggtgaagacgatttttgagcggtttttcagcgtggcggacaatgacgggaaaccctacagcaaggcggtggcgtttaactaccggcaactactggacaggattgacgatgcgaaatccccccagtataacccggaacagtaccggcgtgcggtgcagaatccgtcaatgcgtgaccacctttatcggctgtgcgtgaagcaccccagtgactggtattactcgtcggaagcgcctgtgtggaaaacgttttttacgccgcagctaaaaaaagaagcgccggaatggtacgcctacagcgagaagttcctgattgacctgcgctggatgcatcgtgtggcggggatggtggaaaatccgtggcatatgcatccgctggtgtttctcgatgctattgctatgaatgctaaggtgtgggtgctgggtacaacgtcagaacactatgagtccggtggaagaggacctggagttgtgtcttcagggcggggggatcatggtggcgcttcgtatggatgctatcagttatcttctaaaccaggcgttgttcaggattatattcagcaatcaaaatataaagatagactcactggtttgcaggttgggacacaagaatttaatactgagtggaaaaagatagctagcgagcataaagaggattttgctcacgaacaatatctttttataaagaaaactcattatgaagtacagctaggatttctgggtaaaaaagggattaatataaagcataagcgagcggctatacatgacatgatatggtctacttcagtccaatatggaccatatacagacattataattaaagctacaaaagaattttcttttgaaaatgctactgatgctcaaattataactgcggtgcaagattataagtacgcgcatgtagaaacaaaatttgctagttcccccactctttggtctgggttgaaggatagagtcgtaagtgagaaaagcaaattattggatttgactcaatataattatgaggttgagtaa

SEQ ID NO: 377856 - DNA, 213 bp, Salmonella enterica
atgaaaaaatcacgttttactgacagccagatcatgtccatcctgaagcaagccgaggccggagcacctgtggctgaactgtgtcgtgagcatggcatgagcaatgcagtttctataagtggcgttcacgttttggcggtatggagcctccatgatgacccgtttgaaaaagctggaagatggaaatctccgcctcaaaaaaatgtatgctga

SEQ ID NO: 377857 - DNA, 627 bp, Salmonella enterica
atggcaaaacaactcggttacacggccattcagcggctgatttctggacaacagatactgctgcggtattacgacccggcgatacacggcatcctgtggccgcaactggatgatgtgcagcatgaacgctggctgggcgtgctttccggctggcattacccggacggtgatggcaggctcgtcagccacgaccattctccgtcgccatacccgtatatgacgttctccctgatggtgaacccggaggatgaaattcacatcagtcagaccggtaaaatcgtccgtgtcctggaacactatcggcaggcacatatcaacaagccccgtcacgatgaagccactgcagtcacgattattcgcagggcgctgaaacgcgcgcagcagctgcacggttttgacaacgataccgaccagcaggcgctggcgctcgactgcctgcggttacatcctgaactggatatgcatccccggatgaagattttgctttcaccacgcgagcgggagccggacacggattacgccatctgcactggcgcactgtctgaccgggactggcagcagctctgccacgacctgaacaccgaagagacgaacgcgtccgcatctgacgcaaggagccctgtatga

SEQ ID NO: 377858 - DNA, 2655 bp, Salmonella enterica
atgacaacctctcccctggggccgaaaccctgctcacactgccagatatccggcccggcgatattgccggtacgttatgccgtggtgcctgccgggctgtcggccagcgttccggcctgggcgaagccggacacgccgttccccaccggcgacggctatgactacctgctgcgcgccctgcgtcagggctttgtgtatgtgtattacgaaagtaaccgtcagtgggaaggctggtcggtagcggaagacggcagcctgtggaaacagccctccgctgcgtatgcacggtcgcagaaaaaatctgactgcaccatgccgtaccacaacccaaccaatctggagatgctcatcctcagtcctgctgccctgaagggcaactgctggattgcattcacatcggccaaatggcggaccggtacgctggagcgctacggctctgatgcgaacgcccgtaagaaacggatgcagtgcgtggaatactggcagtggaccacgcctgctaacgaacagcgtgtcgcccaggcaagcgttgaggtgctcaatgaaatagctgactacatgacgccgggccctgcctgccccgtactgacgctgccgtataacccgccggtacggcgtatcagccgcacggacagcgcatcaccgtggttttattttgatgaaggcgaagtgcgggctcagggcaccctgacgtcgtggagccgccgccgctgtgagcaggcgcagcggacaatagacgcgatgcagaaacagggggccggggttaaccgctacgacaaacccattacccaactggtggtggcgctggatgatgcggcgggtattgctcatgagctggcgggattcagtgatgatatggccgccctgcatgcgggctggctggacgagctgtcgattgagtttatgagtgtgcagtcactggctggtgcccgcaaccaaatccagcagatggaaaaagcgctggcagaaaagcacacactggatgccttcagcagtactgcaaattacggcatggataaggtttctggtggtgtcatcgcgatggtgccgggcgctgacacgcagcgtcagtcggcactgaatgatctgttgcaacgggcgcaactgtcatcagaacaggcgggtgatgaggcgttggcgaccagttgggcgaagtacgatgcggagctgaatcacgacaagataaatgccttcaatacctgttatgagcagttttgtaaggtgatagccacccggatggaagccctgcacggtttgcgtatcgactggcttaagtctgcgccgtttattacctgtagccaggatttttactccacgagtgtggaggataacctgagctaccgcgaaattgtggattatgcgctggcctcgctgaacctgaccgataccggcgcacagtggctggacagcctgataaaccagtattctgcgaaatccgaaagtaacctggtctggcgctcgctgctgctcaataaccccgatgtgatagccgatatgaccgcctatctggaaagcctggcaaagagccacggcaaaacagagaaagcggacgaagcatccttcctggcggcggtggccccgctggcaggcaagctgaatgaagcatatgccggtgccaatgaagcactggagcgacccgccacgccgtcttcatcgttctcgcggatgatgctgtactgtgaccgtcgcctgagcacatttggcgatcgcttctttaacatcagccgcgccggtaagtttctggacgggttaaacgggttgctgacgaaaacactgttccaggtggtatccggtgtgtcatttgataatgcggtgcaactgtcactcgggcagttacaggacggtgatacgttcagaagtcagctcctggaggatatgaagtattcgggcgcggctgaacggcggaaacttagcactcgctatcaaagtgattttgacaaatttgcccagggtgctgaaggcgaaagcgccctgaaaggggcccgaatcaaattgctggcgctgttcttcaacgggctggaattcaaaaatcagctgcaggagagcaaaggggattcgaaaagtcatgcgcagatagcgtctgcgttccttgggactcttagcacaaccacagagattattgaaccggcggttaaacacggtattcagaatggggccggaaccacaagcgtgaagtttgtggggaccggtgcagggacgaccgctgcggtgatcaatctggttctggatgctgaagatttatatgcagagggctttgctgagcatactcgatggtcttatgtcggattgtactttatgaagagtgccaatgatgtggggctattagttaaatccagcgaaggtcttatgaaacttctggccgatagtgggattgtgaggaaagaaattgcggatgtggctgcaaagtgggctgcggctgaagcaatttcttggttggcgagttgggaggtgatgatagctctgttcctgatcgaacaactcatcacttactactttggtaacgatttacagaaatggtgtcgggagggcgtattcggactggagcctgatgacaaactgaagagtacctggcaactgggccccaaaaagcctcgtgacaaggagtatgacaaccagcaggaagaatatcaaaaagcactgggggctgtgttatga

SEQ ID NO: 377859 - DNA, 996 bp, Salmonella enterica
atgacaaaggacaggaaattttcgggagagtttattgcgtttgatgaaatcaggcgaaagaaaagccattgcgaaacaatcattgaagttaacaacaaatgggcggttgagcatcctgacgaatgtgatcctctaaagcttgaacgggagaacgagcaagcgtctgctgagataactcagttggacgcaatcctggcaacagaaccaccaccgccagagctaccacctcgacagcctttgttcaaagtcagtggaatgttggaagagtttagcgtgcagaaagtcatcggttattttactgatcgtgaatatgacccagaagcctttgctcatcaggaatctcgcaaccaggtagggggattgttagtggcgatgacaggcaatactgcaggagcagcggtaacaggccaaagtcaggttcgaatgagtgatgcaagtgattttgtacgtgggaagatcaatggcgtttcattcagtggctggctggggaaaaccaatgtaaaggttggtgatttcgtggaaatggctgtgatgggtagagaagaacactatgtcgtatacgcaatagctctccccgaacttcgaactatcactatgacgccatattgtcgccatgggcgagaaatcgatgttttttatgagtatcgatcaggaatttttttgattggcggcttttttactgttttgctcctttttgttttttttgcctctaagtcactttctcttgaggattttttgaagctcgtcgtaatttcctattccatcacggcatatgcctgtttccgtggtgtacgcaagcaacgaaaaaggcctaaaccgacgacgcttctggccgaggccatttttactgtacttggttttaatgagccaaagcgggttgatttggaaaaaatcaccaaagagcaaattaaagtgctgccccctgatttattgacttcagatggccgtgaaatgccctctcgtacttcatacctggatggttttttttactattga

SEQ ID NO: 377860 - DNA, 270 bp, Salmonella enterica
atgagcaagggcattattcgtctgcacgacaaacttagcagcggcggggaagtgatctccgcctcttccaccatgattatcgacggtatcaaagccgcattactcaacgatctggtgtcctgcccgattgaagggcatggcgttaatcgcattgtggggacatcaccggaatggcagtcagacagtgaacaggctgcttttgatggtgcgcagtgccagtgcggctgcacggtgatcgccagcgccaccggcggtattctggggagctga

SEQ ID NO: 377861 - DNA, 1161 bp, Salmonella enterica
atggcatggaaaatccccgcgccggatgcggttcactggcctgccgcgccgtcgtggtcaggctggtggcggtcgctgatgttaagttgttcagccgtggtgatggccggatgcggtatttatttctggctgcatgactcgcgggcgctggtttacgcctttgccggtgtggtggtgctgatactgctgtttgccgggattgcgggctggtggatgtaccgttatggcgtactcctggagcacgctgatggcaccacgcagtacaacgccatgctggaagcgcagtggcagaggtgggctcaagaaggcatggtggtgtcaggcgtcagtactcttttccctgaacaggtgcggacaccgcaggacagtggtgagccggtaagtacgttggctccgctacgtctgcctaaatgtccgggggccacgtatttgtttaccgaattgctggctccgctgcgcgtggcgctacagattttcatccgcaatcagtcgctgacggtctgcctgccggaaagcgcgtctgaggacgactggcaatgtttccggtcggtgtgggcggcgctgtcactgccactgtcggcgatccagctttcggaaatgaagcctgagcctttcagccgccagatgacactctggcaacagaaagatgcggtgcgtacgggctggctcattatccgtcataactggacgcctggcagtgaaggcactcagggggcggtggcctggttgttatctcatccggatatccgtaccgggctgcggccctgtgccacgctgcaccgtgtgttccccaccgataataccttacctgacggtgatctccggcagtttctgcaatatcagtgtgtcagcaatacgatgaaaggcgtgtggtctgatgcggtcactcagccacatatcagtcgtctgatggtcgccctgagccatcagcataaggctgtagccgagcagggggaagcgacggtcattccacccgcatcaccggttcagcagtatctgcctcactggctgggcgagatgaaagacggtgaaacatggtttgcggtcacgcaggcaatacagatggcagaacatacccgtgaaacgcaggtgctggcactggctaagggaagcgaggcgtttttgatgagtgtcagcagtggaggtgaatatgtcgcttaa

SEQ ID NO: 377862 - DNA, 3321 bp, Salmonella enterica
atgtcgcttaagggacaggtctggcgaccatcgggggcaaccctgtttacgctggtatcgggagtgctgtcagccggagtggtatggctgctgggcaaacattacggactctctcctgcacagatgggcctggtctggctgggtgttcaggcgttgttgacggccgtaatggctggctaccggttgtatcagcagcgggagcccaaatcagacgatgacaggcaggctaaaacagcgcgggaaaaagtctccaccccggcgtatatcacggagatgcgtgactaccttaagcatcactacgggctgacctggcgcagtaaagtgcggtttgtggtgatttgcggttcaccgaaccagacagaccttgctgtaccgggcctgacggaagccggatggctggaagccaacaacgttgtcgccgtatggggcggcagtctgctcccgggagccgacagcgcccgtatcgcggtgctgcgtaaacttaaacgctgtgcggtcagcgcgatagtgctggtctatgacgtcgaactgcgtcaggcgatgcagggcgacctgattgttcgccagcttaacgaacgctataaaaaactgggctggcgcgtgccgctgtatctgtgggaagtgcagaagagcgcgtggccacaggagggccgcgagactcagccggtgggttgcctgctggccccgcacaccacgccgccggagctggtggagaccctgaaatcgctaccggacacgttgatagagcctggcgtgcagcaggggctgggcagccatacgcatgatttcctgttgcgtctgggctggcagttgcgtaacgggatggcggagcgttttcatgcgctggcggtgtcgctgctcaccggcccctatgcggtgccgctgcgcggggtgatgttcagcccggcggtttacccgaaggacggaaccgacaggcagcgctggctgccggataacagctggaacgccattctgaacgatttgccctcgctcagaatccagcgtgccggaatggcgtgggagcgcacgctgtatcaggcggtgctggtggccctcggtctgacctgcgcgggcgtactcttttcctggaacaccaaccgtcaggagattaccgacgcacagcaactggcagtaacagcccgtgatgaacaccagaacgcggataaacgactggctgcactgggtgagctgcagcgggagatggcgcgccttcagtaccggagtcagcacggcgtgccgtggtacagccgctttggccagagccagaatgatgacctgctggcccgcctgtggccggagtatgcccgcagcgcgttgccgctgttgcgtgatgcctccgccgccaggttgcgtgacgcgctgaccgcctggaatgcgctacctgctgacagcgacccgcgggcaaaactgagccgggatgcgtataactggctgaaagcctggctgatgttaaaccgtccggagaagatggacgcgaatttcttcacctcaacggtgatggccctctggccacgccgtgatggcgtggcacccggtgtctggcagtacgaggggccccgacaactggcctttctggcgcagaatctgccgtcacacccggcctggaaaattgcctcagacccgcaactggtcgccaccacccgcagcgccctgttgcgcctgattggtcagcgtaatgctgaatcggcgctctaccagaaaatgctggtgcaggtctcccgtaactacgccgatatgcgtctcaccgatatgaccggcgacacggatgcctcgcgattgttcaccaccgatgacgtggtgccggggatgttcacccgccaggcgtgggatgatgcggttcaaccggcgattgataaagtggtcagcgaacgccgggacgagattgactgggtgctgagcgataaccggcacccggtgatgcaggatatttctccggaagcgctgaaagcccggctgacggaacgctacttcactgattatgccagcgcctggctggatttcctcaacagcatccgctggcagaaagcctccacgctctcggatgccattgaccagctcaccctgatggcggatgtccgccagtcgccgctggtggcgctgatgaacacactcaacacccaggggcgcgccggacaacagcaggaagctctgaccgactcgctggtgaaatcagcgaaaaatctgctcagtaccgatgacgcgaaagccatcgaccagaaagccggagcgcacggtcctctcgatgcagcctttggtcctgtgctggggctgatggacacgaagggcagtggtgataacagcctgagtctgcagaccttcctcacccgcgttacccgcgtgcgtcttaagctccagcaggtcaccggtgccgccgacccgcaggcgatgatgcaggcgctggcgcagacggtgttccaggggaaatcggtggatatcaccgatacccgtgactacggcagtctggtggctgccagtctcggtcaggaatggagtggctttggtcaggcggtgttcgtgcaaccgatggagcaggcctggcagcaggtgctgtcgcccactgcagagagcattaataatcaatggcagcaggccatcgtcaacgactggcagcaggacttcaatgaccgctggccgttttcgccggataaacagagcgaagcatcgctgccgctgttgtcgcaatacctgcgtaacgacaccgggcgcatcacgcagtttgtgaaaaccagcctgggcggcgtgctgcgcagggaaggtcgtcactgggtgccggatgcgattgccgcacaggggctgcactttaacccggacttcctgaatgccctgaaccagctcagcgaactggcggatgtggcgtttaccggcggtgacgccagcgtacattttgcgctgatgggcaaaccggcccgtgacgtgatgcagaccgacctctatctcgaccagcaaaagctggactaccacaaccaggtggagaactggcagccgttcgtctggccggacagccagtggaaaccgcataccacgttaacctggaccagcgtcagcgccggagagcgtatctacgccgactaccccggaagctggggctttatccgcctgctggacagggcgcaggtccaggccaccgacaacagcacctttattctgagctggaaggtgaaagacggcagtccgctgaacattatgatgcgtacagatgcaggtgaaggcccgctggcgctgctgaagctgaaagggttcagactgccgcagcaggtgttccttgatacggatagcgtccctgatgtgccgtcagataacggtggcggagacggactgtaa

SEQ ID NO: 377863 - DNA, 312 bp, Salmonella enterica
atgcacttttctcaccatttcaccagctttaaagatatggtcgtaactggcgtgcaggcgctactgatgctgcctgttatcctgatgatgctggcatcggccctgatgtgtccccgtgctgccggtgctattttcctggtacttagcggcgtcctcttttttactgatacccgtacgttttacagaggtttttggggcgggattcttgattgtctgctctctttttgtcccttcgttctcctggtctgtatcgtcgggatgatcatcaagttctgtactgaaaaagcaaagataccagacggagacagttaa

SEQ ID NO: 377864 - DNA, 1761 bp, Salmonella enterica
atggacgacctgaccctccgctacttcgacaccgaaatgcgctacctgcgtgatgcggcgcgggagtttgctgagctgcatccggaagaggcccggcagatgggactgacgatgaacggtgcgatggatgagtctgtgacccgcctgttccagggctttgccttcctgatggggcgtgttcggcagaaactcgatgatgactaccccgaactgaccgaaggtgttatcagcctgctgtggccgcactatctgcgcccgctgccgtcgatgtgcgtggtggaaattgcccctgagccggacggactcaagcacagcgacacggtgcatcagcacaccgaagtgatttccgcgccggtgggcgacaaccggattcgctgtcgttaccgcaccacgcgaccgctgaccctgcagccgctcgcccttgagacggcgagtgtctttgcggagccggagggtgccagcgccctgcgtttgcgtttttcctgcggtaacacggcggactggcggcggctcgacctctccgcgctgccggtatacctgaacggcgatgcgccgctggcctcactgctgcatctgtttctgacccgccgggtggcccaggcctaccttcgtttgccgggcaatatggaccgccagcccttaccgctgcgctttcgcgccagcgcctttgatgatgatgcgcatctgtgggaggtggaaaagagcgggtacagcagctatcagcatctgctggaatactttaccttccgcgagaagtttatgttcgtctcgctggaagggctggagcaggttgcctggcctgaaacgctgccctggtttgagctggagttacgtttcacgcagcactggccgcacgatttcacggtcagcgaagagaacctgcgcctgcactgcgtgccggtggtgaacctgtttcgcctcgatgcgcgtccgctggcgattaatgcagaacagaccgactatcgcctgcagccgctgcgcgatgatgacccgcataccgaaatctttgcggttgaatccgtggcggcctcgtttgaagaggatgcgctgcgttacacatcgtttcgtctctttgaacagcagggcgggatgtaccggcgtgagcgaccggcccgctactttcatacccgcgtgcagcgtggcccctccgggcgtacggaaacgtggttaatcctcggtggcgaagcgtttgaacgggagcgcctgcagccggatgaccctctggcgctgagccttaccggcaccaatgggtgtctgccgcgtaaaaccctgcagagcgtgttgctggaacaactctgcggcacacagcagaccccggtgcgcgtgcgtaacctctgtcgcccctccataccctgctatccgcccagtgagaatcgttttcactggaagttgctgagccacctgggcagcagctttctgtggatgatgaacaatgcagaggtactgcgtaataccctggcgctctataactgggcggacagcgatgttaaccgtcgccgtctgaatggcattctcagggttgaacaccaccggctggaatactggaaacgcggcttacagcggggcgtggacattgaagtgaccctcgacaccacgatgtttaccggtgagggcgatgtctggctgttcggcagcctgctcaaccgcttcttcgcgcagtacgccgatatgcacctgtttaaccgcctcaccctgatactgcaaccgacaggacactgcctgcgatggaaagagaaccatcagtcagctttacgacgctaa

SEQ ID NO: 377865 - DNA, 1098 bp, Salmonella enterica
atggaaagagaaccatcagtcagctttacgacgctaaatgacgcgttcggcgaacgcctgccgtacacccatttttaccgctttctgcagtggctggaaaagacgcatcctgagtatccaccactcggcagcagcaggcgcatcggcgatgacccggtgcgtctgcgtccgtatgccggaatgggctttccggcaggtgagtttaagggcattgagattaatccggatgataatccggattcgccgcccacggtcagaaccacctttatggggctctacggcatcacgtcgccgctgccgacccagtatattgatgacatcacgcaacggcgtgagggtcatgagacggtggagcactttctcgatatcttcaaccaccggctgataacccagtattaccgtatctggcgtaagcacagttacccggcttcgtttgaggatggcggcaccgatgccatttcacagtgcctgctgggactggcggggcttggtattcccggcaccgctgaacacctggacactccgctgtcgcgctttctcggcatgctgcccgctctgcaggtgccggggcggactgccgaaggggtggctcaggtggtgaaaatggtcacgccggatacgacggccacggtgttgccgcaccataagcggcgggtggaagttccggaactgacgctgagtaccgccggaggattttgcctgggggaccatctcgtgctgggcggtgttgccaccgatgtcaacggtaccattgatatacggctgtataccgaaagcaaagcggatttgcagggctggttccccccggattttacgctgtataacgatttactggccctgctgcgggtctatctgggctggcgctacgatgcgcatatttccctgacgttcccgcgccggttactgccccggccacggctgacctgccaatattctgacgattcggtatacatggggtactcctgcctgctggggcacgaccctgacgatatgacaccggacccggcgatgccggaccgtctcaccgtcagcctgggctattacgaaggactgcagaaaaatccacaacaccgcgaggtgacagacgttgaagagtga

SEQ ID NO: 377866 - DNA, 540 bp, Salmonella enterica
ttgaagagtgatatgacgaaacaataccgactgctggccgcgctgctgccgctggcttttctcctgtccggctgcgggctgacccagagcgtcagcgacggcacgaaatcggtggtaacggccatcttttacaagacggtgaaaaccctgcgtctcgatctgaaggcccgtgcagcactcaatcccgatgaagacgggatgccgctggcaacggatgtgtgggtctaccagttgaaagatcgtcaggcgtttgataaggccgattatgcggcactgcagtctgatgctaacaccgtactgggcgctgacctggtggccgaaaaggatgtgtgggtgcgtccaggtaataccgtctcgctggatatgctgctggatgagaaagcgcaatatgtggcgctggtggcacagttccgctcaccggatgcgcgtaagaacgactggcgactggtgctgacacgggatgacctcgatcctgataaggcgcgtaccgtgtcactggaggggaattcactgatgctgaaaacgtctgatgataaataa

SEQ ID NO: 377867 - DNA, 897 bp, Salmonella enterica
atggccgaactggagcaggctgaatatgaagttgacgtctggaataattatattgatgtattgcagtcggtgcataaaggatgcggagatcctgttgactggctgtcaatagcccgggctgatgcccctgtgcagcctgtttttttcggtagcaaagaagcgcaggccagacaggctgtgcaaaactaccgccccggttttttgtcccgattgctgaagatcgacaggaagaaaaaacagaaactgaatgaagccgttgacgtcgcgaaaaaggacgaccaggataactttgattcactctatcagcagtggcagcaggattctgcagatcatgaacagcagaccggaattgccactggcattctggatggcgagcctcgggccagaataaatgctattgagtttttcgctccgtttgatgaactcagtgaattggggtcatcgatccacttctgtattgatgagatatccggggtgttgctggtgacgttgcatgttcatggtggacatgtcatccccactgaaattaaatcattactgaaaagcgggaaactgtctgtaaagaaaatgccggtcggtaaacggaatgaattacttcaggattatatctgtagttgtgttttgcgggtggcccgcgagttacttaacctgctccctgatgacatggtgattgtaactgctgtggatgaattgctgaatactgcaacgggctatccggaagagttacctattcttagtgtggctgtaaccaggcaggtactggatcgtctgaatatggatgccattgatccttctgattcaatgaataattttgttcataatatgaactttaaaaaaacgacaggattccgtgccgtgccggaactgaatcccgggcaattcgtgagccgatcgtga

SEQ ID NO: 377868 - DNA, 315 bp, Salmonella enterica
atgtcatcagtatcagtgtttattaaatattcaccagaaactaatttacaaaactctgttactcagattaaagggttagttcatgacagcattcccgatcttgattatgacaaaattagcatagttttacagcctgttcactacctcaatccgggtattaaaattgtaaaaaacgagacagttaaagactggctaaatatttatggtttctggcttgcaatgacgctagtggggggggcatggataattttccttggcagtatttttctaattaaaaataaagaacggaaaagaaaaatttcacagaacggataa

SEQ ID NO: 377869 - DNA, 594 bp, Salmonella enterica
atgtttcatgacaaggagtatcaaattctagttcgtctatatgcttgtcctggtgagtttatacacggacagtactgggcgctgtatgaattaagccactggcttgatgactaccagatgtttccggcgcttcgtccgtcgattgatcatctgctccaccaccacttaggatggaaatggcatacacaagcagcagaaatgtccccgtgccagagacaatggattacctggataccaaaacttcccgtcatgctaacggctttggggctgatatctcttaatagtatagactattttttactaggtgattatcgcagggtgctaattaatctgttaggtgaggtgactgttaatcagcttttttccttatggcacggtgaaaatgccgcgcctacagttgcggcgcatgaattacctgcagtttccttttctttaggactgcaaattttttctcagatagttggtgatgactggattggtaatattattatgcatacgttacctcctatagaatatagcgatgtagagcaattgagacagaatgaattagatgatataaattcaatgctggcacgaattgggaggtttatttga

SEQ ID NO: 377870 - DNA, 726 bp, Salmonella enterica
ttgaacgttaaaaatgaacatattctctttgggtttccggtagaacatctctcttatgcaccagaacctactaaattaataatatcacctgatgacctggcagaatattatcatgtaaataatgacatcgtcagagcccgaggtttagctgccagatctatcagaagaatgcgcaggaagcagcgacaactttgtattgctcagcagcagaagcttgctgaggaaaataaatctcagttaaaacaattgatcagcgaaaatcaaaatgaacgaaaaaaattattggctgagaccgtgaaatggctagttgaggaacaggatatcgagcggcagctatatttttcggcgatgcaaaaagcccgtcaatggactattgaggccctccaactgtgggggattgaagctgattgggatagtgctatctatatgcgcgtcaaaacaatgcttaaacagttccaaaaagaacctaacttagtcctggcgctaccttcgcaggacaaggcaaacgcattcgagcaaaatttattagctgattgtgaatactcacaacatatttttcaggttgtggttgattctaatcttgaatcctggcaggcaacgttaggtaattcgctagttagtgtcttaattgatatgcacgcggaattagatgacattctgcaacaattgcgtagccagcctgtagccagcacagtaatgacggcggaagagaatggacaagattag

SEQ ID NO: 377871 - DNA, 1062 bp, Salmonella enterica
atggacaagattagttattcgcagccggtttcattgtggcatggacaaacccgggaggaacttgagaggaaagttgaaacgcgccagcagttacaggatgcgttacccgcaaatgatattgaggccgcattaagtgaaatgcaggatgtggcgttgcaggataccatggaggatatgagcctgatgctgggaaaccggctaaaaggaaaaatgcaacgtaccctgggttcgggtgatgatgaaaggattgaacgtgatgagcagcttgctttattagcagaacaggtggttggggataaacttgaagctgttctgaataatgtcagcgcgagtggaacagaggatttattaacgctgtttcgtcaggggacgttgaactttagtgaggcagcattattgttggcggctgaagcgggttcgctagcgccaggaagtaagcgtcgtaaacagatctcttcccggttagatgaattacttgcagaacatcaggattgggttttggcgatgtttgctgagctggagttaggctctataaactctgatgcaatgcaatctatgcagcgtattatccgaaagcatcaccaacaggatcaggagggcagtaacccagaaggggtgtggcagtggtttaatgagatcaaaaaatggtcagatcgcgccagccgcattcgcattcttatacatacttttgcatatgaactttctgcaggaggggatggtactgtaagccctcgtctgattacaacattgatggatttgaagaagttactggtgtttctcggtatggaggatatagctcgtagactggctaacgtcattggtctttcagaagatgaagcattaagtgaaatactgcttttgatagaacaacgctggatgtattcggagtggttagcgaaccgaattcaacaacttcgtataaaagataataaacgcgtattgtatcttatcaggatgaacgaggttgttaaatttcttcccgatatctgtttcctggacttacaacaaagaaatcaactgtctgaagctatcgaagagtacatcaaccaattaagccaataa

SEQ ID NO: 377872 - DNA, 267 bp, Salmonella enterica
atgattttgaatttacagatgataagtaagctcgaactatttttctcattttgtggaattcacagaattaatattacctcgcaaaatacattttcagtcggttcctttattgcacaagttaatgccgtggatattggcgcgaaaattgagttggttttgatattaaaaataaatgcgccacggcccgatattgcactaaggatgtgtcaaagtatgcgaccggagtctatttttggagttgttgggagctttttttttcgtcaataa

SEQ ID NO: 377873 - DNA, 2043 bp, Salmonella enterica
atgaagaacgttactttatctgatctggcgaagattagtagatatcagggggcaatcttagctacggtactggttttggccgtatttatgatgatactaccactaccgacagaggtagtggatgtactgattgctttcaatctgatgttttcgcttgtgttattgatggtcgttgtttatttgaataatgctgttgagttttcagtatttccttcgttattacttattactaccttatatcgcctgtctttaactatgagtacttccagattgattttgctacagcatgatgctggcaacattgtctatgctttcggtaatttcgttgttggtggaaacctgaccgttggactaattatcttttctattattaccattgtgcagtttattgttattaccaaggggtctgaacgtgttgctgaggttagcgcacgattctctcttgatggtatgcccggaaagcagatgagtattgatggtgatttacgtgctggctccattaccgttgagcaggcggccatgcgtagggaaatggttcagcacgaaagtaaactgtatggttctatggatggtgccatgaagttcgtaaaaggggatgcgattgccagtatcattgttattttggtaaatatttttggtgggatggcgattggcgtaatgcatgaaggtatgagaatctcagaggcgctttccacctattccatactttctgttggcgatggcctggttgcgcaaatacctgctctattgatctctattaccgccggtgtgctggtcacgcgagtacctggagtaaaaggtaaaacaaatctcgccaccgaactgtttcatcaacttagtggccgcagtatgccacttatcattgcaagctctgttcttgtgattttcgcttttattcctggatttcctgccgcagtatttttacctatggctgctcttattgggatagtcggttatcttgtttaccggcgaggagatcatggtgatgatactcatagcgctgaacaagggaataatggcagcactaatttgtctccgggagtagagccactattagtacgagtgcattcttccattgatgagggggggctctctgatgcgctggaagcattacgctggcgtttttttgaaaattatggaatcgcattaggtaaaattagagttgaaaaattggggagtgaagaggaaggcgacacgcctaaagtggtcttctgtctttatcacgaacctgtctgtgaagtctttctggtggcagaccatccctatatggctacttctggcgcctcgctgacggaggtacaatcgggggtgtacaagcaaaaattgttgtctggcgtggatatatattggttaagtgaagaggccaaagatcaggttttatcccagggggataccgtttatgaatgtgcacgaggtttaacctggtgccttgaagtgatacttgagcgaaatgcgaaagagtttattggcgtacaagagacacgctacctgatggatgctatggagagcaactattcggaactggttaaagaactgcaacgacaggtgcagctaaatcgcgtttctgatgtattacagcgtttagtggaagaaggggtttcgattcgtgacttacgtactatttttgagacgctcattatttggtcaccaaaggaaaaggatattgtcacgttgactgaatatgttcgtgttgcattaaagagacaaatagttaatcggcaacacaaaaagggtacagggaaggtatggatcatcggttctaatatcgaaaatcttattcgtgaatcaatacgacagtctgttgcaggagcttattcggcaatggagccagatgttactcagaatatcacagatcgaatcgcacaggcgcttggtgatcaccagcaggggattgtgttaaccgctattgatacccggcgttacttacgaaaaatgattgagtcggaacattttatgttttctgttctttcatttatggaagtaaatgatgtaaacgaatttgatgttatggggggaattgacctgataggtgatgtctcctga

SEQ ID NO: 377874 - DNA, 1326 bp, Salmonella enterica
atgcgcaaacccgatataggtaaattaattactagtattaatgcgacacaaatgcagggaaagttacatgccccaagagttatacctgttggttacctgacggaggttaatacaacagtgttaaaggcgtatttgccgtgggctcatttgggtgagctttgctatatcggtgcgcagagattactggcagaggtggtgtcactacaggatggttatgcctgcttatctctctttgatatcgctgttggactacggtgtggaacatctgtcgttgcttctggtgctgagtatcaaatcgccgtcggtgattttctgctgggtaaaacgttagatggattaggacgtttgccaaatagcagcgatattccttatggggtggaatatcgtcctttagaatcggccccaccagaccccatggaaagggcattaattgaagagattttacctgtcggtgtcagggcgatcgacgctacactcacctgtggccgtgggcagcggttagggatttttgctgcggccggcggggggaaaagcacgttgttgagtatgctctgcgatggggttgaagctgacgttattgtactagcccttgttggggaacgtggacgtgaagttcgtgaatttctcgaatatacactgagcgactatgctcgctcacgctgtgtcacagtagtggcgacttcagagagagccgcgttagaacgcctgaaagcttctttcgttgcgacaacaatagcagagtatttccgtgatcagggtaaaaacgttgtactcatgatcgattctctcacacgctatgcccgtgcagcgcgagaggtggggttatccagtggtgaaccaccggttgcttcgggatttccaccctccgtttttgcaacgttgccacgtttgcttgaacgagccgggaacggcaaggttggcagcataaccgctttttatacagtgttggttgaaggggacaatatgaatgagccgatagccgatgaggttcgttctattcttgacggtcacattgtattgtcacgaaagcttgccgaggccaatcattatcccgcaatagatgttagcgccagcgttagtagggtgatgcggcaaattgtaactagtgagcatatgaggttggccgggcatttacgaacattaatagccttgtatcgtgaaattgaattactggttcgtgtaggggaatacagagaagggcaggatcctgatgctgataaggcattaaggtgctggcccgtaatacagcagtttctacagcaggccgcgggtaatccacaatcactatcggaaacgctagaattgctgaagttagcagtggaatag

SEQ ID NO: 377875 - DNA, 381 bp, Salmonella enterica
atgcttcagcagcttatgaagattaaacagcatagagaaagaggactcagaaacgaactggctcatacaacgcgtttgcgtcaacaagttgagcaagagatatctctcctgcaacaacatcggaatgaaataaaagataaatggcaattagcatgcctggagttaacgggagtcatagatcacagagtgttaatgagatggagtgaacatatgcatagttatcaattaaaatatgaggctattggacagcaaatttcaatgcagcaacagctccatacgcgactgactcaggaagaaatagagttacaaggcatgttaagacaagtactaagatcacaagataaaataaactatatgattttagaaggcgttgataattga

SEQ ID NO: 377876 - DNA, 405 bp, Salmonella enterica
atgccttacgacatgatattaccttccaggaagataatagtttcgcgggataatgttatagatcctcccatgaagattagttctatcgttttcgaagagaaagagatgttcaggcaaatgtccctgaaatttcagttggctagttttttatcatcttttggtatatgtgttgaaactcattctgaaagggataataacgtctgttatcaggtaaaaagtggctttttttatgacatgttaatatttatttcgtttcatgaagaaactttgctgattatatttaaagtggatacttatgagcaaggatacactcttcaaaaattatcaccagggattgcgaagaaattgtctgcagggtgtgaaacttgcaaagttgaggtggtgcttgaaaatcgaaggttatag

SEQ ID NO: 377877 - DNA, 939 bp, Salmonella enterica
ttgaaaatcgaaggttatagtcatctatttattgaacaatcgacattgattggttctggttattataaaaacaatagtaaatccattcttaatttacgtatgattagtggagagggtatctggtggacatttagatggcatcaacaagagttaaatgcatggtgtgaagaatcttcctggcgtaactggattgaagataaaatacattttttcactttacatgaggtcgatcgccatttccttcaattagtcggtgagtggagtttattgcctgtaagcgatgaaatgaagctcgcagaaatttcactaaaagagataacgggtcaatccagtctcttgccttgctggagtccagtactgactttaaatcaagttgataaaaaatttgagatatatttaattgattggcctgctgatgcacttcgctggttaatcaagggatggacgccattggccgaaacaataggatcttctaaacctttgctgcgttgtccagtcacaataggccgtatgacgattcctttgagaatgctcaagcaatttgtgttgggagcggtaatcattattcagactgacaatcatttaaacgctggtaactattggatgcttgctgctgaaattatcattaaattagttagaaccaacgaggaatatactgtgagtgagattaccacggaagaacagaatgatattattgatgcgaatcctgtattgacctctttagatgatattaatgtgagcatcgcttttgagattggaagtatattaatgtcttttgcagaattagcagctttgaagccgggtagcattataaaatcagagctttctacggcaacaacagtaaatatccgtgttaacggacgagtctttgctactggtgattttattttacttgataatgtaccgggagtccgtgttaataaattattgcaaggatga

SEQ ID NO: 377878 - DNA, 405 bp, Salmonella enterica
gtgaatgactttatccatcaaccttatgcgctaattattttactggtatgtctttctattttgccttttatagtggttagctgtacttcttttttgaaaatagcagttgtgttttcattgctacgaaatgcattagggatacaacagattcctcctaatatggcaatctatggccttgctctcattctaacatttttcataatggcaccagtaggcatgtcaataaacgacaacattcaaaaagagccgttttctatttctgactcgaatttatatgagaatattgatagaacagtaattaagccttatttatcatttttgaaaaaaatacaaaagcgaaacaaattcgttattttagccagatcgggaataagatatggccgaaaaaatatcagcaaagactga

SEQ ID NO: 377879 - DNA, 225 bp, Salmonella enterica
atgctacctgcttttggtattacgcaactagatgaagcatttaaaataggtctactgctgtacttaccattcgtagcaattgacttgattgtgtcaaatatcttgctggcactagggatgatgatggtttcgcctactacgatatccctgccatttaagattatgttgttcattattgcaggtggatggcagtatctgatagagaaatcagtcctttccttttaa

SEQ ID NO: 377880 - DNA, 267 bp, Salmonella enterica
atgatagtgaataatgcagttatagctcatcttggagtggaacttttatggattgttgtatggctttctctacccacagttgcggcagcatctatcgttggggtacttattagccttatacaggctgtaacacaaattcaggatcaaacagttccattcctgattaaactggtagttgtttcaatagtacttgttatgacttataactggatgggaaattctttgattaactataccaatctgatattccagcaaattaacaggtaa

SEQ ID NO: 377881 - DNA, 795 bp, Salmonella enterica
gtgaatgatattctattgagtgtcgtaaaatttggcccgcatttttttatggcttgtttacggccattgggattatttttgataatgccattactggagagtaaaaatatcggtggatcattaattcgtaactcaattatcatgttgttagttgtccccatatatcctgcaatagatgcgagtaattctcttatagaggataatgctataggatttccactttttttggtaatgtgccaggaaattgtgattgggatattgattgggtttgttgcgggaattcctttttgggcaattgattctgctggttttctgattgatactatgcgtggttcatcaatgggcagtatttataacccgactctctctgaatcatcaacgttacttggtgtgtttttttctcaattattgactgttgtcttttttagctgtggtgggatgaatgcactaattacgactttatatgagtcttatgttttatttcctcccggtaaatatattgcctttaatcagcagttgctaatatttatcaagcagcaatgggatttattgtttaatttatttctaaggttttcattgccagcagctgcaattatgttactaactgatgttggtatggggttacttaatagaactgcgcaacagcttaacgttttctttttggcaatgtcgataaaaagtatacttgcattgctggttttaatgataaccattgggttttcgctgagtgatctagggcatgtaatctcaagtaatctattgtcatttcatactctttggggaaacattcaatga

SEQ ID NO: 377882 - DNA, 243 bp, Salmonella enterica
atgtataaaaataacgatgaagccattgattgggaagccaagcgacttcttgatgatggtatctataccgatacagaacaagcctatttagaagccgaaaaaatagtaattaatatacgggaacaagcaaaacagcgacagattaaacaacagttcaagataaaaataaaatcaatcaagaaaaaaattggacaaggttatgattatgctgatgtcccgtattccaacaagagaaaacattga

SEQ ID NO: 377883 - DNA, 285 bp, Salmonella enterica
atgacaacaaaaacaatcaaacaacaaattgcttcggcacaggaacgtctatacttcttggaagctaaaaagaaacaacaaacaaaaaaagaaaatacacgtaagaaaattattttcggtgcagaggttgccaaagtcttagaatgtgatattagttatgtagataaagaattagtctttggggttttgcttaatatacccaatcttcatgagagtgatgttgatgcctacaaagcacaaggccaagcctatatcgaaagtgttttaaataaatccaagtcctaa

SEQ ID NO: 377884 - DNA, 1443 bp, Salmonella enterica
atgagcacagttaagaaaattgataccatttcatcttacttcaaaattcccccttcaatacttgatcaattagatgttgttgatgttctgttagaatcagatacattgctttttattgacccaatgctactccctgaaagtaaacattcagaaatgaaagatgatgcagatcaaaaatacatcgacactttcacaaaaataataaagctgcttagtgcatgcaaaatagataatgacagtgatattgcatggagaactgcaaaaaaattattttcattttccgaaataggctggacatgtctgggttatggctcatcagccaaaggctcaggatttggacctcagcttgttaataatacgatgaaaactgctcatcaaattgtaagtatggatattgatgatcccgatttattcatggttatgtcattatttgaagaaggtattggggcggaccgaattagtgacatgaccaccaatataatatttgatgccttagttaaattttcagaaagagtaaacataacacttaagatcccaacaaaagaattcacttttaaagggaataaatacaacgccccccacaatccattaacaaataagccactaatattagttcctaaagatattgtccgcgacttaccaatttctacagattggagtggtgctgtccacacaatgaaggagaacactgacttaagagacagaatcaatacaaatattggtaatctcctcgcatctatgaccaaaaagcaaaaagatgaagccaaacgtcgagctttagagaaaaaagaatattttgaggatttgctaacattaataaaagaagtagaaaaagagccctacgatttcaaagcggatagaaacggtgaattattctggttaagattggcatcttcaatagacaagaaatatccgtttaatctttcaggatataataaaaaactaactttggatgatgttgaacatcttgtaagcgacattttaaatcaattcaaggatctcattgaaaacaaagggttatggaaagaaatgtgggctgatgataaaaagccacgtaaagaaaaagctgcacaacgtttgctatttgctgttgcatattcatattgtaaagcaaacaacttagatataagtcctgaagccgattcaggaaatggccccgttgactttaagctttcacaaggctttgaacaaaaagtattagtggaagtaaaactctcgtctaatggaaagttattgcacggatatgaaaagcagcttgaaatttataaaaaaggggatgacactgaacgtgcatttttcgtaatagttgatattggctatatcggagacaaatatcaaaaagttcagcaagccagaattgctgccgaaaaagaaggaaagaaagtttcaaaaattattcacatcgatgcccaacaaaaggactccgccagcaaacgcatttaa

SEQ ID NO: 377885 - DNA, 327 bp, Salmonella enterica
atgggcacaccacgatttacacctgaatttaaggaagaagccgtccgtcagataacggaacgcggttattccgttgctgaagtatccgaccattttggcgtttctgcgcacaacctctacaagtggctacgggctatcaagcctgataacagcgagcagcatgctcgggatttactggaagccaaaagcgagatcctgaaactacgggcgcagctaaaacgcaccgaagaagaacgggatatcctgaaaaaggccgcgcggtactttgcaagggagcccgacagaagtaccgctttatcaacgagcaccgcactgtatggggtgtga

SEQ ID NO: 377886 - DNA, 222 bp, Salmonella enterica
atgacgatgtgtcgggtactgaatgtcgcccgggctgggttctatgcgtggctgcacaacccggtctcggcacgtgataaagataaccagcgtttgctgatgcttatccgtgactcatattcactgagcggatgcgtatatggttaccggcgggttcatggcgacctgaacgaaatcggtgaaacctgcggtaaaaaacgggggggcgtatcatgcaactga

SEQ ID NO: 377887 - DNA, 381 bp, Salmonella enterica
atgcaactgaaccggatcaaagccgtacgcggctataaagcgccacgtcgtatcgccggccgaccttcagtggtagctcctcatcgcgtacagcggcactttactgttgtccgggacactcagatctgggacacagacatcacttacatccgcacctggcagggttggttgtatctggcggtggttatcgatctcttcgcccgtaacgtggtcggctggtcgatgaagcccactctctcacgtgaactggcactcgacacgctgatgatggccgtctggcgtcgaaaacctgacggcgaggtcatcgtacatagcgatagtaataatgccagtgtcagtttttatcatcactcagtttgctgtttaaccggattggtgtga

SEQ ID NO: 377888 - DNA, 996 bp, Salmonella enterica
atggctgataaagttaccgaagccgccattgtgggtggcgtggatacacataaagatctgcacgttgctgctgtcgtggatcagaacaacaaagttctgggaacccggtatttctccacaacacggcaaggttaccggcaggtgctggcatggatgacctcatttggggtgttaaagagaattggtgttgaatgcacaggcacctatggctcagaactgcttcgctattgtcagaacgctcgtttagcagttcctgaggtgactgcgccagatcggatggaacgatgcaaacgaggcaaaagtgacacaattgatgctgagtgtgctgctcatgcagcattctcggatatcaggacagttacgccaaaaacgcgtgatggcatgattgaatctctcagggtgttaaaaacctgccgaaaaacagcgatatcagcccgcagagtcgctctccagattatccatttcaatattatctctgctccggatgaattacgtgaacagcttagaaatatgacgcgcatgcagctcatcaggactctgggatccagtcggcctgatgccagtgaataccacaacgttacaaacacttatcgtattgcattgaagtccttggcccgacgttatctcgaattacatgatgaaatcgctgatctggatgtcctgattgcggcgattgtcgacgaactggcacctgaactgattaaacgtaatggtgttgggtacgaaagcgcttcgcagttgctgatcactgccggagataatccccaacgactaagctctgaatcaggatttgcagcactgtgtggtgtcagccctgttcctgtctcttctgaaaaacgaaccgctaccgacttaatcggggcggagatcgtgctgcgaatagtgcacttcatattatcgccatcggacgtttacgaactgacgcaaaaactaaagaatatgtcgcccggcgagtggctgaagggcatacaaaaatggaagcaatacgctgtctga

SEQ ID NO: 377889 - DNA, 1068 bp, Salmonella enterica
atgactgtaactataggaaaaccttcagactttggcatatcgtctagggatgtatgcaacttctacagcgaaaattggcctcgtaaaatagctctaagcgatgataaattttacaactggcaatttgtgaacaattcatcaaactttggtgttgatgaatgctgcatagctgttactgatgatgaaattatcggcgtaatggggttaaactctcgcgatttctatctgtcagggaagaagaaaaaaggggcagagttaacaacatgggtagtatcggagaaacacaggaacaaaggttctggcccatcaatgatatcgtatctgaagaatacctatgaggttatgacagggatgggaatttctcttgccgcacttccagtatatctgcgtagtggattcagatatataaaatcaatccctaggcatgttcatgtaataaactgggatgcgatagagaattttgttgaaggggctcctcttgctaaaaaatatgcaagaggtcagtttatttctcataaatacaaatcaggaaacgtagatgatgattttattgacgggattaatacttcactaagtagtagatataatttcttttcaaggtcttcagcagatgttagatggaggtatgatcagcatccttatttcaactatcacacatattcagttaatgataactgtcatgccacagtaagaatagacaggaatatagatggatttgttatggcacattgtgttgatatttttggagatgaatcatcatttgcgtctgcagtaacttcggcaatagaatacgctgatgctcatggcgctgatgctatagactttttctcaactaacgcaacactgaacgctacaatgtcagcaatgggacttttttctacattagatcatgacttctttaaatttcctcatctctttcaccctgtagaaatcagaagccctgcaacaacttctctaatagtgtggtcaaaaaatgaattgtgtgggatgcttgatgtgtctatgttacacatcacaaaacaagatgcagactttgataggccaacaattcatgggatgaaaaaatga

SEQ ID NO: 377890 - DNA, 966 bp, Salmonella enterica
atgagtaatttaactgttgtaatgtatcattatgttaggcctattgagcggtcaagataccccgcaattaaaggcattgagcttaacgacttcaaggagcaggtaggatatatcaaaaaaaactacaatcctgtaactattgaagaggtatatgccagctactatgagcagcatgacctgccacctaatgcagtccttctgacgtttgatgatgcctaccttgatcatttcaaatatgcatatccaatcctcaagaaaaacggaatacagggatgcttttatactccagccaaaacaatagaagaaaaagaaattcttgatgtaaacaaaatacattttattctcgcagcttgtacagatatttcaaaactacttgctgatacaaaatcactttttgagctactccgcgaaggatatgatgtaaaagaatttcatgaatattttgtagatctggcaattgaaaatagatttgatacaagagaagtcatttttataaaacgattcctgcaggtagcactaccagaagagctacgctggaaaatttgcctttcactttttaacactcatgtaaaagtgtcacaagaggcattctgcgaagagctatatatgactaaggatcagctaagccacatggcagacgatggcatgcatattggcagccatggttataatcattattggtggaacaagctcgataacagaaccctaaacgatgagatagataaatctctgacattccttaagtcaattggtgcatatagcgacaactggacggcgtgctacccctacggctcatcaagccagagtgttaccaacctgctacgtgaaaaaggatgcaaattggcatttactactgtagttgatgtggctaactctaaatatgataatccgttacttatccctaggcttgacactaatgatttaccaaaggaatctgaatccaatacaaatcaatggtatagatga

SEQ ID NO: 377891 - DNA, 867 bp, Salmonella enterica
atgaagaacacagactcatattatgatgaaatcagaacaaaaatagtggatgctgcaaaagaggatgttgataaaaacgagatactctgggctattgctgatagcggcacagccctgatcgataccctgacaaacatacctgtatttaatgctaccaccacaatcgtcaaagaactccatagcttaatcaataaccatcccgtaatacctgtgccaaatccatggtttgtatggaatcaacatgatgataactccagtccagaaactattaagtacctgcgaaaaagaggttacgtttcggcagcgtcatccgctattgctatcgcaggggctggtggttccctggtgacatgcgttgatgtgggaactgtcggccagggaggagcagcttgcgcatcgacgatgaggcatttagcgggttttcgggacattgcgatgaagtataaagaaagcgccaccattcagtcctggcttgatgttcttatcactatgaagaatttaaaactagccgtccgtggaggacaagtcagcgttgctgtattgtctgccgtgccagtattatctactgccctatccattattggtagctcgttaagctcagcagcaaaagtggggataaatctcaagtattctaatgtatgccgctacactgcaatagatttacactggcgggctatgcaagaaacaatactgattgaaactttcagccgacacaatgatgactctggtccggcaagggcaattctctttgaattatttgaacgcaaaggccttactggatttgtatggggaaagcatcatgttgataaattaattaaggaacctgcaggctggatggcaattgcagataaattgctcattatttaa

SEQ ID NO: 377892 - DNA, 135 bp, Salmonella enterica
atggtgaattaccgtcttatatcactggcgctgacattgccggattcacaactctattatctggtcgatgcctcttatcagcaggcggtaaatgcgttgtcggaagataaacgcaaacaactgccgcagtcctga

SEQ ID NO: 377893 - DNA, 1431 bp, Salmonella enterica
ttgaacgtctccgctgccttacgccaggctgtcgtccgtacgccctggtatgccaaacgcaagagttacaaggtgttgttctggcgtgaaatcaccccacttgctatccccatttttctggagaatacctgtgttctgctgatgggcgtgctcagcacttttcttgtcagctggctgggcaaggaagcaatggcgggagtggggcttgccgacagttttaacatggtgattatggctttttttgccgctatcgatctggggacgacggttgttgtcgcctttagtctgggtaaacgtgaccgtcgacgcgccagggcggccgccaggcagtcgctggtgatcatgacgctgtttgccgtattgctggcggctctcatacactattttggcaaacagattattgatgtcgtcgccggagaagctactgcagatgtaaaagatctggcgttaatctatctggaattaacggtgctcagttatccggcggccgctattgctctgattggcagcggtgccttgcgtggcgctggaaatacgaaaatccccctgctgattaatggcggcatgaatattctgaacattattatcagcagcattcttatctacgggattttctcctggcaggggctcggctttattggcgcagggttggggttgactatctcgcgttacattggcgctatcgcaattatctgggttttaatgattgggtttaaccccgcgctacgtatcccccttaaaagttattttaaacccttaaactttgccattatttgggaagtgatgggcataggggtgcctgccagcgttgagtcggttttatttaatagcgggaaattacttacacagatgtttgttgctggtatgggcaccagcgtcatcgccggtaattttattgcattctccattgcggcgttaattaaccttccgggcaatgccttaggttcggcatccaccatcattacggggcgtcggttgggaaatgggcagatagcccaggccgagctccagcttcgccacgtgttctggctttctaccataggcctcacggccatcgcgtggcttagcgcgcctttcgccggtattatggcgtcattttatacccacgacccggacgtcaaagatgtcgtggtgatccttatctggctgaatgcggcatttatgcctatctgggccgcctcatgggtactgcctgccggttttaaaggcgcacgcgacgcgcgtttcgccatgtgggtctcgatgcttggaatgtggggttgccgcgttatcgcaggctatgtactgggaatattacttggctggggcgtggttggtgtctggctggggatgtttttcgactggaccgtacgcgccgttctcttttactggagaatggtcagcggacgctggctatggaaatatccacgccctgaacgaaaaacaaggtga

SEQ ID NO: 377894 - DNA, 2598 bp, Salmonella enterica
atgcaattagattttacccttaatttccataacgacacctggtaccccactgtcgatatcagtggttttaaatccaccactggcgccagcgccgatattcaggagaaaatgatcctgacgtttagcgcgccgggtaaaattaccgccggagatatcaccatatcgacgaacccgtggtgtgaattaaaaacccatattgaaaccagtgaaatttccagcggcgtttttgatagtaaactgacgattaccgccgccgatggttccgccctgggtaatgccatttcaactattcatatgggcgttaatgcctcctccgataccgcgccaaaatgggaaaccttcagcgacgctttcaccgccgccgctgacgaagaggcggacgtggcaggtgagctggcggtcacctgcgccgccttcccggctggactggaaaacaccgttctggaactggttttagttcgcggtgaaaaaagcgaaacgctccagccaaaagcgggcatcacctggttcgatattgacgctggcgcgtacgcggttaccgctgcggagctgcgtaccgctgaaggtactattcgcgcagcggtgcaattaagcgcatcggagctgatcatcactaaaggccagcgcactcagcttgatatcacctttgcccaggcggagcgcagtactactctggacctggcagtgaatttaccagccactcacgcgctgtataatgaagatctcagcgtagtttatatggaaaatggcgttgctaaacagcgtcatactatgcgcgtaggtcaaaagcagcgcctggaacttttgccggttaccggaacctattcggcgcgcatcgatgatgtcaaactgaacaatatccactacacctttgatgtggcgagcggcgcactggataatcagctccacgatatcgccttcaccagcactcaccagaacgatgaatctcagtcagcctcaacgaagctgaccatcagcatcgacgcggaaaaaacggttgcttctaccttctctctacgtcttgtggatggcagcacaactccgcgccagtatctcttcaccgatctggcaatgaaagcgggcagtctcacgccgtcggttgaactggcgccgggcctttatcaggttgaatccgcgaccgtgatccataacggcatcgtttactatattgatgtcgctccacagacgctgagcgttgagaaaaataccgcgctgaccttagcggtaacccttactgaaggggcgaatctgcgtgtcaaaggttttcctgatttcctgagcttcggcggttgcgccaatatgtcgcccagcaacgtggacgacctggccgaagctcgtgtctcctccctgttcaaatactccggcgatgacggtatgggagacgcttccgcttatctggacccgacgaaagaaccgacgacaaaaatcattcagatggcgcgcgatgttgctgccaaaaccggcgatagcgtgctgccggtaatggtctcttacacctgcaacctgtcgctgggtgatgtagaaaacatcattgacgatccggaacgtcatcagttcagctttgctaatttcatccaggcgctgcaaatggcgcaagccatgaaagatgatgaacatctggtaccggctggttttatcgtcaacccggattacctgggcgaatgccagaaatacggtttctctccagactatgctattccggtacgtcaaccgctggcgaaagcgctggcgcatcacggtgtggatatcgccgttccggcctcgattaccgatacgctgaaaggctatatcaaaggcgttaactggttggtgcgcgttattgcccctgacgtggtgttgggctggcaggttaacttgtggagcgtcggcggttcacagtgggtttataacgatttcacctacgacgatgtgtttgatgccgtagacggaaccaaaaagaaaatgaccatcaacccgacgctggcgggcaagcttaccgccgagtacgcgctgctggtcggcgtattcgagaatatcgaatacaccgacgccaaaggagccgtgattatggctaagggcgcggactttatggccgcagaccgctatgaagcggacgacttcaccgctcgcgcctataaaaacggttactgctattcgccgtttgagtgggaccgtacctttgatttctgcgccgcgctgagccgctatttgcgccagccggtgctgccgtggcaggttccggccagccgtctggctaccgtttccgagtcggttggcgcgttagaagagaaattctgggggaccggcggcagctatctgatgggccacgctgaaattggtagcgcagtggaagcaattaatgctgatctgctgaacattgagttccttgatgttcacgccagcatgatgggcaaaactccacgcgagctattccagcgtcacaagtgggatttcactgagcctaagtacatcgatttcccgtcacgcggaatattccacgtacaggttggcggcggggcaaccacaggcgtagtgagcgcggtcaataacaacagcagccgttggatgcgcgcgaagctggcggcctatcgtgataatccgctaaaatttgaagtgtga

SEQ ID NO: 377895 - DNA, 294 bp, Salmonella enterica
atggaaggcgaaaatctcgaacataatttgcagcccacggcggtactaaaagctctggccgcagcccgcagatgttctcccgcgcagctagccgtcgcctggctgctgtctcgcggggatgatatcgtgccggttgtcggtatgagtcggccagatcgcgtggcggaaaaccttcaggcgtttgatatcacattgacggatgaggaacagtttacgctggatagcgccttctcacctgacgctattattagctacaggtatccggcgatagtgatgaagtttgcagcacgataa

SEQ ID NO: 377896 - DNA, 453 bp, Salmonella enterica
gtggtcgcggctcaccagccggcgcagcagctccccgccgcgacggttatcctccgggtcggacgagcgcgtcagcgcctccgcgtagcccagcgccgccccgcggttttccgggtccagacggtaagcattcgcatacgcccctgtggcggtaccggcgtcgcccagcgccatgccggcccggccgagcatcatccagccttcggcgttgccggggtcgcgctgcaggcgcgtgcgcagccccagcgccagccgcgccatctcttcctcattcagcggctgcgccgccgggtccagcgccctgtccagcagcccgggcgcctgcgccgtcgcctgctgccaggccctcacctgcggataactgccggtcagggcgtagccgccggcgctgaccgccagcgcgatgacggcccccggcacgtaaacgccccacccggcgcgtgcgggcgatga

SEQ ID NO: 377897 - DNA, 564 bp, Salmonella enterica
gtggcgttgacagcacttaccggacaactacagctggcagggaaagcactgcttgataattcgctaccgtcctcatggattagcaacacacaatttaaacttagttctaccgcacagggtggggatggccattatagctgggaatcatcgaacgaggatattgcttcagtcgatcaaaatggcgtcgtaacgatcaaggatcaattagctaactttactatccgtattaccagtctgggaaggcaatctgatgatgccagctcgttgcatatagcaaaagggaatgaaatgttacatgtttcctcatcactggcgacctacgatgatacaaaagctaactgtgaaaaaatgggtcgcaaaataccagcattggctgatttccaacgcataacggcaatgtgggggaatatggatagttacccaacttatcaggcaatgaataaatatgtttgggcggagagcgagacaacgagtgatgtcgggacgggttaccgcatgagagatggtgccaattatcctaacttgctaaaaacagatcctgaatatcagggatgcctggaataa

SEQ ID NO: 377898 - DNA, 489 bp, Salmonella enterica
atgaatccagaaacattccatctgcttaatgccttttatgagcagacacttgggaaaccgttagaatcatgcagcctggtaggcttcaacgggcaagataccgttaaaattctctggtctctcaatgagatttttactccccatttgcaccgtctaaaaaccctccggtataaagcgcaatacgaaccagaagcggacgaagcgatcaaaaatcttgtattgaacggcgatgactggtcatcacttcctcttacggttttacgtatcctcttcgaaaggcatcaacagggtctcttgctttgtattggtaacgccactggggaaaaccgggttattgcgtatgctccggcagatctgaatgacaatacccgggcaactttcgtaatcgcttttctactacatgcaatggttcttccttttccagtagccgacgaatcacaactcgacattgactcaatgcttgagtatcaatccgacgcgttgcattaa

SEQ ID NO: 377899 - DNA, 1065 bp, Salmonella enterica
atgaataatggacgtatcgcttgtaaactatcaaggcctgtcattggtgtttttttattttctttctctatccatgcgtttggggcaactgagtgtttttttaatggtgcaaaaacggatacattaacctttgcatcacaatcagttgatattacttcccccgtttctgatacaaaaattttgaaagataatatcaaaggttctgtaatagtaactacttcatgtaatgctggtcagggagggcaagacttaaactcaaagcaatcaggggttgcggtgacaagtaccactattaatggtgttaaagtagcattatttcccacaaacgttaccggaattgtatatggaataaaattcgtctcgaattcagagccaccaacgggttacattgcaatgagtacggactacataacggttttttcagttgatgatgatcatgataaagagtactggaaaggtaagtcaggtcatttcgacttgacacttttccagacccgagattatgtaccagggcaggggcataccataacacctaacgcaaatatggttggtgatttccgaattggttcccagactgatgcgcaggatattcagattaataataattcattcactcttaacatcccgcaaccgacatgtgatgcggccacgcttgaaaattcagataatgcatcagggactcaggttaatcttggtgattactatacgagtgaactgattggtaataaacatccgaaaaaaattccatttactataaaattaaccggctgtggtggtgttaatcatctgattaccaaactaacgtcccaatacgtatcaccttatagcaatagtatgttggctgatatcaataatgcacagcgtggtgtcggtgtacagatatactcaacgaatgatgtcgcattgattccaaatgatgctaatagttattattctgtccaggattcaagcacacctgatactcgcgaggctaatttttatgcagtgctaagtgacgatgggaagggagtaataaccacaggaacatttaaagctatgggaacatttacctttacttataattga

SEQ ID NO: 377900 - DNA, 591 bp, Salmonella enterica
atgaattatcgacattcactatggtactgttgccttctgactatgcttatctttcagatagataccgtaaggatagcgcattctgcagagcaaactctttcgttaaatgtgaaagcaaatgtggttgaaaatagttgtaagatttctttttccgactccgggtctgttgaccttgggaagcaaagtattgctgcgattgaaagcgttgactcttttaccaattatatcggtaatggaaagcatttttctattaacgtatcagattgctctccgctgagtagtggtggtatcagcaagcttatttttaacttttcccctcaatcaggtactttccccgtagaaagttctcaggcatttgctaatgatatattacctgctgatggaggcgcaactggcgtagggttagttatctttgctgaacagcaggataaaaatgtgcttgatgaatccgggcattcgaatgctatttttgatgtaacatctgatacctatctaaatagttatggtttttttgcgcgcttgcaaaaaattaacactattacagagggggattttacgacgcatgtgactgtagaggtaacttatgaataa

SEQ ID NO: 377901 - DNA, 549 bp, Salmonella enterica
atgcttaatctgcagagaatgatacttgccggagtattggtgtcatcatctcaaattagtttcgctcttactgatactgcttcaataacggcaacatttaattcgacaatagaaagtgggacttgcaaagcagttttacatgatgatgctggtaacttagttgatacactggattttggtaatatgtatatttctgagtttaacagtaataaaccaactaaaaattttagtattgctcttaatgattgccaggcagtaacgaaagttaccattgcgccatcctcctcctctctatgtactaatggtgatggacaggaagatgcttttgccaatacgaatggtgatgccaaagggattgctgttgaattatggagtggcgaaccagatgccggtacgaaatttatctgctcgcaatcatcaggacaaagtttttctgtgaccgatgatacgacgattttaccgatgagcatacgaatgataccgactgaaaccacattacaggccgggagttttgatacaactcttacacttatcgttacatacccgtag

SEQ ID NO: 377902 - DNA, 267 bp, Salmonella enterica
gtgggctcggagatgtgtataagagacagctctttggccgggagcgatggcggcgcaaaaaatataggattaactattgcccgccagactgcaccggataccccttttaccatcaacagtactgcagacgatggagggttggtgtggacccaggatgaaattcacagcggtactgtacctttaattgctcgtttgattagcacttccgataaaatatcagcagggaattttagtactattgctactttcaattttacctatgaataa

SEQ ID NO: 377903 - DNA, 624 bp, Salmonella enterica
ttgtttgtgatggatatttatcatcagcctgcgcaggctcgcgatgaagcattgtatcactatgcagtcatgctggtggaaaccgtgcaggaaaagctgaaagcagcaaaagaacacgatgattttattaatcatgtcatttatgcacagtgcgccatgatggatgatgctgtactcaacactgcctcctcgctggagaactccgtctggctgcataatccgctgcaggcccgttttgtcatgcagatgcgggctggcgaggtgatgtttgagcgcgtgcgggagctgttgcatcaggccgcaccggacccacgcctgctggttttgtaccagcgtttattcggcatggggttcagtcagcgctggagtgaacggctccgggacaaaatgcctgacggccggtataagcgcgaatatgcactggaatcccttaatgcgctggtgcctgccggtggacagcccttatctgcgccgctggtggtggagcgccgcccgacggtgcgcggcacgctgcttcactcccgtctggcgcatatcgttctggcgctgctggtgaccagcgctctgagtgccggactgcaggtttccctgcaccacgtattacagatggccctgccgggctga

SEQ ID NO: 377904 - DNA, 2376 bp, Salmonella enterica
atgaccactgtctctcccgttctggatgccctgaccctgaaccgttatcacctgaaggtgaaaggctgcaccgcgccgctggacgtggagtcatttcagggacgcgaaggtttaagcacccgctaccgttatgacgtggtgctgaccagtgctgataaggatatcgacccgtcggtgatgctgatgaagaacgtcaccttcattatgcagaccctgccggaggcggcgtttcgccggaccattgcgccggaagtccggcgcaccgtgtacggcgtcatcacccgtttctctcgtctttccgtttcggcggatgaagccacctaccgcctgacgtttgagccgcgcctctccctgctggataacagccgccgcagcgccatttaccagaatatgtcggtcccggaggtggtggaaaaaatcctgcggaagaaccacaactggccgggctggttgtttgagttccgcctgagtaatacctggccgtcgagggagattatcacccagttcatgctctccgatgcggagtttatcgcccgactgctcagtgaagtcggtatctggtttaacttcacccaggacagtgaaaccgggcatgaagtggtgctgttcggggattcaggaaagggctggcagtatgacgtgagcgtcccggcggtgaacccggcggggatgcacgacaaccgtgcggagtcggtgtggaatttacaggcgcatcaccaggtggcggaacgttcagtcagtatgcatgactataactaccgtaccgctgacgccatcatgaacgcggatgcggacctgacccacgacgatgacaaaaccacttacggcaacgattaccactataccgatggtttcctgagcgaaggcgaccagtacaaccgcccggacagcaataacaccgaaagcggctatttctacgcccgcctgcgtcacgaacgtcagttgaaccgccagcaccggctgagcctcgaaagtaattcaacgctgattgcgcccggtcagatactgaaagccgaaggcgacacctcacaggcttttgcaaacgggatgctggtgaccgccatcgaatcctcagccagtcgtgactcgcactataagctgaaagccgaagggattgcctggcgggatgcggtcagtttctgcccgccggaacagccccgtgcccgcatcaccgtcccgctgacggcgcgtatcaccagttcacaggccagtgatatctacagccatatcgacaaaatgggccgctaccgggtgcgttttgacttcgataaagattcgtggccgcagggcggcgaaagcccgtggctgcgccgtgcccgcgattatgccggtgacaatttcggtctgcacctgccgctgatacagggcaccgaagtggcggtgatgtttgacggcggtcacccggacaagccatttattgcctggtcgctgcatgactcgcgtcatcccgaccacgtcaccatcgaaaattacacacgcaacatccttctcacgcctgcagccaatgaaatgcgcctgcaggatgagcgcggaaaagagaatatccacctctccacgccgcattccggtaagacacaattaaacctgggatttaacgtccaggattctgatgccagggcgctgcgtggtgaaggggctgaactgcgcactgacggtcacggtgtgttccgcgccgcgaaaggcattttcatcaccgccgacggccagcaacaggctgacggtccgatgcttgatatgcaggcagcggtcagcgagctggaagcggcgattcaggaagccagcagtctcagagccgcagccgaaatggcaaaagcggaactggccgacgtgcagaaacagaccgacctgctcaacagcacgctgaagaacctgcaacaacaggcgctgctgctctcggccccgtcgggtatcgcacaggtcaccccgtccagcatccagcttgccgccggtcagaacctgattgccaccaccggccaggatgcggatatcagcatcggcaaaaagctgtgtatcgccgtgagcgagaccctcagtctgtttgcgaaacagctcggcatcaaactgtttgctgccgccggaaaggtggagattcaggcgcagagtgatgcactggatatgttcgcgatgaaggatatacagataagcagtcagagcggcaaggtcacggtctcggcacaaaccgaactgctgctggagtgcggtggcgcatggatacagatgaaaggcgggagtatcaccctgggcggctccggtaacgtcacggtgaaggccggaacgctggagaagctgggggcggcatcgatgcagggcagtatcagcctgccggagggctgttcaacaatgaaggcgcctaaagatgcggctgagccactgtga

SEQ ID NO: 377905 - DNA, 348 bp, Salmonella enterica
atgcggctgagccactgtgaggacgaccctgtgactatcatgtacgatttcagtccgcaggccgtcacgcaacaggcggacgttttgctgactcaggtgcaggccgccatcactgagcgtcaggaatatgtatacctgcttatcgaccgggaggcattgccggaagatatgatgcacccgtttatttgcgcactgatggaccagcgcccggtgccggtcacgctgccgcaccgcaacctgagcatggaccgccatccctggctgataccactcgacctgacgcaggctacccatcacgccctgctggagagcagcatccgtcatgcctgtcaacgccacgatgtttga

SEQ ID NO: 377906 - DNA, 204 bp, Salmonella enterica
atgtttaaattggctctattagatatttatgggggactgaaaaaaattcagttctggaattatatggcctggcaagagattattattcgttatcgtcgcagtgtgcttggaccattttggataacagctagtacggccatctatgtagtatctatttcaatagtattttcgacattgttcagcctgtctcttatacacatctga

SEQ ID NO: 377907 - DNA, 705 bp, Salmonella enterica
gtgattattatcccaatggctgggctcagcagccgtttttttaaagcagggtacactaaacccaaatatgaattaaaagcacacgataaaaccttatttgagtgggcagtcaaaacttttgaacagtactatcagtcagaaaaatttatttttatctgccgtgatgtgtacgatacaccactgtttgttaaagctgaactgcaacatatgggaattaaagactacgaagtcgttgttctgactgctgaaacccgcggtcaggcagaaacggttttcctggccttggataaggtgcctaataatgaacctatcgttatctttaatatagatacccataagaaacattttgagtttgcaactgaagagaatgatgcttacctggaagtgtttaaaggggaaggagagcactggtcttttgcgctgcctaaaagtaataccactttggtagagcgtacaactgaaaaagagcgaatatctgatctatgctcaaatggtatgtacgggtttaaagataaagaaatatttattaacgcttacattgagctgattcggagtgatccacgtgaactttatattgcacctatgtttaattttatgatcgctaaaggaatgcgtgtacggtataagttagttaagcacgatgatcatatctttatggggacaccaaccgaatatattgattttttaggtgcaacgaatgtttaa

SEQ ID NO: 377908 - DNA, 1545 bp, Salmonella enterica
atgattataattttgtctgcacagtatgtcgaccaagatttacgtgctgaatttggtgaaattccgcctacttttctgcctgttgggaataagcggttatacagttatcaaattaaaaatatccgtaatgaaaatcctgatgaaaaaatctgcatgacactacccaaaaacttcccaattggctcttgggataaacaggcgctgacggaagctaatatcaatattattcagattgatgaaaatttttctcttggtcagtccattgcgttttgcctggcatcagcctgtacggcggaagacgatgatggcgttattatttattacggagatacattattaagaaacccagtaaatttgcagaatatgggtaaaaatgtgatctatactgctcgctcagattttaactatgtctggatgaagataaacgatggtttcgaaagcagcgatgccgttttctgtggtgtgctcagcatcggcaacccgcagttattgattcgtagcctcatcagtaccaattttgactttacgaaaagcctttttaagtacaatgaaacaaaccagtttgtacaagagcacaggagcgattggctggattttggtcacttgaacaccttctatgactctaaaacaatagtgaccactgagcgggcatttaacgaacttataattaacaaatattttgtaaagaaacgctcacagaaaaaaaagaaattacatgcggaagcgaactggttcagtaatgtgccggaagagatggcatattatgcagcaatgttgattagtcatggtgaagaagataacggctattgttacaagctggagtatctttatagcccaacactgactgagttatttgtttatggcaatcatccgcaggctatctggggacaaataattaattcgtgcttccattttattgagcgcagctatgaaattcgtaacccagggccttcagtagatttttataaatctcttatcagtaaaaatgaaactcgcctggatgagtttattgcggctaatccccgttttggcaacgttgttaaggatgccgaagggaaccattttatgctgaaagagattttggcagaaattcataaagccatcaatcctgaatcccgttcatcctttgtccatggggatttctgcttcagtaatatcctttatgacttcaagaaaaatgatatcaaagtcattgacccgcgcggtatcgactttgacggcaatttaagcatttatggcgatattcgctacgatctggctaaaattctgcattccgcgattggtaaatatgactatattgtttctgatcgcttccatatacaggacgacggtgaaacgttgattctggagcttccggaaagtagcatagatttaactaagctaattaagaaacaatttgaaacgtccagtttttcttatacggaaattttggctttaaccgcaacgctatttttatctatgctgcctttgcattatgaccacccaaatagacaacaggcatttgttgcaacagcgattaatttatacaaggaattaactaagtga

SEQ ID NO: 377909 - DNA, 375 bp, Salmonella enterica
atgaaaaaaattattattgatattgatatgaccttaactaagggaaaaggacctggaggttatgaagatgcgttggtaaataaagaccttgttgttaaattaaaagaatataaagaacaaggtttcatgattgtattgaatactagccgtaatatgaattcctataataataatatcgggttgattaataaaaacaccctgccaatacttattaagtggcttgaagtgaatagcattccttacgacgaaatttatgtgggtaaaccttggtgtggtcatgaaggcttctatgtggatgataaagcaatccgtcccagtgaatttattaattattcctatgatgagattgttgagattttaaggaaagaaaaatga

SEQ ID NO: 377910 - DNA, 774 bp, Salmonella enterica
atgcctgattattacaaacatatttttttagtgcctttaaaagaagtgaattatgatttattgaataaaataaaagagttgtcgcgctataaaacacagcaatttggttttttagtcagtatacaggacgtggatagttataagcaatgcctggcattctttcactcaaatcacaatatttatgttattaatcctgagcaaagctataacagaactcatcactggggctatattatccaatatgccaaaggaaatataaaattcgatactttttcatactatttttttggtgatgaaattaatcttgataaatttccaaatataacatgtcggaatgatatatatattaacgattattacatcgataactggggaaacgttaaagagaatgcttccgcgaagcagttggctagtaaatcatttacatatgtgctaaagaaaaactttctttttggtaagcccatgctggctccattgcaaaaaattatctttagccggacaatggcaggttctatcttttttgatagccagcattcttatgtcagtgatcagttgatgatctatcatttaattaacgatggggcaaaagcaaagtttattaagcagcctttttataagcttaataaaaaggctagagcattttcaaattgtataagccttatagatatgcttaagcagcaaatttacctctatattaaattacgctgcttcgctggggtccccatgattatgctacgcacaatagcaaagcatattttttacagaactaattaa

SEQ ID NO: 377911 - DNA, 513 bp, Salmonella enterica
atgtgcgatcgcgttgctactgccttcttgcaaccactgtttgatgttgcagttactatacctactcgagaaacagaaagtgggataacaattggggatgtatgtgggcgcttagactatgtgaaacctggaggaagcacactggcagaccgtggtgtatataccccagaaacattacacagagaataccttcaaaaagtcgcctccgatgagctcgatgagcaaattgccgaggggtatatcaaaggtattgctgatgaggctccttcagtaataacgcttaacatgcgtgctgccagcgattgcgtgatggagtttattgcccgtaaatatccattccgtcatgactcaaatagcaaacgaactcgatcgattttctcacttgctgctaatgaagaagatttcatgaacgaatcagactttgagcgtgcacataatcctcattttggtcgaggattaatagagccgcttatgggcatgccgtgttttagcaacaaggagatatctaaataa

SEQ ID NO: 377912 - DNA, 585 bp, Salmonella enterica
atgcctaaagatgaatataatttggcggtaattcaatcaaggttacttccagccagaccgggtttaaagtttaaaacagatatggccaatgatgcgttcattatcttggagctcagaaactatagtagcaacccaattatattcacctcagcaaaagtagaggttatacgtagtcatgatatatcaacaaccggagcatatgggcgtgaagcctgcttactttctaatgatccaaatagtaatcgtgggcctgtaacaattgagcccggtcaaaccaagtggattgggggcgctctggcaattagatttaagggcctcctggaatggttcccaaggaaagaattagaaagcctttttcttcacgaaacggctcctcatatgccatttacaatcgccgagaactattatgtagatattttaaataagaagctatcagatctttacggtgaaaactcagcaattaaggttacatatacagtcaatcttaatgccggcaccaaaaacttcataatcccattaaaaaaaggaaggatattttttttcgtgacggtagctttcagcatgactggatggctgctcaattaa

SEQ ID NO: 377913 - DNA, 750 bp, Salmonella enterica
atgaatcgtagcatgaacaaaaaacatggtttcaatgagccatccatcgatcttaatttagcccctcaatttccgacaggtaaatatgcagaccatattaattttggaaggagcaatctgatcaaggccttggaaaacaaatctgacatgtcatatttcattatgacttatgatgcatactcctctttcgacaaggaaaataaaaaccctgaactattggaggctcgacggcattactcatgcagtatcattatattatttaatttcgaaaaatcatttaatttcaatgagatagaaaatactaacatggaaaagatagagttattattttcagaattcatatcactaatttataatattcttgatcaaggatattatgtaggtgctgttattaataatccaatcttattcaagtattttcaaccatttctgatttggggaattttaccttatagctcaacagaatctcaggtacatagagaatttatatccgcattaaaccttcctgttggttttgaatgccaatcattgggaaaaacacaattagctataaatggaattatttcagcatcatccccgcataatttcataggagtagattacaatggaagaataagtcaaataatatctaaaagcaatccacactgttatcttgtcatcaaggactataatacatcaacagaagttaactacaatactgggatacaatatttcgatggtagtagcagaattatagatgtggctatatag

SEQ ID NO: 377914 - DNA, 420 bp, Salmonella enterica
gtgaaaattctcaaagaaaatgcaggcgaacaacttccattctcagatgaaagttttgactgtgtatttgacattatgtccgctattacatttataccagatgaagatttaagactgagatatttcgataatatctgtcggttattaaaacctggtggcatatattttttcttatgtgtcagaacggaaggtttttttaaggataaaatattagaccctaatcttggcgatgaaagcttgtttaaacggaaattcgataatatgatcgagaaatcgtatataagcgatgaattggaaagatacttacataaattatctctaaaaaaactagatgtggtgtcagaacacattagggcttttggagatgaaaatttcgagagagaaaatggattctggtttggttgttttatgaaaggttaa

SEQ ID NO: 377915 - DNA, 228 bp, Salmonella enterica
ttggcttttccggcgctgatggacaacattcagagccacacagagggattaaatcaggtttgtatcctggatacagacagccgagaagcgttagtactcatcattgaacctaaccattataccattacatgggacggggtcacgatgatgtatagctatgatatcgctcatccacaggcgggtagcgctatttccgacacggtgctgttgtcctcgttggataagtga

SEQ ID NO: 377916 - DNA, 312 bp, Salmonella enterica
atggctgaagacaaacagtttcgggaatggtttacactatgggaaccatggcataaagtcattgagcggatagcaccagaaatctgtactgaaattagcactgagaaaaaccgaattgtggagacaggggaattcatcgcccgcgtcagcgatgaactgaggttaccagacagaagtgatgatatcgcggtcgatgcaacggctggcgtaaaagtgatgagggagctcaacctgcgcctgttcaactccgcgactgaacgcgtgctggctaaaacagaccaggaacatcttttgaagccacaatgggcatag

SEQ ID NO: 377917 - DNA, 1164 bp, Salmonella enterica
atgctgtcgctattacttttatggggaattattttattaattatgaataacaagtttctgttcgctcactatttgaggggaggagccgcattgtgtgtgctattttcacattacacagcatcattctttatttctaatgactttatttcatctgtactaaatatacctaaggcgaaaaatttaagctttccaagaattatacttgattttattcctgtcgagtttcctggcttcctttcaatttttggtgtcgctacattctttttaattagtggttttttaattccaatttcaattgaaaagtatactgtaacgactttccttaaaaaaagattctttaggctatacccaacatattttattgtttgtatcattaatttgttttttgtattcttggggttctgcatttttcattattcagggaaagactatcactacggtttagacaaaatattaagtatttttagtatgggcctttctcagtatgttaaagatactatatcaatggatccagtagcctggactcttgcgattgaagtattattttatttatctacgttattttttttcaggatatccttcctctttagaaggaaagaaaagatatcattgagtgatgtgcttttgttatcacttattttaagcgtatcagtagtctggttatctcatcatattgataaagtttcagttttcttgaaggttataaatgtcggatttttaataaaagctatttatttaaccacttttatgttggttgggacgacattttctctttatgcgagagggcggatcgatattaaaaggttagtgtttgcagttatacttcagttttatatgtttgtatatataacgatgcatcttgcaggacctgcattttatatatcaacagtaactacatttagttggtttggtttagcgattgtggtatttgcatttttatatgctatcaatgataaaatatcatataataaaagtctgaaactcttaggtgatatcagttatccgctttatctgtgtcactcgtatgctgggtattttataattggaatgatgataaatttaaatattctccctagatctctggttgtttttatgccattgccctttgtgctgattttggcgtattttattcatgcgaaagtggaaaataaatttgtttcataa

SEQ ID NO: 377918 - DNA, 783 bp, Salmonella enterica
atgatgattaggccgggaagagtttctgacattattgagacttttattgcaaatccttttctggcatattcacgtttatctgagcgtaaagttacatctccttttctgactggagttgtagaaaatacagcacgattgcttgatactgaacctaatgagtattttttagaacactttgtatgggtttatgacaaaagtatcctgaatgatatgtttcattcatttgacgggatcttttcattggtaaaaaaagcgaaattgaattgtggagaaaatctatttgaaatacagacatatcttgcttttattttcttgaataatgaaaagtatggttatgatattatcaatgttttggatgctgtgaaaaacatagacgaagggtatcttgataaatactataaaacatttaaagggaattttggtgttttggaaatggctggcgcaattgtaactcgtgataattatcagagaattgcagaattattcgataagcttcatattacgatgatgcgctctgaatatcatggacgcatgaagtatcacaataaattaattgaattgattcagccagtttttctttgttcctcgcaagaacactctttcggaataaatgcaacgattaaaaatcgcttactggatgcgactgataccagatgggaggtacatattataaatcatcatctcgatgttttgaaaattaaacatatagtgtctttagcttatcgcctatgccgagtgattgttaagatacctgttaatttcatcctaaataaattcagataa

SEQ ID NO: 377919 - DNA, 627 bp, Salmonella enterica
atgaatctttatgacattgataaacccaccgaatacatagaaaaattgttatctctctttcctgttacacagccatttttgcttgagtcggggagtattttagatcctaaggagaaaaaagattcaatgcaaaaaaagatttattttttgcttgatggcgcattgcttgtatctatcggcgaaggtgaaaaaaaacataatctgggtataactaccagtccttatatccttgggctaggccagttaggacaaactggtgctatttgcgagtttgaatcaatatcaccatgcttactggattcagttgacattgacgtcttcaataagattatagatgaaaatggcatgtggcgtgaagttgttcagattttgttacccacgttagcaacagtagcagttcgagcctccacatcaggtttacaatctgcttatgaaataattcgcagttatctaatttatatggaaaatgaaaactcctatgctatcaaggaaaggtataccgttgtcaagtacatgcagacattttcaaggttatcacgcagcatgattctaaaaattttagcacaactaaaaattggtggtttcattgaaatggaaaatggaaaatggaaaacttataagaattaa

SEQ ID NO: 377920 - DNA, 402 bp, Salmonella enterica
atgtcattacgggcaaatataattttaaaagaatttggtatcactcagggcgtaccggatatgaagtttaatgaggatggtatctgttcatttcttattgatgaggaatatgacattactctcattgctgatagtgacgaaaaaatatacatgtatggtgttttagccaataccacaatcgaagacgcccataagcaagcactagtacttatttctgcaaatacttatcttttcagtagcgctgagcttgtatgctgttatgaatcacaagcacaggctttcattttaatgaaagttctaaacctggataacttaacaaccaacattatcgaagaaagtatcgataaaattattgatacgataaaaaatgtacgaagcactctggcagagttggagctttga

SEQ ID NO: 377921 - DNA, 1173 bp, Salmonella enterica
gtgagtaactatgcttatgcgcaggtatctcagctagcatccgatgcttttgaaaagtggttaaagcagtacggaaatgctcgcataacgctcaatacacaaacacaaaatagtaaggctttagccggcagtagcgccgacctgctgtttggccttcacaatcaagaaaatcgtcttgactatatccagttcgatacacattacgaggattctgatgatatgattgttaatgtgggtcttgggcaacgttattttctgaaaaataataccatgttaggttataatctattctatgatcaaaatatgagtagcaatgtaacccgtacgggtgttggccttgaactctggcgtgactatttcaaattcagtggcaacggatattttgcacttagtgactggcaagattctgacgaattacaagattatgatgaaaaggctgccgatggctatgatatacaaatagaaggttatttaccttcttatgctcagctaggcgggcatgtgaaatatgaacaatattttggtgatgatgtcgcattatttggtaccgaccatctgcaaacgaatccaaatgccatcactgtaggactcagttatacaccaattcctttagtcacctttgcagcagattataaaaagggaagtgattcactggacgatacggcaatatcagtgtccttcaactatgcatttggtattccctggtcacaacaaatttccccagatgcagtacaaattcgtcgatctttaatggggtcacgcttcgatttcgttgagcgtaacaatgatattgttatgcaatatcgcaaacaagatgtcattaaactctcgctacctgcatcattaagcggggagatatcaaagcaggtaccattgacagcatcggttgatacaaaaaatgggcttgatcatattcaatgggacccatcatcatccctgctgaaagccaatggatctgttacacagggtagcgacgcgacacatttcactgtcacgttacctcctgtcgcagggcagtatacccttaagggcatcgcttatgatcgccacaacaatgcctcaaatagcgcacaaactcaatttacagttattgaatcgagtgcaggaaacccacaaataaccttaaaacaccagaaacagcctggaccgatcgcgctgaacctcttagtgtga

SEQ ID NO: 377922 - DNA, 216 bp, Salmonella enterica
atgccactctcatcttttgccgtaacttcggttttgctaaaggaacaatcgctaccgccgcagattccgctggtggtggagaatgtgatagaagtgcccggtgctggattacccgtggaatcggtaacaatcacactaagaggttcagcgcgatcggtccaggctgtttctggtgttttaaggttatttgtgggtttcctgcactcgattcaataa

SEQ ID NO: 377923 - DNA, 1944 bp, Salmonella enterica
atgagcgctgtagttggtacttatgaacgtttcggtggtgatattacaggtcgtggaactcaagtatttgcttcagtattcggtccaacaactaatgcgtcagtagtagcctctaacaagggcaagcagctaagagcgatgcaggctacctcacagcacccttctgcaacggcgattaaggataatattagctctgatagcaatacatttgacaggaaagccttttcggagaaagttgcttatctggataaagcgttatcgcgaggtgagaataaagcaagtattgctactgctaacttaaaatcggaggtagtacaaccgaaagaaatgcggttagaaaaacgctccttattaccgatagacaccggctgcgtggcatcaacgagtgttgaaaagcaagggaccgtcgggcatacatctaatttaacaaacgtaaatgccagtacgtctggtgtcatcactcgcgaccagagtactaatatgcctgccattaacgacaggatcgccagtgatgcccataatcctgatagtcatttgaactcatttgggaataacgctgatatagagcgccgtagctcagctaacaatcatgttcaggagcgaggtaatttgagctcatctgagaataatgttgatgaaggcagttctgacttaactgacaataatattcactaccgagaggatttgagttcatctgagaataatgctcctggaaacagtcatagttcagctaacaataataatctgcaactaattgatagtattaacaatacttctactaaagataaagttgaactcaatgcaacgcctgtgcaagaggcgaaacaaaaacacacgcaccgaatatctgataacacacttttctccattattggcatagcgacgctgcttcttggggtaggtattgatgtgctaggtttcacgttacgaggggagcgttctactgccgacacggcggaagcagatcaacttgttgatattccagccgacttacaagatgagattaccagtctggaaaatagtgtggagcttgaagatcagattagcagtatgctgaacgatattgctacacaatgtgaagacaacgtcacacaaataactgaagttgcagagtggctttcttcagcacaagatcaaatcctttcagacatcgaaaggaaagcttatgatacagcgctggtacaaacagaggcaactgctttcgctgatccaaataaccaacagatgacagtcgacgattatggtaacttggttccaactggtcaattgaccactgctgcaaaagaggaatgcgaagaacaagccactcaaattgcgcagcaagcaaaaaatatggcgagcacagcgttaagctctacaattgaccggattaatgcaaaggcgacggatataagcaaagtcagtgatactctggctaacgccagcagcactgccaacgatattagtcaatcaacacagaccgttataaacaaactggggaacattgaacaaaccgtcgaaaattacgtgaatagtcaaaccaatgtaacacaatccggtatttcgagctccggatttgatgcaatagaagggctcggtagcgtcgtggcggcgctctcagtaccaatttttgcaaaactttttacgaacatccaccacaacaaactggctgaaaaacaggtaaaagatcaatcggttaaccaaaaaccatctgcaatacaggatgatataactgcatctgacaatgccggctcgtcacctgaggagggaggaaatgatatgtatgcggcggccactgatgcccgatctgatcttagtagcaacggatcgttagccgcgagagacggatcgttagccgggagaatagacaattttgcggaagatatagaatctgacagcagtgattcgtcgtcagtctatacggaggatacatcagattctgtcgatatcggaacgttagtctag

SEQ ID NO: 377924 - DNA, 279 bp, Salmonella enterica
atgcctataccagttagcataccaacccccccccctctttaccacccagagcttctggccttaataatggtggtaatacaagtgctattaaacaggaaatttataatacaccgaaagattcagcgtttaatacagttcgacttatcgaccatagcgggagaaaaagacctggccttgccgatgggtttgctccagctcttacgaaagaacttattaaaaatcatcaagatccccttactaccgcaacggatttttttaacaacaaaggttctaatttag

SEQ ID NO: 377925 - DNA, 432 bp, Salmonella enterica
atggcaacatggctggatattccagacatattttggttagggcataagaacaatagcggtgagtgtattgagtttactgttcagataaactttttatcagggaaaattattgagaacagtgatttttggttattgatggtgaagttaccaacgccgtcggagaaagatgtagctcgctggataacatgtagcggtgtacttctggctgcaaatggtgcctggcaatacggaattatacaacgagataatatctggtggttggtccagcgttttacgaatcaagtggagttatatgtactatgccaaaaagtgaatgagcacattgcggtagctacgcttcttggtcggaggcttcaaaatcaattgcagaatgtcataaccaatgacaatcaattccgtttatcgcatatggttagaaatggtttagtatga

SEQ ID NO: 377926 - DNA, 648 bp, Salmonella enterica
atgaaaacatcaacttcagcacaaccatttccagtcttcttaaataatttaaatgaatctatttatggtactaaggatattgatatcaataatactcactccgggcatgttagcttcttgcatatcaagtctattgataaacaaattgcgaagtatattaggaataaagagtatatttctgcacacgatagagaacaattatataaactgttcgatgttatccaaaatcaaggcagccagtgtactgctaaaaaattagccaagcttcataactctcttaaagatttatcaaaaataaaatctgaatcatgcaaggcatgggatgctattacgagtactaaactcaatattaaggcactagatcaacataaaagcaggctgcaacaagagcgtgattgtcgttttcagatattatacgaaaaacttagtgctttacctgaaaagaatattccagaacaggccagacagaaatttgcagactgcatagcagaaaaagatagcaaacaactccttatcaaatttcaagattttattgagtcatgcgcaaataaaataacaatcaacaataaccttactttatataatgacgtggatattaaaagtatacaaaaagccatatctaaccttcctgcaagttcattaacctag

SEQ ID NO: 377927 - DNA, 225 bp, Salmonella enterica
atggaaaaaaatatcatccaaagcaagatccgtatcgatacactagcagaaaaattttttatcacaaacaatgaccagggcctgaatgatcttaaaaagatggttgtaaaaccggcgccaatagttttccataataaacagtcaaatataaagttgctacgtgacaatttatttgcacttacaataagaaaaaatgcagaactgctaacagattccggcaattaa

SEQ ID NO: 377928 - DNA, 804 bp, Salmonella enterica
atgaaattatctcataaagatctttcaacttttttaacaacgattaactcttataaaaaagagcaaaatcagaatgttgcggacttacctaaacttcgcctgagtaaggctgatataaaattcattgataaagaagtagctaagtatattaagaatgatcagcgtatttcttttgctgacttaacgatattaaattcgcttcacgatattataaaaaaacaaggtagtcattgtgaaagcgaaaaattagcgaaactcagtaaagcgctaaaaaatgttacgcagataaaatctgacgcttgtcttgcaagtgagagaatggagaaacatttttctagcataaaagatgctacgcaaaaacatgtgaacttaatgccagtctataaagaatctatgttaaaactgaatgaaaaaataaaagacatcgatattgcccattctcaaattaccactaaacaaaaagatgaatgtttaaatgcgaaaacagcaagcagtaaatatatactgttaactaatatatcgacttcacttatgagaaaagagacagtaattgttaaagatactggtcggtgggggtggggtagatcaacagagcgaaacattgttaaggtaaaatatttaaaaggccataatttatggcatagttgtgcgcgggatgcacaaaaagcaatggctatcgaaaaaaatataaaacaattaaatcgacaattaactatttctcgcaatcaaattcgtcttgattcaagtcgatttaaagttccttctaatgaagctggtttagccaaattaaaaaatatggtttga

SEQ ID NO: 377929 - DNA, 603 bp, Salmonella enterica
atgaatgatagatctttcactcgtaaaattgaaatcattaaacttatcgtttctgttattatttcattatcggttgcttctattgcctatgttgtgcaacatagtgtagtcgaacagcaagcgcaccgtacgttgttaagtaatatatcagcaaaacttattgataaaagactcagtatttacgatcaaataaagatcccacttaacagaatatactgtttcatagaggaaaagggggattggcaaagctactcccccgaagaaataatcaaaacacataatatgctaaatgaaatcgtatattctcagcgcgcaatttggtcgaaaaaaacaatagaacgctatactgaatatatgaaccaacaggcttttattattgataacattcatcacggaatcaaaataagagcagaaataaatgacctgcgaagagctgcaccaggatgggatgataactatagaacattgttcactggcgagcgttcaatatttcacaggaatgcctatcaagaattaaataacgctttagctgaagacctcatgttaaccaaaagcgaattaatattaagtcaatatgataaactaagtacaagtcgaaattaa

SEQ ID NO: 377930 - DNA, 141 bp, Salmonella enterica
atgacttattacttcaacaaaaatatgtccaccctggttgattataaaatcagcctgctggatgaagataacgacttctatacgaaaagcggtattgtaaccgatgatatcgtagatgttggtctggtctacccgttctaa

SEQ ID NO: 377931 - DNA, 225 bp, Salmonella enterica
atgattattgttttcagcgcggaaatcgtccagattcaccacattgccaagagcgtaaattttaccctaattagtgcatgggttagtagtaaaacctgtaaagggataaatgacatgaatacctgcttgtccgaggagcaggcgcttgcgccgccatccggcaaaaggacttctgttaagttaaatcatacggcattatttttaaatattattaatttcaaatga

SEQ ID NO: 377932 - DNA, 225 bp, Salmonella enterica
atggcaaaagtgaaaaccaaatatggcctggatcatattgaatggcacggtggtaccttcttcaaccacggcgttaaaatcacgaccagtagccccgagcaatttgtgatagcgctgccagcctggcagcgcagcggcgtcaataactatacactggacggcatcgcttctcaccaggctggatgcgtcagccacgatgtcagcgccagtgatataagacggtaa

SEQ ID NO: 377933 - DNA, 672 bp, Salmonella enterica
atgtattggaatgatgaaaatgatgagtgggattatgatctatctcagtatcattcaaatgatataattttccctattgactcaacaggcacagagcgagtctggaaatggggagttgatagagccaagaaggaaattgcacatcttaaatgcgaaattgtgcgtggtcgttatgaggtttatcgtagaaattatataaatgatgatggcaaattgccaggaacgtggtgggatgattctgcttatgcagctggttctcatggtactaatcttctatcgtccatgtttacccgagatagattgtttttatttcctaaatcatttaaagcagtaattgacagcttgaaagttgctggtgcacataaagaaagcctcattttagattattttgctggttctgctagtacaggtcatgcagtaatagcaatgaatgatgatgataatggttcaagacgttcaatacttattgagcaaggtgactattttgatattataactaagcctagaatgttgaaatgtatattctcttctcaatggaaagatgggaaggcaacccaaattcgcaataaatcatgcatcattaaaaccattaaaatcgagagttacgaaagatgcatcatcaaatgtcaaaaacaattatttgataaattatatgttacaagaggaaagtaa

SEQ ID NO: 377934 - DNA, 465 bp, Salmonella enterica
atgttacaagaggaaagtaaaaactctttaatcaacacggatagctttcagaatccattcaaatataaaatggacattgctatggattccgcaggggcaactgaacctcgatgcatcgatttaatcgaaacgttcaattatcttattgggttacatgtgaaatctattgaatccaacgttgagcggggctatgtacgaatagaaggaacactaccaacaggtgaacgtacgctaatcctgtggcgcgactgtgataaaatcggctatgaagaattaaataaatatgctaaccgttttgatttatatgcaaaagaaaaaacgtttgatgttatttacatcaatggcgatcacaacctaccaactgcatatacagttgatgaagaagacagtgaaatcgtccgtagtttgaaaattcgccagatcgaacctgagttcctaaacttaatgtttgctgaggaggtttaa

SEQ ID NO: 377935 - DNA, 876 bp, Salmonella enterica
atgctaaaagagtttaattcctcacctatcccggtggggaacattgaatatttacaatcagcacaaaattggcagcggaagtccttatctcttcaggggttaaatttactgcagtccgtgctcatcaagctcaccacaggtaaaatttcaattacgtcatcgtccggagagtatattacaacaacaggaccaatgttaatatttttggctaaagagcaaactattcatatcaccctggaagagaccaatgaaaagttaaattataatttaattgaattagattcagcatcaatcaaaaatgcttataacttttttctgtatgaacatgcagagttttcggcccccccgacaaaaccgacaacaaagcatttattagcgccaatagaaacaggagtggcaagagtattcaacctcttacactcttcaaataaaaaccagaagttgccacaagataaaagagaatatttaataagatttctactttcagagttcatctatgaacctgaagcattttatctctttagagaactatcgcaaaattcagtagccgaaaatatttataatattattataagtgacataagtcgaaaatggacactcaaggatatttctgattcactttatatgagttgctccacattaaaaaggaaactaaaacaagagaacacctcattcagcgaggtttaccttaatgcgcgaatgaataaagcggcaaagcttctacgcaatagtgagtataatgttactcgtgtggcgtatatgtgtggctatgatagtgcttcttattttacatgtgtttttaaaaaacattttaaaacaacgccatcagaattcctatcttttttgtcttcctctcaatatcaatttgtcaactga

SEQ ID NO: 377936 - DNA, 399 bp, Salmonella enterica
atgatatatggtgttgtggatgatagtgatatcatagagatattaactttatgctgtagaaatcttattctttcgaaagaaaacgtagacgaaaaatttgttgatgagctaaacctttccaatggggaaaaacagaaaattttattatgtctcgcattatttaaaaaaccggagatggtgttcttggatgaatcgacatcttatctttcaaccgctgacgctttagattttctggaaagaataaaacatctttactcagatagtattgtcatttttgcgacccatgatatatcactacaaaggttatttactcgaaagattgaactctcacatgaacatttaagaactgtaagttgtaatacaacgataagtattccgaaaatgaaactgaatggatga

SEQ ID NO: 377937 - DNA, 147 bp, Salmonella enterica
atgacgcaagaatatgcaggaatgtccaccagacgggggcgcaccggtaagtaccggtacagcacgggagcaaaaatatttttgatcctgctgacggtattcactgtcgcagcgctgttcggcctgtaccaggtcctgacgtactga

SEQ ID NO: 377938 - DNA, 741 bp, Salmonella enterica
atgcagacgttaaccagggtactgccgcctctccggctgattatgttttgtcagtcaggagaaaatcctgcgcagtttccggataccggcggtctttgcgtggaagacagcgttcgtctcaggacaccagaagggctgctggatcggttgcgccggtggccaggcgcgatggtgatatccgccggacgaccatcaacccagcttttactgtggcaacaggtttttcagcgttatccgcggacagtggttttttgcagcagtaacgcgtttttaccggttgacgtcagtgtggaaggttacttccgccatctgaggctgattaaatgcgccatgccggtaagggttctggccagaatggctgagctggccatgtggtcatcagtacagacatcgccttacgtggaggagatgaagaacgtgttgagcgtgccggaactggtgatggaaataaacagccgcactctggtccggttactgtcagagcgtctgccaaaacaggggcggcgggtgctgggattactgttatcaggctgtagcccggaaatgacggcccgtatgctggggaccggcgtgaggcaggtctggctcgcggagcaaacgctgaaacaacgctgggatataccggcaggagtaccgctacctgatgcggtaagaataaggatgccggacgtcaatccggacatcaatcaaccgattgctttggtaaaagccggggcaggtaacgcatcggatttacgctga

SEQ ID NO: 377939 - DNA, 138 bp, Salmonella enterica
gtggcggtagcgtggaattatctggatgcgttgagtaaatttcattttaccctgctgatattactgaaaatggttctggataaactgtttaacattatctgtgtctgcgaacagagtgataaaaataatgaagcgtaa

SEQ ID NO: 377940 - DNA, 798 bp, Salmonella enterica
atgcatgagctggaagtcctgctgagtcgcctgaaaatggagcatctgagttatcacgttgaaagcctgctggaacaggcagctaaaaaagagctgaactaccgggagttcctgtgcatggcgctacagcaggaatggaacggcaggcatcagcgcggtatggagtccaggctgaagcaggctcgtctgccgtgggtcaaaacgctggagcagttcgactttaccttccagccgggcatcgaccgtaaggttgtccgggaactggctggtctggcgttcgtggagcgcagcgaaaacgtgatcctgctgggacctcctggtgtcggaaaaactcatctggccatagctcttggcgtgaaagcggtggatgcgggacatcgggtactgtttatgccactggacagactgatcgcgacactgatgaaagcgaaacaggaaaaccgtctggagcgtcagctgcagcaactgagttatgcccgggtgttgatcctggatgaaataggctatctgccgatgaacagagaggaagccagcctgttcttccggctactgaaccgtcgatatgaaaaagcgagcatcatactgacgtcaaacaaagggttcgcagactggggagaaatgttcggagatcacgtgctggcaacagcgatactggatcggttgctacatcactcaaccacgctgaatatcaaaggagagagttaccggttaaaagagaaacgtaaagctggagtgctgaccaaaaacacaacgccaatcagtgatgatgaaatggtgaaaagcggacagcatcagtaa

SEQ ID NO: 377941 - DNA, 1173 bp, Salmonella enterica
atgctgagcagagaggacttttacatgataaagcaaatgcgccagcagggcgcgtacattgtcgatattgcgactcagattggttgctctgaacggacggtcagacgctacctcaaataccctgaaccgccagccagaaagacccgccacaaaatggttaagctgaaaccgtttatggattacatcgacatgcgcctggcagagaatgtctggaatagtgaggttatcttcgcggagattaaggcaatgggttatacgggcggacgttccatgctgcgttactacatccagcccaaacgtaaaatgcgtccgtcaaaaagaacagttcgcttcgaaactcagcctggataccagctccagcacgactggggcgaagttgaggtggaggttgccgggcaacggtgcaaagttaactttgcggttaatacgctggggttctcccgccgcttccatgtcttcgcagcaccaaaacaggatgctgagcatacctacgaatcactggttcgcgccttccgctacttcggtggttgtgtgaaaacggtgctggttgataaccagaaggctgcggtgctgaagaataacaacgggaaagtcgtgttcaactccggattcctgttgctggccgaccactataacttcctgccacgggcatgccgtccacgcagggccagaacaaaaggtaaggttgagcgaatggtgaaatacctcaaggagaacttcttcgtccggtaccgcaggttcgacagcttcactcatgttaatcaacaactggagcaatggatagccgatgtggctgacaaacgggaacttcgccagttcaaagaaacgccggaacagcgcttcgcgctggagcaggaacatctgcagccgttaccggatacggacttcgataccagttacttcgatatccgccatgtgtcctgggacagctatatcgaggttggtggtaatcgttacagcgttcccgaagcgctgtgtggtcagccggtatcgatacgaatatcgctggatgacgagttgcggatctacagtaatgagaaactggtggcctcacatcgcctctgttcggcatcgtctggctggcagacagtgccggagcatcacgccccgctctggcagcaggtcagtcaggtggaacatcgaccactgagtgcctatgaggagctgttgtga

SEQ ID NO: 377942 - DNA, 321 bp, Salmonella enterica
atgagcgtgcccttatttagcctgccagccgttattggttttcaccagaataatgttggcttcttctggttcacccatccctttcacgccggagaaaacatttttatcaacccagcccggaacgccatccagtttccatgtataggtcacttgcgtgattttagcgccattaccttcactcggttcagtccaacttgtgatctctgcgacagcacggtgaccgacacaggcaccttcctcacggttccaaaaatcaacctcttgtcctttgtcggtgacttccagaacatcaacgctactaaagccgttagactgctgtga

SEQ ID NO: 377943 - DNA, 243 bp, Salmonella enterica
atgaagaagattttacttgttgctggcacagctcttgttctggcgggatgtggggagaaaggcgactttgagaaggcgattaacgcgaaaatttcaaaatcaaaggtgtgctactcactgcaacacaatgactttgctttcaacaaaggttttcctgtaaaggttaatcatggctatcgttctgctggatacaatgccagcgatgaaatcctgaaaggtcttcactgtttcacagcagtctaa

SEQ ID NO: 377944 - DNA, 357 bp, Salmonella enterica
atgaagttatatagcagaagaatgcaaatagagcagaattcccgtgatgagaaaagtgaacgcttcggattcggcctgcgggccagttacagtcgttctgccgggcggctgtcagtcctgagccttctggcgacactgagcacaatcgtgctgtggcttataggatatcatgctgaaaacacaggattacatctgagataccaggccaacagcattaaatcacggcgtgttatctcatatctgacattagcggagaatgtcctgcgacactctccgctaattttgaagcgaacagcattagacgtcgttcttcatcatctcgccagaacctaccgaagtatggtgctggtttattag

SEQ ID NO: 377945 - DNA, 486 bp, Salmonella enterica
atggatgatgttatcgatctgcgaaaaccaggtattgaaaaacttcaccttattcctgcagaaatcaataatggcgagctgccagtaaattttccccgggatttcgccttacttgagaaagatactgtctacctatgtcagcagaactttgaatgggaaactcgcgttgtagctgcccgccgctggcttatcattcatggctacccccttcctgagggggacaaccacgcgcaaatcgatttggcggtcgaaattcctacaacttatccagatgctcagttagacatgttctacgtataccctgcgcttacactagccaatgggaaaagtattagtcagactcaatgccaggcaaatattctcggcaatagctatcagcgctggcgccgccatctgaatggaactacgagatggaatccactgacggatagtgtgacgactcatttggctgtagtagaagaatcacttctgcgagaggtggaataa

SEQ ID NO: 377946 - DNA, 630 bp, Salmonella enterica
atgaacactgtaaatcacgactcttacttcaggctggctctaagtgaaaatcatcacaacatgctacataaacatctttttcccggcgttggccttgaagccgctgctatacttctatgttcgcaaagttcggcatctcgctatttagtcaaagatattttattggtagattattctgagtgccgcacaagaacaaacgactttattagttggccaaggacctatattgaaaatgcgattgatgctgctgaaacaaacaatctatcaatagtattagtgcactcgcatccaggaggcacattagtattttcagatatggatgacgacagtgaccgtgaatttttacctgcattatttgaagccaatgagtcgttagacactcttcatggttctgcaattatgactcctgacggagcaattcgtgcacgattttataatcgccgactggatattattcccgttaacgctgtacattgtgctggtgataacctcattcaatggaaaatgactgaattcgatagtttacaaccgcatccaatggctttttcagctcaaatggggaaagacctgaagtccttcactgcctgtattgtaggtgtgtcaggtacaggatcaatcatcgttgagtaa

SEQ ID NO: 377947 - DNA, 1008 bp, Salmonella enterica
  misc_feature (334)..(343): n is a, c, g, or t
gtgaccaaaacggtacgtaaaagtatagggaaggcgagccagggtttgatgcagcatatcgggttatcgcaaccgatgaagcgcatggctgggggcgctaagaaagcccttaaaaccggtgttgaaaaaccaggcatgggtaagcgtgcattaactcatattgctaacggtggcgctaagcgctttatcaagcgcaccgcagtgattgatggtatcagcggtggtctgaacggtattggcgatggcgtttttaaggtacaaacagccaaaataaaaaatgccattgataatttgcagaacaatattgatcttatcagtacaaactatgagcttnnnnnnnnnngtcagtcaatggacatgacctcttttgacctgaaagaacaaatcattgctacttttaaagagctggcagagcaggcatgtgagattcgcaacatgcagttgacgtcggcgacgactcaggaggtgagctcttggggtcgtcaggtgtcctcatttcaacatcaacgcgattctgcgagtaagacgatgaaatctacaattcttgccggtgcaggtgaagtggtgggtggcattgtttcaatgggatgttcgtttggtgggcatgttgcatctaaaggtatcactcataaggagcgatacaaccgtcgtcaagcgctgaagggtgctaaaggattagcgggagatgcgctcgataactatcttaaggctaatgagagaccccttaatccacatagtaagttaggtatattagggcaatgtggtgagcctatcggtaaattgattagccagcccttttcgattggagggagcatcattggttccggggctaagaaattagattctatcgctgagatggataaatataatagtaatttggcattgaataatgcaaagcaatatgcagatgctggtaaaaaaatttccagtcaatttgccactgttgctagttctctggcctcggccgcagagcgcttttctcgtgcgattacagccgtagcaggctaa

SEQ ID NO: 377948 - DNA, 219 bp, Salmonella enterica
atgagtagtcttgaaagtgttaatgctcaattattacagaccgctaataataactggagtaatgtgcaaaacatgatgtctccttctgatctaaataatccacttgatatgttacgcattcaggaatgggctcaacaatattcaacggcagtgcagcttgatagtgctgtaataaaaatgttcaaggatcttctgtccggtattacgtcaaaaatataa

SEQ ID NO: 377949 - DNA, 855 bp, Salmonella enterica
atgggatcatcatttcccacagggaaataccttatagcaaatgagcacatgccccctttcttaatgggaggatggcgatttttagcggctgggttacttatgttaattagtgctaccatattaaaaggatacagacaggtagtcccaacatataagcaatcaattgtaggaggaattattcttactggtataattggatgtttgcaaacaacaggaacgatgggttttttgaaccttgcattacaaagtgtctcatcttcaatgtcttcaatcatactttttactaacccactatggttatcattattagctcacttcctactgaaagataaattaaataaaagaaaaataatttcactcataataggaatttctggtgtcattttctgccttggattgagtaccatgcaaggggggataggactaatttatgcttttttgggttcattatgctggtcaatatgcacaataataacaaaaagatttatctttgacaaaagtagctgggtattaactggctggcagttattctggggggcaatatttatgctactcactgcatacataagacatgaagaatataatataggatcgctccaattgtggggatgggtatggtttatttggttaatcattcctgcaagtatcggatcctttgggctttggttctctgcattacgccagggaggagcaactctgacaagtggttttctattcttagtacctcttttctctgtgattttttctgttttggcgttacacgatgggctctctactcatctaatacttggtggaggacttattgtcctttcattatatcttttaaataaaggggataaagatgaaattaggtaa

SEQ ID NO: 377950 - DNA, 711 bp, Salmonella enterica
atgaaattaggtaatgaaattgccttagaaagtggtaaacaatggactttcgataataatgtagctccttattttgatagtcatgtgcagcaatctgttccagtttatcttgaaggccatgaactaatttgtttcattagtgatttctttgttagagataacgctattatatatgaagttggttcatcgacaggagcgttgattaataaaatttttgaccggcaccatatgaaaaataatgttcggttcattggcatcgaacctgtaaaaagtatggttgaacaagcaaaaaaacaatcaaagggaaagcatattgaatacattaatgaatgtatagaagtagtggaactagaaccgtgtaatcttatcgtatcatattattgcgtacagtttatagaaatgggaaatagagaatatatattccataaattctatgaaaaattacagccggatggagctctgattattttcgagaaagaaataattaatgattcaaaaattaatgaaattgttgagtcttgctatcttaaattcaaattaaaacaaggattttctattgatgaagttctctcgaaaaaatttagcttagaaggtgtaatgaacactaacactgaaaatcaaaacatacgtctattgatgaatgctgggtttacccagtttgagacaatcatgaaatacggagaattccatggatacctttgtatcaaatag

SEQ ID NO: 377951 - DNA, 1011 bp, Salmonella enterica
gtgggcactaaacatcttttaacaggaaaaactttttgcctgatcttgctgccattgctacctttggctactaaggctcatgctgctagtgacgggttatacgcaggtgctaatgttggttggtcaaaatttgacaacaataacttcactgaaagccatcgcaaggatactatcggctttggtggttttattggttatcagttctctccatggttttcattggaggggggcgctaacagccttggcagtgtgaagggaaatgatggtcaatccatagatgtgcagggaatcaccctgagcagtaaatttacttactctttgtcaggccaggacctgtatggacgagtgggtggtatgtggtaccgtagcgatatgagtaacgatgatattaataaaagtgaggttggtacaggcatagcgcctttacttgctataggggttgagcatagctggagttcgaatatgacatcgcgcatcgaatatcaatggacgggacatattgagaatgatgcggcgacctcagctaccctaaataatgggtatttatctcttggcataacatggcatttcggccaggctagcgaatcgatgcaaccatctattataagtcatccagttgaggatgttaaaccgcctatatcagaaactgtaccgctaaaccatgagttggtaatctattatccatttaatcagtatattctctcagaaaagaatcgacagaaaattattgatttttatcatcaaagaaaaccagactcggtaacaaaattcaacattgatggttatagtgatataacagggagtgaaaaaaataattttatcatctccagccgtagagcagataatgtcagggaattattgcttgagcagggcattaataaaaaaaatatatctgtacatgcgcacggaagtacttcaaagttcaataagcatttgttaactaaacatagtttatcagatcaggaagagaactattcattgaatcgtagggtctctatcctgacggattaa

SEQ ID NO: 377952 - DNA, 537 bp, Salmonella enterica
atggtgtatttgaaacctattgaggctatgcaagtaacagtgcagattattttttggctttggggagtggtagtgttatgctatattgttttttttcttgctgattattcttaccaacgctatgaattgatgaaaaatctaaaaatgtcacatgaagaagttaaaaaggaaattaaggaaatggaggggaatgaggaaataaaaaggcatcgccattccctacaccaggagatacaaagtggcagtttagcggtgatggttaagaaatctagtgctgtgataaaaaatcccacccacctggcaatatgcatttattacaatgaagatactacacctttaccaaaggttgttgctaaaggcgctgattatcaggctttaaaaataatagaaattgcagagaaagaaggtgttcctgtaattgaaaatatacctcttgctcgtggattgaataaagatattgctatcggtcaatacatcacgccgccattttttcatgcgatttctgaaattttagcaatgattaaaattagagggtaa

SEQ ID NO: 377953 - DNA, 486 bp, Salmonella enterica
atgacacttcagcaggtaatggatgcacaggcgcaatttgatatgtttgcaacagggcgctaccaggtaacaaccgatccattaaaagaagcggtcagaaaccttaatctggatgttaatgcaccgtatgatgaggccatacaggacaggatttttgaagaatacataatcaaagttaaacgcccagcgattatcgcctatctggaaggtaacggcagcgtggacgatgccgcttatgcttgtgcgttggaatttgcatcagttggcgtgaagcaaggaaaacccatcagccccgatccgcatgaatacgagaaaaatccagataggtcatttgttgtagacaaaaaccatcatcgtattcataaaaaacgttacgcgtctgctgacggcatcggttattacaatggtgacaagctaaataaggtatttattatgccagatgatctgattcaaaaattgaaggattccaaaaatgaagcacaataa

SEQ ID NO: 377954 - DNA, 591 bp, Salmonella enterica
atgaagcacaataacattttactgggctttgcattgctgacttttacctgcgaagcctttgccggtaaggataatccacagttttctgattaccctgttgcggtgagcaccgggccatttgcaaagaatattgcgttatcggcagagcagcagagctataccaacaaatggaagcagacaatgcagcgggagcttgccaagcctgttaattttgccggacattatcgcctttacctgagctggaacggtgaactcccgaaagagtgtggcgacaatcgctgggtctgtggctgggtgattgataagacttcaggagagatcgtttctgaattaccagagtttaatgaaaatacccattatcgcccttatcatgataatggtacgccttcacctgaagagtttgaacctggcttttatcctaatagtattgtattgtggatgaatggaaataccgctccccaatctgatctcagaaatttgcaatgcaaatatatgatgtacacctttaaggataataaattcactgcattagataaaggctctccatgtgaagttgattacggtgatgatcctgacgctcctcaacaataa

SEQ ID NO: 377955 - DNA, 603 bp, Salmonella enterica
atgatggttattccgctctctgaactcagaaaaaagctcgatcgccacggttatattccccagtcctgtgaagataacgacgaactgatccagcttctggatatccggggccccactccggcaggcgtcctgcaccacgacaacatccttcactggctcagcgaatccgatctctggaacgaacgttttccctctcgccctctgtcccgcgccgatcaatatccactccgtcttgccctggaaatccacagcaccctggcccttgcagagtcccgcactgtcacggccctggccgactgtaaccattacccccccggaaaacttcaccatctgcgccagttgctggcatcggtactttacgattttgccctgcgcctgacgacgttccgctttgacagtgccaacccacagcttcccggcggactgtttccggttatcaacgatctgcgtcagcttgcggatgacatctttagcgatcataaccaaaaacggcccgtagagcgtgtggagatggacaggctggcgacaatattcgcccggatacacatccggtttgatgaatggtgcgcagacccgatacccagaatgctgataaaccgctga

SEQ ID NO: 377956 - DNA, 1047 bp, Salmonella enterica
atgattactgatatcgcttttcatgatcttgacagtaataatcctcatgctcatgtgatgttgacattaaaaccgattaccgctgatggctttggcaaaaaagatagaagctggaatgacaagaaaaacgttatcaagtggcgtgaatcatggtcagtgattgctaatcgctatcttgccgctgctggcagtaatgaacgtattgatcaccgttctattgatgctcaacacgctgaagcactcgaaagcgccgctattacattggatgttgtagaaaaagcgttatggcttgccaaggcaacattgaccagccgcccaccaatgcaacgtgtccatcgtgccaagtggaatagcaaaagagttcaggaaaaacgcgctgctgagcaggctgttcgtgatgagatgaaacaagaagctcaggctacatacaacaccttcaaagatttagatctgcagatcgttgttgaccttagaaacttcaccgtatcagaaatgcctgagcctattgaaatcgtattacctgaaacaggttcgcagtcatcatcatccgaagagcaacaatctgttctggttgcccctgcacctcatacacgcaccaaattgaaaaccccatccccgtcagctgccagagcagttaaacgcgctcctgttaaaagtaagaaaaagcaggctaaaccccgtcagacgggtttgttcaagcgtttcaccctactggtggttgaatatataagagagaaattcgtctgggccaagaagaagccagtcccggtttccatcgatgctgaacacgataagcgtactgctgaacactatgtctttgacgaggttcagggtatctatgtgccacgcgctgagtttgaaaagcgtgccagatttaacagtgataattacaagcctacttcagatgagatcaggcgttttccaacttgtccacagcgcgaacaacccataacagatagcattatggatctgaaaccatctataccaacagatcaaatgagaaaacgaagttcgctgaagttaagacctacgggttacagagattga

SEQ ID NO: 377957 - DNA, 831 bp, Salmonella enterica
atgcctgcccgaacattatgccagaaatttttccgtggcgctctgagcccgtttcatcaatatcgtcagaatgctcttcttgatgctaccgtggctttgacccgtggtgcatcacttactctgacaagcatcggtcgctaccttcctggttcagcacaagtcaaaaacaggataaaacgcgttgaccgcctgtcaggtaatacctctttgcatgaggatatcccgttgatattccgtaatattacaccactccttactcgccagttttcctggtgtgttatcgctgtcgactggagcggttacccgtcccaggaatatcacatccttcgtgccagtcttatctgtgatgggcgttcaatccctctgcttagtcggcttgtatcttcagcaaagcaaaataattcgctgatacaaaaagaatttctcgatgaacttcaccggtgcgtaaatcccaaagcaaaagtcatacttattacagatgcggggtttcagagtgcatggtttcggcacataaaatcactggggtgggactttattggccgcataaggggaacggttcaattctgtctgctgcatgatgacgaaagatggctgaaaataacggatgttcggggtaaagcaagcccggaatatccgggagcaggatggcttgcccgggcggaatatgcccggtgttcaggccatttttatcttcataaaagggaaaccagaggacgtaaaaaccagcgttccagagggcgattatccagcccaacgacagaaaaagaaaaacggacagacattccgccagatcgccatgaactggcatgccgatcaccgccgctggtctga

SEQ ID NO: 377958 - DNA, 738 bp, Salmonella enterica
atgcgcatatgtaccaatggcataaggttttttctgttgacattcttcggattatttccattatattctcaggctgatattgtgatatccgggactcgggttatttatccagagggcaaaagtgctgtaacagtccatcttgacaatcgtggtgagcgtccattgctcgtacaaacatggcttgataatgggactgaaaacaagtctccggatgaaatagacgcgccatttgtcataacaccaccaattacacgtattgataaagaccatgggcaaactgtgcgagtcatttataccggtggaacgttgccgcaagatcgtgaatcattgtattggttcaatgtgctggaagtacccccaaaagatgattcttcagcgtctgctaataagcttcaattagcatttcgaacacgcatcaaatttatttacaggccacgttctttggatggtgatttggcctctgcactgaaaaaagttaaatggaactggggacgcaataaaaaaggctattttttcactgtgacgaataatagtggctattatttatcaatggacaaagccaatattgacattgcagataaaaattattcaattaatacggaaatgttaagtccttttgggactgcacattttcccattgtcgcatcgaatggaatcaatattccagaacatggaaaaatcaactactctgtggttaatgacttcggtgggctaacgacagcgaatgtgtcattatga

SEQ ID NO: 377959 - DNA, 585 bp, Salmonella enterica
atgcaacggaaatctatattgctagcctgtatcagcctgtgggtgtgcgcaactgcaacaattcaggctgaagataaaatgttccctgaattttctcattatccagcaacagtcacttcggggcctttttctcagacgctggttttaacaaacgagcagattaaatactctgcgcattggaaaaaaacgatgcagcagcaattagtaaaacccgttaatttcgcggggcattatcgcttctttgcaacagatgcgtaccaaggcgatgaatgtcaacatggtatttgtggctgggtattagataaatcgacagggaacgttgtctcgaaccttcctgaatttaatggcagtgactcatatggtgcagtaggtgataatggtacacctgttggcgaaccgtttgaaacaaaaacacaaagtgatagtttgttattaatacttaccggccaagcaatacctaaagagttaaagcatgataaagatggcgttccaataaccaatccatgcgaaacaaattactataaatttgagaataacaaatttattagaattttcgaagatagaaatggctgtaatgttgattaa

SEQ ID NO: 377960 - DNA, 831 bp, Salmonella enterica
atgcctgcccgaacattatgccagaaatttttccgtggcgctctgagcccgtttcatcaatatcgtcagaatgctcttcttgatgctaccgtggctttgacccgtggtgcatcacttactctgacaagcatcggtcgctaccttcctggttcagcacaagtcaaaaacaggataaaacgcgttgaccgcctgtcaggtaatacctctttgcatgaggatatcccgttgatattccgtaatattacaccactccttactcgccagttttcctggtgtgttatcgctgtcgactggagcggttacccgtcccaggaatatcacatccttcgtgccagtcttatctgtgatgggcgttcaatccctctgcttagtcggcttgtaccttcagcaaagcaaaataattcgctgatacaaaaagaatttctcgatgaacttcaccggtgcgtaaatcccaaagcaaaagtcatacttattacagatgcggggtttcagagtgcatggtttcggcacataaaatcactggggtgggactttattggccgcataaggggaacggttcaattctgtctgctgcatgatgacgaaagatggctgaaaataacggatgttcggggtaaagcaagcccggaatatccgggagcaggatggcttgtccgggcggaatatgcccggtgttcaggccatttttatcttcataaaagggaaaccagaggacgtaaaaaccagcgttccagagggcgattatccagcccaacgacagaaaaagaaaaacggacagacattccgccagatcgccatgaactggcatgccgatcaccgccgctggtctga

SEQ ID NO: 377961 - DNA, 321 bp, Salmonella enterica; identical to SEQ ID NO: 76992

SEQ ID NO: 377962 - DNA, 171 bp, Salmonella enterica
atgaataacaatcagtttgacgccaccacattcatcccgatcgttggattactgacgggtggttcacagacacaggcaaaaagactcgaaatcgaatttaaagacgaaacggtcagaaagtggacgttctcagaaaataacagcaagatgaaaaccagtcttattcaataa

SEQ ID NO: 377963 - DNA, 276 bp, Salmonella enterica
atgggcacaacggcaaaaattactgtgaattcacctggctataaaaaaacactctcaggtgaaattacgaggataagtgctgattcgttctcagatgatgaaaaaaatggtgctgaacgttattacaaagttgaaataaagccagatgataaaattatagtccctcctgagttagagggtgtccaggttaatgtatatgcgctaagtaagaaagtgactctgttaaattacattacagcgttagtcggcgataatattgtatttaatgtatggtaa

SEQ ID NO: 377964 - DNA, 186 bp, Salmonella enterica
atgggcacgccgcttatgaaacccaaaacgtcgtggaagccagtagtcttcgtaaaaacgtgtaaaacgcgactcatggtgtttatgctggaaacgttgccagccaaatttttgctcaagctcattttctgcatcctccttattgaaaggtaccagattgagcggatggtgtaccttcatacctag

SEQ ID NO: 377965 - DNA, 951 bp, Salmonella enterica
atgccgggaaattacaatttggatgtccttgttaatgatcagctaaagttaaatgcaacgatcttatttattgatgatggtaataaaaacatttctccctttgttactgaaaaaacactgacgcagctaggtattaaatattcacttaagtctcaggataagatgaagaaggcgggtgaggattattacaacttactaaaagtcacgcccgggataaaagtacgttttgatcaggaaacgcaagagttaaatatcagtatcccacaactttatatagaaaacagaccggatggttatattgacccaagcctatgggatgagggtatcactgccggtacattttcatatgacgtcaatgcctatcattcagacaacgcggatgattcaagcgacagtgtgtattcagggcttcactatgggctcaattttggtgaatggcggtttcgcagtcgtggtgctctgaactgggaatcaggcaataaagctacctatgatagtcaagaggcctggttacagcgtgatattgcctccctgaagtctcagttggttattggtcaaagcagtacccgtggcgatacatttgattctgtagcagtaaaaggtattcatctttataacgatgatcgtatgttaactggagctgagtctggttatgctccgactatcaaaggggtagctaacaccaatgctaaggtcaccgttaaacagaatggtaatatcataaaacaggtcactgtaccgcctggcccatttgaaataacagatattaccccctccgggttcggaaatgatttggatgtgacgctcactgaggctgatggcagggagcaacatttttcggttcctttctcctctgtttcacaacttttacgtgaagatagcctgcgttgggaggttgccttaggtcagttagaccaggatggattgtacctgtctcttatacacatctga

SEQ ID NO: 377966 - DNA, 519 bp, Salmonella enterica
atgaaagaaaaaaaagatggagagtatagatttaactctattgactatataatatttatatctgaaacacatgagataaacggtaatccagttgtgattattttagaaggttctaatgcggctaagaaccctgtagaaattaatgaatatttgaattatattgctaatgggtggtctcaatttaatggtcgtaatactatgaaaattgacaatgccagagatttattcattaatttagaagagaaagaagagcctaaatcaaatagtttaactcgcactgatgaaagaaaactatggtatcgtaaaaaccgatatatgaaagattggtcagatgataaagttttacaggcggcggttgaacatatgaacaaaataatgccatttattttgaaaaatggaccaaaattaccagtggataagttaggtgagctaatgttggcatttggtgattttattgaagagtccaacatgcgtggcttagatctaaaaggacttaataaccttttcacggataagtga

SEQ ID NO: 377967 - DNA, 807 bp, Salmonella enterica
gtgatcgcatttccagtgctttctttcatcaaacatgctccttcatcagaagcagcgaccttctgccttgctatgcaggcttttggtatgacggcagcatctctaaccatttataagaataaaattaaagtcaatagttttcttataatttatagcacagttattgctactctaggatatttagtaggcctagcatatattcaaaatccattttcatcagtaagtctaaaaatattcttctcttcattctggttgacattcggcattgctatatatcttctacgtcgaaaaaacaaagtgatgctgacgatgagaaacaaaggggaaatggcatcatcaaaaatgttaaccctaggaataattagctttattggtggggtaattacatcttggataggaaatggcatagatgtgatgtttttttgtgctttgatattaattttttccgaatcagaatctatcgctacggcttcagccgtcgtcgttatgtctttaatatctattttttcaaccattataaatttcagtacgggtaactatagtacacatacactagaatatctaagtgcaacgatcccaattgtcatattttttgcccctctaggcataatgtacgcgacaaaaagaggtgatttatttatccgcaaattactactgcttatagtaacaatacaatatttagttgtagcatcgacatatttccatatcattaacaacttaatcatttcggtctgtgttattttaatatcagcattatttcttttactcataaacaaattattcaaaggaaaaataaatgagcaataa

SEQ ID NO: 377968 - DNA, 705 bp, Salmonella enterica
gtggttaatatatcaggacaatgcaaaagtgagaagttactgcaaccagtactggatttcctaaaaaataatgataccaattacatactggatgttatttgcgatgatcgtctaatacagaatgttatggatgccttacagattaatggttttgaccgggttttcgcatatatggataaagctcctggaaaggtgattattagtggtcaaatagaagaagatcaacggtggcaacgggttgttaagcttttgaacgatatgcaggggctacgttcctggtcggttaaatcagtaaatgataaagagttggatgaattgattagtgacttgcgcaagttgaaattattgccaatgttgagcattcaacgtgtagatgaccgtattattgtgagtggacatctcaatcttcaggagcgtaactcattgtatactttaattcgacatcatatgctttcttatccgggaacacaggaaattatctaccagaatattaacactagttcgagtgcgctgggtattttacctgctcctgttgcgagtattggtggtaatagtgattttccttatgtcattctggacgatggtactcgcttgcaaaaaggggctgtgctgcctggggggtatcaaatcgtgaatatcgacagtattaacggtatcgaacttactaaacgtggggagctattgcatctacccttgggattatga

SEQ ID NO: 377969 - DNA, 501 bp, Salmonella enterica
ttgaacgaacaggctaatgctgcaaaatttaacgcctggcagcaagattcattagttcaggttagtctggtcgcagaggagagatataataatagtcaaaggattgataaagattcatgggggggcattcaggtttcggtaaacctatttgattatgataaaaagattgctagtcaaaccggtataaaatcatatcaggtattaaagacaaggatggattttaaatataaagaattgttggcaaaaatgaaatcattacaactgacgataaattctaatcaaaaggaacttaaaggattagaagagcaaagcagaactacagaagtgattttagctaatcagaaaagagaatataatatctcacaatcatcttattatgaaatgttaaacacgcaatacgactattttgcattagagcggaaaatggttgaaatgaaaattagtgatgctatcaacaagatatctttgctacaggtatctggcgaactgttaagtttgtga

SEQ ID NO: 377970 - DNA, 192 bp, Salmonella enterica
atggataaagccagaaaaagaatacaagagttaattgagtcagttggcatattggtattgtcatctcattcagaaaatgatgtgagatctttttgtaacaagggtgttgttttgaatgcaggtgagattgcctttgtgggggcagtggatgatgcttacaccttttatgtgaactcaagaaaatttggatga

SEQ ID NO: 377971 - DNA, 234 bp, Salmonella enterica
atgaaatcaatgaaatggaaaagcggattccactcaagtaaaaatgcttttgaatgcatcgattccgttggaatccacataattggcgtaaccagaaaacctatttgtaatacagacatgactatctggcgtaaatccatgaagcgagtacagagacatgccaatgtcagtgataagaagaacagatttatagttaaaatactgaaaccaaataaagccttactaatagcataa

SEQ ID NO: 377972 - DNA, 309 bp, Salmonella enterica
atggctgatatttgcatttcagtaacgccctcaagtcgaagcccctattttaatatggtcaaaataaataacgcaggtttagctgaacttgtcatcaagccttcaggggatgtcgttcgtcgacaggatgccccagagatttttgatatcacgacggtcgtctatgttgcttccccgcaatttattaatgaacattatggcctgttttcaggaaaagtaacatcaatagttattcccaaagagcgggctgtcgatatagatgatatctacgatttttatatggccgaaatcttacttcattctcactaa

SEQ ID NO: 377973 - DNA, 171 bp, Salmonella enterica
atgaaaatattatacaaagcagaccatttcctgctgtacatgtatcatttaaaaaagaaagttatctatataaattatttaagatccaaggagaagataacttcgaaaaaggctttccaacgattggagatgactttattgaagaaattcatcttggttatagtcaattga

SEQ ID NO: 377974 - DNA, 129 bp, Salmonella enterica
atgctgatatttgcatgcgaaaactggaagattacaaacttaacgatttttcaactcattcagattcagaagtatttaaggcgcttaatcaagctgttaaagcgtaatattcacttaaagaaaagttaa

SEQ ID NO: 377975 - DNA, 1185 bp, Salmonella enterica
atgaaaaggcagagaagcgtcaatttgttgttgatgttggtgttactggtggccgtagggcagatggcgcaaaccatttatattcccgccatcgccgatatggcacaagcgctaaacgtccgggaaggcgccgtccagagcgtaatggctgcttatctcctgacctacggcgtctcgcaactgttttacggcccgctttccgaccgggttgggcgtcgcccggtaattctcgtcggcatgtctatttttatggtagcgaccctgatcgccatgaccacgcatagtttgacggtgttgattgccgccagcgccatgcaagggatgggaaccggcgttggcggagtaatggcgagaacgctcccgcgcgatctgtatgaaggaacacaacttcgtcacgccaatagcctgttaaatatggggattctggtcagcccgctgttagcgccactgattggcggtctactggacaccatgtggagctggcgcgcttgttacgctttcctgctggtgctttgcgctggcgtcaccttcagcatggcgcgctggatgccggaaacccgccccgctggcgcgccgcgcacacggctcatcgccagctataagacactgtttggcaacggcgcatttaactgttacctgctgatgctgatcggcgggctggctggcattgcggtctttgaagcctgttccggcgtactgatgggggcagtattaggtctcagcagtatggcggtaagcattctgtttattctgccgattccggcggcgttcttcggcgcctggtttgccggacgcccgaataaacgcttctcaaccctgatgtggcagtcagttatttgctgtctgctggcaggccttatgatgtggattcccggctggtttggcgtgatgaacgtctggacgctactcatccccgctgcgctgtttttcttcggcgccgggatgttatttccactggccaccagcggcgcaatggagccttttccgttcctcgcaggcaccgctggcgcgctggtcggcgggctgcaaaatattggttccggcgtactggcgtggctttcggcaatgctgccgcaaaccggtcagggcagcctgggattgttgatgacccttatgggattgctgatcctggcgtgctggctgccgctggcgtcacggatctcgcatcagggacagacggtttaa

SEQ ID NO: 377976 - DNA, 1167 bp, Salmonella enterica
atgaagcgcgcctataaatatcgattctatccaacacccgggcaggttgagcttttagctcaaacgttcgggtgcgtgcgttttgtctataacagcatcctccgctggcgcactgacgcgtactataagcgtcaggagaaaatcggctatacgcaagccagcgcacgattaacggcgctgaaaaaggagccggaatttgcctggctcaatgatgtttccagcgtgccgctacagcaagccttgcgccaccaacaggccggactctcaaactttttcgccggacgagccagatatccgacattcaaaagcaagcgccataaacaggctgctacgctcaccgatgccgcgtttaaataccgcgatggcaggttgtacatggcaaagagcaaagcgcctttagacgtgcgctggagtcgcccgctgccgtccgtgccgtctaccgtcaccgtatccaaagatgccgccgggcggtactttgtttcgtgtctttgcgagtctgaacctgcatcactgccgctcacctcttcaatggtcggcattgatgttggtttaaaagatgtgttcgtcaccgatagcggattcaggtccggcaatccccgccataccgcgaaatacgcggctcgcctggcgctactccagcgccggttaagcaaaaaggccaaaggctcaaagaaccgcgccagagcccgcttaaaggtggcccgactccacgcgaaaatagccgattgccgaatggatgccctgcacaaggccacccgcaaactcattaacgagaatcaagttgtttgcgtcgaatccctcaaagtgaaaaacatgctccgcaacccgtcactgtcaaaagcgatagcagacgcaggctggagcgaatttgtgcgccagctccggtacaaaggcgaatgggccggacgttcagtggtagccattgagcagtttttcccgtcctcaaaacgctgtagccgttgcggtttcacgataaaaaaaatgccgctggatgtcaggaaatggcactgcccggaatgcggcgcagaccatgaccgtgacataaacgcggcacggaatataaaagcggcgggactcgccgtgttagcttgtggagagccggtaatccctgaaccgcttaatgcggctcaggttcggctccgcgaaacaagaatccttgccctttag

SEQ ID NO: 377977 - DNA, 270 bp, Salmonella enterica
atgatcacgcgtttcaaaatgcctgaaaacaaaaaacctcgccgaagcgaggttttacagcgtaatgcgggtggtagccgcgaagcacactgtgtcatgtcaacagcagaagtatacgcgttctgtgcagaacgcgcaatttcggcgcgaattttgatgaatttgagtatggatcagaagctccgttctgtctataaattactgttcatttatacagtgcttaactataatgtctttgacacaatgtgttatgcgggggccgcatcctaa

SEQ ID NO: 377978 - DNA, 159 bp, Salmonella enterica
atgcgtaaagcccgcctcactgagcatcagaacatcgccgtaattaagttggccgaagccagacgaacggttaaagataccttccaggaggcggttatttctgaagtgactgactacatctatggacattgggtttcaccacatcctgtttctcactaa

SEQ ID NO: 377979 - DNA, 204 bp, Salmonella enterica
atgccttatccagcccacattaatattgataatattcgtttcgagcgttatcggcgcagccattggacacggactgcgcttgtctacctgcgcgtacacgcagtacgtgaggatgacgagcacagcccaggttcaatatggcaagtaagacagctcgaaatcagatgccgtcgccatactcaaaagtatggtgtatcccgttga

SEQ ID NO: 377980 - DNA, 777 bp, Salmonella enterica
gtgattgtgatgccaaaacgcctgtcagacgagattgcctctcgcgtgcgggcgctgattgaagaacaaaacctggaagcgggcatgaaattgcccgctgagcgccagttggctatacagcttggcgtatcacgcaactctttacgcgaagcgctggcgaagctggtcagcgaaggcgtgctggtgagccgtcgcggcggcgggacatttgtccgctggcagcacgaaacctggtctgaacagaatatcgtgcaaccgctgaaaacgctgatggcgaacgatccggactacagtttcgacattctggaagcccgccacgccattgaagccagtacggcctggcacgccgccatgcgcgccaccgccgccgacaaagagaaaatcagactctgctttgatgcgacgctcagtgaagacccggatctcgcctcccaggccgacgtgcgctttcatctggcgatcgcggaagcctcgcacaatgtggtgctgctgcaaaccatgcgcggtttcttcgacgtactgcaatcctccgtcaaacagagtcgccagcgtatgtatctcgttccgcccgtattctcaaaactgacggaacaacaccaggcggtgatggacgccattctggacggtgacgccgacggcgcgcgtaaagcgatgatggcgcacctcagttttgtccacaccacgattaaacgatttgatgaagaccaggctcgccaggcgcgtattacccgcctgcccggcgaccataatgagatgaccagggagaataaatcatga

SEQ ID NO: 377981 - DNA, 489 bp, Salmonella enterica
atgtccattccagcgtatttatggttgaaggacgatggtggcgcagacattaaaggttctgtcgatgtaaaagaccgtgaaggtagtattgagattatcggtctttcgcatggactcagcctgccggttgatagtgccagcggcaaaatcactggtacgcgtcagcattcagcgatgatgatcgagaaggagatagacagctcttccccctacttcaaccgtgcggtagcgacaggccaggcactgaagagcgcggagtttcatttctaccggataaattactcaggccaggaagagtgctactacaaaattctcctggagaatgtgaaggtgacgagcgtgaatacagctattccgaacacgaaactttccagttctcagattaaccacgtcgagcatgtctgtttaaattacgaaaaaatcacctggcactacatggatggaaatgtccagtacaccgatgcatggaacgagcgcaagacggtctaa

SEQ ID NO: 377982 - DNA, 258 bp, Salmonella enterica
atggctataacacttgctcgtaagctggcaaaaatagcttggtttatctgcctgttttatattggcttgcgcattatctaccccgaaaatttaatcagtctgtacacctctgagcgtttcgcgcaatgggtatatggatactctagtcaggaaaatttcgacgacttatgggtactgatctgggtggtctgctcttttgcattcgccgtggtgggacatctgttttcaatgtggataatcaaaaaaatgcgccgctaa

SEQ ID NO: 377983 - DNA, 531 bp, Salmonella enterica
atggctcttaatggaaaaatgcttttaaatggtgcagatattacgccgttatcctttcccggtgttggaacatttatggcgttttccggcaacggtgcttataaaaatcgtggaggatgtggcaagttttcaggaactgctgccggtgatggcccactgcctgaagggcgatactggattgtgagccgcgggggaggtgggagtatctcaaagggaattgcttacataaaagacacgtacaacaaatttcatagcggcgcagaattcagacgcgatgaatggtttgcgttgtacccgaacgactggaacatcgatgacacgctctggatagaaggcgttaagcgccaacatttccgcctccatcccggcgtattgtccgacggctgcattacccttgtgagtaatgccgacttccacactctgcgtaatgcgctgcttgctacccaacaaatcgatgcgccctgtatgaaggatttgaaagcatacggcatgatcgaggtcgtgaataatggctataacacttgctcgtaa

SEQ ID NO: 377984 - DNA, 1113 bp, Salmonella enterica
atgttcccaaaaataatgaatgatgaaaatttttaccgaaaagcggttgaacaggcggtagcgccgccagcctctcctgatgagcatcaacgttccgggttgcgttttgcccggcgcatcaggctgccgcgtgcggtggggttagggggaatgtttttacccgtggccgccgtgttagtgtcgcaacccgtttccggaggctggtggctgttgctggtcggctggtcttttgtctggccgcatctggcgtggcagtgggcggcaaaagcgcttgatccgctacgtcaggaaatttacaacctgaaagcggatgcgatcctctccggcatgtggatcgcgctgataggcgtcaacatgctgcctgccgccacgctgtttatgatgatgagtatgaatctgatgggcgctggcgggttgcgactattcactgccggaatggggctcttgctggcatcatgtctggtgacattgcagcttaccgggctacctgtcgctatgcgaagctcatcgctggaagtcacgctctctttgcccgtcattatgttgtatccgctgctgtttgcctgggtaagttaccaaacggccattaaattagcggaacataagcgacgcttgcaggctatgagctcgcgggatggcatgaccggcgtctataaccgacgacactgggaaattttattacgcaatgaattcgatcacagccgacgccaccatcgagaggcgacattgttgattatcgacatcgatcattttaagagcattaacgatacctggggacatgatgttggggatgaggctattatcgccctgacgcgtcaactgcagataacgctacgcgggagtgatattatcgggcgctttggcggcgacgaatttgcggtgattatgtgcggaacgccggcagacagcgcgattaccgccatgtcgcgagtgcatgaacggctaaatacattacgcctgccgggcgcgccacaggtcatgttacgtatcagcgtgggcgtggcgccgttaacgccacaaatcactcattatcgggaatggctaaagtctgcagatatggcgctttataaagcaaagaatgccggacgtaaccgcaccgaagtggcggcatga

SEQ ID NO: 377985 - DNA, 456 bp, Salmonella enterica
atgactatctgggtggatgcggatgcgtgtccgaatgtcattaaagaaattttgtatcgcgccgccgggcggatgcagttgccgcttattctggttgccaatcaggccttgcgcgtgccgccttcgcgttttatccgtacgctccgtgtggccgccgggtttgacgtggcggataatgaaatcgtgcgtcaatgcgaagcgggcgatctggtgattaccgctgatattccgctggcggctgaagtgctggaaaaaggcgctgcagctcttaatcctcggggagaacgctatagcgaagccacgattcgcgaacgcctgacgatgcgtgactttatggacacgctacgcgccagcggcgtacaaacggggggaccaaacagtctttcgccgcgcgatcgtcagcattttgccgccgagctggataagtggtggctggaaagccagcgtaaaaaataa

SEQ ID NO: 377986 - DNA, 135 bp, Salmonella enterica
atgcgaaaaaacgttatgaagatccggataaatcatagccgcatgaacgactcggaagggattctgagtactcctaaattgtatctctatcacatttttgaaacatttatactggcaactaaaaccgtaaattaa

SEQ ID NO: 377987 - DNA, 909 bp, Salmonella enterica
gtgcgtattggtatcgatttaggcggcacaaaaacggaagtcattgcgcttgatgatgcaggagaacagcggtttcgccatcgtctgcctacgccgcgggaggattatcagcaaacgatagaaactatcgctgcgctggtcgacatggcggaacaggcgaccggacagaccggtagcgtcggcattggcattcccggttctctctcgccttacactggcgtcgtgaaaaacgctaactctacgtggcttaacggccagccgttcgataacgatgtgagccgtcgtctgaagcgtgaagtacggttagctaacgatgccaattgcctggcggtctcagaggcggtagatggcgcggcggcgggggcgcaaacggtatttgcggtgattatcggtaccgggtgcggcgcgggcgtagcgctaaatggccaggcgcacatcggcggcaacggtacggcaggcgaatggggccacaatccgttgccgtggatggatgacgatgagttgcgttaccgcgaagaaattccgtgttattgcggtaaacaaggctgtatcgaaacttttatttccggtacgggatttgccacggattaccagcgtttgagcggtaaggcgctaaaaggcgatgagattattcgtctggttgatacgcaggacgccgtggcggaactggcgataagccgttatgagttacggctggcgaaagcgttagcgcacgtcgtaaatattcttgatccggatgtcattgtgctgggcggcggcatgagcaatgttgagcgcctgtacaagacggttccgtcgctgatgaaatcgtttgtttttggcggcgagtgcgagacgccggtgcgtaaggcgcagcatggcgattcgagcggtgtgcgcggcgcggcctggctgtggccgctggcgtaa

SEQ ID NO: 377988 - DNA, 147 bp, Salmonella enterica
atgacgcaagaatatgcaggaatgtccaccagacgggggcgcaccggtaagtacctgtacagcacgggagcaaaaatatttttgatcctgctgacggtattcactgtcgcagcgctgttcggcctgtaccaggtcctgacgtactga

SEQ ID NO: 377989 - DNA, 138 bp, Salmonella enterica; identical to SEQ ID NO: 377939

SEQ ID NO: 377990 - DNA, 3177 bp, Salmonella enterica
atgcggggtatcggggccgtcactcatctttcctcaccgacaggtagcagcgccccttgccctgacttcagcgggatgtggaatagcatcagggactggttctcactgcccgttcaggatgaggccgcactgtgctttcacgttttttatcagccggatgaaggaacgtcgctgccggacaggctgaagcactttttaagactgaaggcgctggcgtctccgggacggcaggataacttcaccgcagagcgaatactcggtaccggtgaaaccatctgcatgatagcctccggtaaaagcagcgaccttccctccgtcacacttcacctgagcgaccaggaatggcacacggcgcagcctcaggaagcagtagccccgttagcagaggcaacagaaagccccggaagaggcccaacaggcccccccattacacgtacgcagatacagacatggctggacctgccgcaggaggcaaaaagcgacgctggcggctggagaaaatgggcccaggcgcagggggttactctcggaagtgccgcactctatctgaccaacactgggctgaccccctatggcagggagcgattacaccctcccaaagagagaggccgccctatcactgtcggccagatccagacgtggcgtgacctctctgaggaggcgcgcagtgcggcgggcggctgggtaacatgggcacaagcccaggggatctctatcaccagcgccagaaaacatctgacaaacatgggactgacattctatggcatggaacggctacagcatcctaaggagaggggggcccccatcactaaggcgcaactcctgacgtggtttaacatgtcacaggaagagcacaacaaagcaggcggctggataacatgggcacagacgcagggaatagcaaccagcagcgccaggagctgtctgacaaacacagggctgactacccgcggcatggaacgactgcaacttcccgaaaagagagggctccccatcacggaccgccaaattcaggcatggaaggacctgccgcaggagaagaagcacgaggcaggcggctggactaaatgggcacaggcgcaggaaatctctatcaccagcgccaaaaaatatctaacaaataccgggctgacccctcgtggcatggagctgttacggtcctccggagataaagtcgctcccatcactgagtcgcagctcctgacgtggcttaacatgtcagcgcaagaacacagcgaggcaggcggctggataacgtgggcgcaggcgcaggggataacaaccagcagtgccagaaaatatctgacaaacaccggactgaccccccgcggcatggaacgattgcagcacgccgaagaaaggggccgcgccattacggacagacaaattcaggcatggcgagacctaccgcaggagacaaaacttgagtcaggtggctggaaagcatgggcgcagacacaggggatacctctcagcagtgccggaaactttctgacaaacaccggactgactccctttggtatagttcgtctgctgccgcccgaggaaagggggactcctattacaaatgcacaaattcaggcctggcgggatctgccgcaggaagcgaaaaaggaggctggcggccgaataaagtgggctcagacgcaggggatagctatcagaagtgccgaaaactttctgaccaacaccgggctgactctttttggtatagagcgcctgctaccgccagaaaaaagaggaacacctattacaaatgcacagattctggcgtggcaggagctgtcgcaggaagcaaaaaacgaggcaggcggttgcataaagtgggcacaggctcaggggataaccatcagtagtgcctgcagctatctgacaaacacaggactgacccaccatggcaggaaacggctgcagccacccgaagagaggggctcgaccatcagccaggcgcaactcctggagtggtttaatatgtcacaggaagagcgcacaaagacaggcggctggagaagatgggcggaggcacggggaataaccttcagaagtgccgaaacctttctgaccaacagcgggctgaccctctttggtatagagcgactgaaaccgcccggagaaagaggcgctcctattacaaatgcacagattcggacatggcgggacatgtcgcaggaggcgaaacgcgaggcgggaggctggataaagtgggcgctggctcaggggatagccatcggcagcgccagtggttatctgacaaacacaggactgaagtataatggcatattgcgactgcagcagtcgctgtctgctaccgtcacgagtgacagtcaacaaacatcgatgtccgcaggcgcaagcgatgagataaccgccagcgtgggtatcctcccggagcgcagcggggaaaaacggtcgcttccctcgaccaaagaggatatctcagccccgccggcaaaacagatcaagaaagaggaagacgccgtgacctggcgaacacaccagataaacaataacctgcccattctgcagcactggcgtgacccgacgatatcggtgatggcgcaggcggaaggcaagattgaaaccttgcaggttacacggtgggggcctctttttaacccattaccccggcagataaaagccagaattaatcaggatattcgctggtttctgcaaaatgaaggaagtcatgatgcgcgaatgaatgccatgatgtccgtcgctattccccttgatgacagcgacggttacagagggcgtacagtctacgcgcgaaccgatctggcggcgtttaccgtactgggcccctactccggccgcctgctggacagtgaaaaggtacggtgtgaatacgaaaaagaatatgggaaggaagccggtaattattattttgccacgcgaagccaggaacgcattgtatccggcttcccgcagggaaatctcctcagcctgcttaacagtccggtatttacccatcggacggcggaagcagaagtaagacagaacgtcagcgcggtgcttgtcgggaagaatatcaactttttcctcaccacacgcgacgtccacgccggggatgaactgtggtttgattacgggccggactaccagcattttgagccaggtgaaacgctacgcccaacgcaggtaaaggaggagccgccttcttcggaaggagaataa

SEQ ID NO: 377991 - DNA, 1359 bp, Salmonella enterica
atgacaacaacacttaataacaatataaaagaatatttcataaaaaataattgtacatatgaattgcaacccgacgttacttttccagtaacaattcctgcaaaccaggacattcttatcaaggttgccggcaatgacactacccttgttgacgaagagcggtggagttctcacgaaaaaactttactcccctcgcttataacaagtataggaaataatgcaaaagttaaaatagaaataacacaatgttcaaatgtcatcattaacaaaagattatcgttaggttcctccattaatcaaaatggaagcaagtcacaagctgcccttattgattcagtcattactggaaccataggacgtaatgtaactttaaaaatattaattgtagactcggccaatatcatactcaatgcgcaagatagcagcttaattattaatgacgccgatctaattaaagaaataattaatatagatgatggggacaaccctcttgataattttaaactagatgtagaattaataaattgcgctaacattcattgtccagaagataataaggagtgtggagttgtttctataaatgatggtcagttaatagacgaaatacttgattgtggggaaataaaaaacaagagtaatataaatatcaaaataaaagacagtgcaaacgcacatgtcaactctataaatatagttgaaggagagttagtggatgagttaatagattgtttatccattgcagatagctctgttgaaatcaaaatatcatcatctgtatcaacatctgcaaatacaatttctattacagaaggggagttgctcgatgaaacaatggacgttaaaaaccatatcagaaacagtaaaattgatgcaacaatcaccaattccgcaaatgctttctactcggcgacaatgactattacaggaggggaattaatagatgagataatagacactaatgagataacaaattcaaaaattgaaataaaattaaccactagtggctgtgcatcatacattggaaataacgcaggtcacacttttaccttaacaaatggtgagttgatcgatgagattatcgactgttccaataatattagtgataataaccctatatcaatcactgtagaaaacagcgccaatctaataacacaaaactcttcaaaccacgttccagtcttgaatataactaatagtcaactattggatgagttagtcgactgcccaaatatcaacaataactctataactgttgaaacatcatcttcaggaaacattgcattagcgaattcaattttaaattcttctaatatgaatttaatagaacgtataattgatacagaaaacactacgaaatga

SEQ ID NO: 377992 - DNA, 162 bp, Salmonella enterica
atggacaagcgctgcgagcggattgcggaggacgtgaacaggcggttcgatagagttgatgacaatacaaaatggaaatggagtgcgattattattcctgtaggttccgtcattgtgaccgctgttgttgcttttctgatagcaaaatatgtttcgcattga

SEQ ID NO: 377993 - DNA, 1467 bp, Salmonella enterica
atgttactatttatactcagtacggcaaagagtgatgagctatcatggaaaggtaatgactttaccctctatgccagacaaatgccattagcagaggttttacatcttctttcagagaactatgatacagctattactattagtccatcaataacagccacatttagtgggaagatttctccagaaccgccagtggatattctgaataacctggcaacacaatatgatctacttacctggtttgatggcaatatgctatatgtatatcccacatcattattaaaacatcaggttatcactttcaatatcttacctactggacggttcattcattacttacgtagccagaatgtcctttcatcaccgggatgcgtggttaaagaaattgctggtactagcgcagtggaggtgagcggtgttcccagttgtctgactcgcattactcaattagcttcagtactggataatgcgttagtcaaacgaaaagatagtgcggtaagtgtgaatatatacacacttaagtatgctactgcgatggatactcaataccaatatcgagatcaagctgtcgtggtccctggcgttgtgagtgtattacgtgagatgagtaaatctggcgtaccggcggcatctccgagtgatggttcacccgcgacacaggcattacctatgtttgctgccgatccacgacaaaatgcagtgatcgttcgtgattatgcggccaatatggcggggtatcggaaactcatcacagaattagatcaacgccaacagatgatagagatttctgtgaaaattattgatgttaatgctggagatattaaccagttaggaatcgactgggggacggcagtgtcgctgggtgggaagaagattgctttcaattcgggtctgaatgacggtggtactagcggtttttcaacggtaatcagcgatacttcaaactttatggtgcgtttgaatgcactggaaaaaagttctcaggcttatgtactttcccaaccatctgtcgttactttaaataatatccaggctgtactggataagaatattactttctatactaaactacagggggaaaaagtggctaagcttgaatccatcacgacgggttctttgctgcgcgttacgcctcggttattaaacgataatggcatgcaaaaaataatgctgaatctcaatattcaggatggtcaacaaagtgatacacaaagcgaaacaaatccgctacccgaggtgcaaaattctgaaattgcttcgcaagccacattattggccggacaaagtctattgctgggaggatttaaacaaggtaagcaaatccgttcgcaaaataaaattcctttattaggcgatattcctgtcttagggcatttgtttcgcaatgatacgactcaagtacatagtgtaatcaggctttttttaattaaagcttcagtagtaaataatggcatatctcatggctaa

SEQ ID NO: 377994 - DNA, 1149 bp, Salmonella enterica
atggcgaacagaatgattctgaatgaaacggcatggtttggccggggagcggtggacgcattaaccgatgaggtgacgcgtcgcggttatcataaggcactgattgttacggataaaacgctggtaaaatgcggtgtggtcgataaggtgacaagcagaatggatgccgcagggctggcgtgggagatctatgcaggcgtgatccctaatcctacgatttctgttgtccaggaagggcttaagttctttacccaaagcggcgcggactatctcatcgccattggcggcggttctccgcaggatacctgcaaagcgatcggtattatcagtaacaatccagaatttgccgatgtgcgcagtctggaagggctatcaccgacccgtaaacccagcgtgccgattatggcgattccgacaacggcgggaaccgcggcggaagtcactatcaattatgtgattaccgatgaagagaaacggcgcaaattcgtttgtgtcgatccgcatgatattccgcaggcggcatttatcgatgctgatatgatggacggtatgccgcccgcgctgaaagcggcaacgggcgtggatgccctgacccatgctattgaaggctatattacccgggccgcatgggcgctgacggatgcattgcatatcaaagctattgaaatgattgctggcgcgctgcgcggcgctgttgccggagaaaaagaggccggtgaggcgatggcgctggggcaatacgttgccgggatggggttttccaatgtggggctggggctggtgcatgggatggcgcatccgctgggggcgttttacaacacgccgcacggcgttgcgaatgctattttgcttccgcatgtgatgcgtttcaatgccggacataccaacgagaaattccgtgatattgcccgggcgatgggggtgaaggtagaaggattgagccttgaagaggcacgtaatgccgccgtggaagccgtatttacgctaaatcgcgatgtgggaattccgctgcatttgcgtgatgtcggcgttcgaaaagaggatatcccggcgctggcgcaggcggcgttcgatgatgtctgtactggcggcaatccgcgtgaagcgagtctggcggacattgtcgaactgtaccatatcgcctggtaa

SEQ ID NO: 377995 - DNA, 954 bp, Salmonella enterica
atgccagtcactctaaatttcggtaaccatcaaaattatacgcttaatgaaactcggcttgctcatctgctaagtgcagataaagaaaaagcaacccatatggggaactgggataaagtccgggaccactttagatcggaaaaaaaggaccatgcgctggaagtattatacgccattattcacgggcggggtcctggggaacctggagaaatggaagtcaacgtagaggatatgagtaaaatttacgcgtttaaacggttacaacatttagcctgtcccgctcaccaggatctgtttaagattgagatggatgcctctcagacacaacttttatttatggtcggcgacacggtgatcagccaaagcaagattcaggatatcctcaatacatcagataatgtagtagtagaatctatgagtagagaggagagacagctatttttacaaatatgcgaggtgattggcgcgacgattacctggcacccagagttacttcagggatcggtatcaaccctacgaaaagaagtcactggtaatgcacaaatcaaagaggcggtttatgggatgatgcgtcccgcagaagcgcccgaccaccagcttgttgaatggcaggactcacttactgaaaatgaaaagtcgatgctgacctgtattaatgcaggtaactttgagcctacaactcagttttgcaaaataggttatcaggaagtagaaggtgaagtcgcttttagcatgatgcatccatgcatctcctatttgctacatacctatacgccgcttgtagattttaaaggaacaaatgcaggttttttaaatgaacttaatcaggattataacggctatcataaaaataaaatgtttattgatgtaattcttgaaagaatatatctagcgcatgaacgttctttgcatattggtaaaaatgagtgcagtcgcaatatattactgacataa

SEQ ID NO: 377996 - DNA, 1209 bp, Salmonella enterica
atgacgtatcgcagtaaagtggcggtggtttacctgcttggcttctttcttgatctgattaatctgtttatcgccagcgtggcttttcccgcgatgtccgtggatctgcatacgtccatatcggcgctggcatgggtgagtaacggttatattgcaggattaacgctgatcgttccgtttagcgcgtttctttcgcgttatctcggcgcacgacggctgatcatgttttcgctcattctgtttagcgttgccgccgctgccgcaggttttgccgattccttacacagccttgttttctggcgtattgtgcagggggcgggcggtggtttattgatcccggttggtcaggcgttaacctggcaacagtttaaaccgcatgaacgcgctggcgtgtcatcggttgtcatgatggtggcgctactggcgccggcatgttcgcctgcgattggcgggctgctggtggaaacgtgcggctggcgctggatattctttgctacgctgccggtggccgttctcactttattgctcgcttatcgttggctgaacgtcgcttcgacgacaatggcgtcagcaagattgctccatctgccgttgttgacggacaggctgctgcgttttgccatgatcgtctatctgtgtgtgccgggtatgttcattggtatcagcgtggtcgggatgttttatctacagaacgtcgcgcagctatcgcctgcggtggcggggtcgctgatgctcccctggtcgatcgcttcatttgtcgccattatgcttaccggacgttacttcaatcagcttgggccgcgtccgctgattatcgtcggctgtcttcttcaggccgcagggatactacttttaactaacgttacgcctgcgacatctcatcgtgtactgatgatgatattcgcgttaatgggcgctggcggcagtttgtgcagcagtaccgcgcagagtggcgctttcctgactattgctcgccgggacatgcctgacgccagcgcgctatggaatcttaatcgtcagctcagctttttcattggcgcgacgctgttgacgctgctgttaaacgcactccagcgcgttatgtcgcttgaggttgcttatcgctggacctttattgccgcagccggtatcaccctgctgccccttatttacgctgtctgtctaaacaatagaaaagcgcttctgtgcctgaaaaaggaaagaccatga

SEQ ID NO: 377997 - DNA, 189 bp, Salmonella enterica
atgctcacgctaaagcatatgttacatctggctatagactacattgctcaaaacactaccagatacagcgctcacatagaaaatctttttaatcaatatgttagatgcaatcaattacagacagaaaaagtagtaaagtttatgcctcaagtgtcgataacctggatgacacaggtaagcctggcataa

SEQ ID NO: 377998 - DNA, 765 bp, Salmonella enterica
gtgcttacggcacccgcctgccgttgtttgttacttttgcttgagtctcatccagacattgtcactcagcgacaattttataaaaccgtttgggaggacgatggaatcattgttccggcaaatacgctttatcagaatatttctattgttcgccgagggttacgtaatgtcggtcagacggaggctcccgtcgtcaatacaataccgcgaaaaggatttcaaattgataaagacgttgagattacatgtgtagatagtgagttcaggataattgatgccagccaaagtacatctgatgttacccatcccgatatcgaaaacgaaacggatttgagttcgacagcaaaatgccctgtggtgaaaacgcagcctgaaaagcaagaaaaatataattttttaacaagttacgatgtccgaactatctgttttattttgctggcattttgggttggtgcggcaggaggatactatttatggaatgccgatagtacaaaaaatttttatgcagattataaattagtagataaagataaaggctataatttttttataaaagatgaaactcataacgagcaaagcgaatttaagcattttaaaagactacttcttagctcaggggtaagctataaaaaatatccatggatctattttccgctctcaaccacatcgccgggtttgtcaatgcttgcatgctctaaaaaatatactaacacatcccctatgcaatgcgttactctttcttttcgcgagacaaacaatgaataa

SEQ ID NO: 377999 - DNA, 483 bp, Salmonella enterica
atgaataataaaaaacgtgttactttcagtattgcttctctgcttaccggggtgttagtgtacgcatcatatagttattatacgacaaagattctggacaaagaagaatgccgttcctcactgatcgttttctataatcaatcacgctcagatattcaactcaattttatttattcactggaagataaaaagggggttgtagctgttagcggtaactattatgagaatgataaattaaaagggaaaatcaggcgagatattgaatatagttggagagaaaatcacgatatttatcaattgatatctacaaaggttaataagtaccgtatcctggaaacgttaccctcagatacaatggcgaagattttgccagatttctacgtttttcctgataaaagtgtcaactattctattcaaaatcaaggagctggtggttttattttttctaccggggggaggccacttttttactgtgcaaaataa

SEQ ID NO: 378000 - DNA, 531 bp, Salmonella enterica
atggctgtatacgttgtgagcaataacctttatttacaagaaggtatgactgcgttgattcgtagcacagggactaaagtgataaaggcaggcatacatgatttaccttttgatcttctcagctttgaggatattattattcttcaccttagccccgacagtaaaaactacgcaagaattatttcctcactaaatcgattaacgaagttaatggtggtacaaacatcgatgaatctattatgttgccatgccgatcacatcattaatgcaaaagattcgttatctaatctaaaacaggcaacgcttaatttattaaaaactatcaaaagtaaaattaatgatggtccattgctcagtcgtattgaaaatattataatcaattatgctcttgcagggaaaaacgttaatgccattgcgcatattttaaaattaccgccaaagagagtatatgattatcgcagtcgggcgtgcaaaaggctgggtggaaaaaaaattcacgaccttttgctgatacaagaaattttcaactaa

SEQ ID NO: 378001 - DNA, 546 bp, Salmonella enterica
atgaaaaacctaaatcgcattatatcgctgacaagccttttttgcatgacaggattagtacaggcggcttccacaggaactattacctttagtggtgagctgacagcaaatacctgtgatgtctctgtggatgggcagggggcggatgcaaccgttgttttacctaccgtgagtaccagccaactggatgccgccacgaaaacagcgggtgaaacaggctttgttatggcgttgaataactgtgccaataccctgcaaaccgcctctgcgtttttcgaatcaggtacatctgtcgatctggttaatggtcggctgaagaacatgacgggaaatgcaacgaacgtcagcctccagttattggacgcttccagttcatctcagtccgtaatccacgttggtaatacgaaccagacgacgggcaatacatacgttaatgtcagcagcggcaccgctaatttaccctataccgtccgctattatgcggaggatgaaactactgccggtactgttggcagtaacgtagtttattccattcagtatcaatga

SEQ ID NO: 378002 - DNA, 702 bp, Salmonella enterica
atgaaattttcggcgcgtgtatttattcatagtgttgtatttatagtactgacaatttttagtgaaaatgcgttagctagtgcagtaattagcggtacgcgtattatctatccatctgacaataatgaaattagcgttaagatcatgaataacggttcggcgccgatcttactgcaaagctggattgatagtggcgatcagaatgcacgcccgtcggcgattaaagtcccttttgttttgacgccacccataaatcgagttgatgccggaaaaggccagacgctacggattagctataccggtgtcagtcttcctgtagacagagagtctgtcttctggctaaacgtactggaaataccgggtataaatcaggcaaaagcagaccagaatacgctacaggtagcctttcgtagtcgtattaagctgttctttcgtccggcaggattgcagggaagcgctaatgacgcagtgaaatccattatctggcaggcgaaaggcactcatctggaagcgacgaacccgacacccttttatgtaagctttgccagactggtagtgaacaataataaaattgcaggtgtgatggttcccccacgccgttcaatcatggtgaatattcctggaaatgcgggtagtaaaattagcggtgcatttgtcaatgattatggtgctgtgaatgcattctctgctgatattaaatga

SEQ ID NO: 378003 - DNA, 2562 bp, Salmonella enterica
atgtctaaatatattcagttaggctttcggaaaaaatatccgccgttggcaatagcgatattttcaacatctattctggggattctacgggctgaagactcaaacgcagcgataagccagaccatgaaaacggtagcgtttgatcctactttcctgaataccgatgatgaaaaaacagtcgatctaagtcgttttgcttatggttcgtccggaatacctggcgtttataaaacagcgatgtatgtaaatgatcagttcatcaataaaaaagatattgagcttcgagccagaaatgacaaatctatttacccctgtttgtctacagaggtactgaaaagcattacctttaattatgacaaactaccggacaatttttttaaccagagtaacgtcgaaggctgtattgatcttcaacaatatctgccagaagcgaaagttaattatgatagtaatgagcaacggctggatattgtcattccacagctctatatgttgaaggtagccagaggaacggtgagtccgcaattatgggatagcggtatacccgcgctgttactgggatataacataaatggatatcacagtgaaatgaaaaatcagcaatttaattcattatatgccggtataaacgcggggctaaatattggctcatggtatctgcgtcacaatggctcatacagcagtacaaataatggaccagacagctacggtactatcaatacctatcttcagcatgatgttccgctcttaaaagcccgaatgttgattggtcaatctaataccaatggggatctgttcgatacgctacctttttctggcgtgcagatggttacggatgaacgcatgttgccagagtcgctacgtggctatgccccggagattcaggggattgcgcgtactaacgccagagtgaccgttcgtcagggagagctggttttgtacgagaccacggtgacgcccggggtatttttaattaatgatctctacccaaccggttatggcggcgatcttaacgtcactgtgcgtgaggcagacggtacggaacaacggtttaacgtgccttacgcttcagttgcccaattactacgccctggatcttcacgttatgccatcaccgccggaaagttgcgtaacgataatgtccgggagaagccgatggtgtatcaggcgacgtggcagcatggtctgacgaacgccttaacgggctatggaggagcgcaatttagccagaattattatgcagttcagcttggagcggcagttggtacgcctgttggtgccgtatcgtttgatattacccaggcccatgcccgactgggggaagaggagtggcgtaataacacccgcagtggacaaagctaccaggttagctacagcaagcttattcgggaaattaacagcaacatttcactggcggcctatcgcttttcaaccgatggctatatggattttatgacggccatgcagacacgcgatgctctgcaacgcggtttttcttcaaatgcgatatggcgtgccaaaaaccgaatgacattgacgtacgggcagggcttacccgaacggtgggggcaattgtatctgaacggttctgttcagaactactggaacaaagcgggaacggatgaacaatttcagttaggttacaacaatcaatacaaacaactgacatgggggatcagcgcggcgagaagtttctcaagcctgggagcgcagcagaccaattacctggtgagcttcagcctgccgttaggacgtgatgaccgagtggctacgccgcgattgagagccgatttgacgcatgataccagtggtagaacaggccagcaggtcaccctttccggggtgagtggcgaggagagccagttcagctacggcgtaaccgcaatgcatgttaatcagaatgttggaacgagcggcacgctcagcggcaactaccgtagtgtaagtagttcgctgatggcgtcagccagcaccggcaaaagctaccggagcgcctctgccgggatgagcggtacggtcgtgggtcattccggcgggttaacattcacgccttatacctcagacacatttgcgctggtagaggcaaaaggcgcggaaggcgcgaaagtttcttcttatccgggagtacgaatcgattctcacggttatgcggtagtaccttatcttaacccttaccagatgaatgatatcagtatcgatccaaaagggatcccggcacagacagaactggagagcactaatcagaaaagcgctccctattcaggtgcggtagtaaaaatgaaatacgacacccggcaaggtactgctgtacttattaacgtcacctggaaaggcgaaccggttcccttcggcgccgaggtattggatagccagggaaatagggttggcagtacgggacaaggcggacagatatatacccgtgttacccgcgaccacgatcggctacaggtgaaatggacagagacgcagcccattcagtgccaggtaagttaccaattaatgccagttgcggcagggcgaactgcccccttacttcaacaattcaacaggttgtgtgagtag

SEQ ID NO: 378004 - DNA, 1239 bp, Salmonella enterica
atgcgaatgtcactatttaagcagaaaatggcgatggatattaaagagaaattaaaaaggaaatttcgtatttccttatggaaggcttacagcagtctgcaatggattgtctttttcgtattaattcttggtagtggtgtagtacaggcgcaagtgacctgcgcgccttatgatgcgtccttaccaagaagagataccataccattagcgcctattaatatttcggcgggtattgatattccggtcggcagcattatctatcggggagcctggtatggtggagatccagggatgtatcatctcctttgtaccagtacaagaccaccggaaaccgttaactatacttataatctgggcattcagtccgcgcctatgacattagctaacaccgcgcaatatgatggtaaagtctataatacgacgatccccggtatcggcgttattatttccgatggtgctaatgcggttagccaaagcgcaccttatgcgaacggtgggatacgccagcttacgatgaacagtaggtatatgagtcatatgatttatggtagcactcgatacctctctttaataaagatcgggccgatttatcccggtagctatgctttaaatgcatccagccttccgaccgcaatgatctactatgataatgcccctggttatccagcaatacccggtcttcctgtcgtttcaaatattctggaatttagcggcagtataaatatcacagcacaaacatgtactacgccggatattatcgttccgatgggaagctatgatgctaatcaggattttgatggcgtaggttcaacaacgggatggataaaaacaaatctggagttaaaaaactgccctgctttttacggcttttatgatgcatcgaacacggcgcagctatttaactgggatcagggaggggcaagtcatatccctgcgccgaccagtaatactattggcgcttacttttcgccgaataccgccatcgttgatagcgcaaatggcataatgagtatcgatacctcggctccttcatcggcttccggcgtgggtattcaactgggatggggagatggtgcgccggtaccgtttaatttaagtgtggcgcaaatattaacactaccccgggacgggcgaagtaacgttagcgttcccttgtatgcacgttacatccagacggatggtatcattacgcccggacgtgctgatggaaaagtgacttttactatttcttattattga

SEQ ID NO: 378005 - DNA, 240 bp, Salmonella enterica
atgcccacgctgcaccatataactgagcagcgagttcagctgactttccgtagtgtactctgcgcttatcagcgttaccagccgctccagcagtatcatgagatcccgttggcggatatgcttttgcagcagctccagcagcgcgatccgtcgatgctgcatgatgtcatcgtcggggataacggtaatatccaccagctgaaaaggctcactatagatacgccgcgccagctcgggtaa

SEQ ID NO: 378006 - DNA, 879 bp, Salmonella enterica
atgtgccagcaacggcaggtgtttactcaacctgaaaagggaaactatatgagccattttactgttttagttatcggtaataaccctgaacaagcgttagctccttatcatgaatttgaatgtactggtattgatgatcgatatatacgggaaatagatatcactgaagaagttcgcggtgacgttaaagaacaaggttcagttgaagaatctgttatctacaatctcggtgatgacagcattgtttctgatgagtcagaactcgatttagcagaccagcataaattcggttatgccattatccgtaatggtgaactgattaaagctgttcgccgcacaaaccccaatgcaaaatgggactggtattgtctcggtggtcgctgggatggtttttttcttcacaaaaacggtatgcgcactaactcactaagaaaaggtgatatcgattttgcgggaatgctgttcaataaagccattgaagcaaaacgcgattatgaggaatttgcggtcgctgtctccggacatgaatttccgcgtacctgggcttctgtttttgctgaaattaaagacattgataaagctcgcgaattctataaatcacagccagcgataaaatcaattgaagaagctggacttttcaaattcagcgttgagcactacggagacgacgagcaagcctacgtcattcgccaggttaattgcgtactttccccttacgcaattattcacgaaggtaactggatagccaaaggcgaaatgggctggtttggtttgtccgaggatgaagtgactcaggatcagtggaacgaaaaggtttctgaattaatcagcaaattacaggatgaaacgatgctgtcgctgtacgactgccatatatga

SEQ ID NO: 378007 - DNA, 207 bp, Salmonella enterica
atgaagcatcagcactacggcacaatggaagtaatcaggcaatgcgtggttccgggaacgatggtcaaatataacggcctgatttataaagcaacaactaatacaggaggaaaactgacgctaacaaatactcgtaaaaacattaccatccgtgatttagttatagaagcttatcttgatggtaaaggtgaactacttacaaactaa

SEQ ID NO: 378008 - DNA, 276 bp, Salmonella enterica
atgataaccataggcatttatgtagaggggcaagatgcaataataaaacctgtcaatacccatcgtgtaggtgttgaaattgaaggtctctcattatctgaccttattgaatccgttgatgatgattcagctattctggaaaaaataggtgaagataaaattgctgactggatttccgatcataacaaactcagcagttttcttgataattttgatatccgcgatgtgtccgactggattgaaattagaaatagcgaattacaggtagaggactga

SEQ ID NO: 378009 - DNA, 276 bp, Salmonella enterica
atgaaagttgattttgaagttaccgcatccagtatgaccgtgaaggggagtcacgataaaaaatttcgtgttgacgttgaaggtgccgatttaaaagaactcattgagtacgttggtgagcaagatattcttaccggagttggtgaggctaatatagctttctggctttttaatagtggtacactggacacggaaaaattccttgataattgcagtctcgacaggatagctgaatatctggaaagtaaaggctggacggtatcaaaggagaattga

SEQ ID NO: 378010 - DNA, 141 bp, Salmonella enterica
atgtcattaatgcttttagtggaggtgatttcatactccgcattcgggagccataataacttgcaatcaatttcgctaaaccgaacaaatttgttagaagtcattttttttgtgaagttcatcgtaatcggcatcttttga

SEQ ID NO: 378011 - DNA, 426 bp, Salmonella enterica
atgaaaaatgacgcaataaaagatgttatcacgttccttgtgactgatgcactgcaattcaagaaactcaatgaggaacgtgttcaggcgcttatgaagcttatcagcgatatcgacattgaaaaaagaagaaaggaacgggtcaagaagaacatattaaatacgcttgatgttttttgtaattcaccagcagacgctcaatgtaagacactggcaaaggttatcagaaatatagtggatacaggatgttcagaaactacagaacaaaccctccttgttcaacaaaaacagggagagcctgatattaagagtctcactgaaaggttaaagaaatccatcaccaaagttgagaactcaataccgtgtcaggaggtagtggatttcctcttatcggagttagtatttgtcgagtccgagttgaaataa

SEQ ID NO: 378012 - DNA, 162 bp, Salmonella enterica
atgaaaactatcgaccttaacaataacgaatcacaggtaagcggcgtatttcccaaccatgatggttcgtttactgcgatgacattcaccagaagcaaaacctttaaaactgaaactggtgctaaaaactggtttaaacgaaacaccgaagaagacgattaa

SEQ ID NO: 378013 - DNA, 150 bp, Salmonella enterica
atgaataacagcgattacatggacagggcttatgaggagtatttcgaaagtcttgccgaaggtgaagaagttctgagctttgatgaattttcagaggcactttccacaccaaagttaaaaggttatacagatgaaaactatcgaccttaa

SEQ ID NO: 378014 - DNA, 297 bp, Salmonella enterica
atggcaatccatatcctcgatcggaagtctgaaccagtagaaattattgattcctgcattccacaagaaagcgcaatccaggcggccagggaaaaggtacgtgaagctgctatgctcggtattaccctaactgccgtaaacgaagatggcgaaaatgtttttgatgctgcctttgaaaccttcataaaattcattcctcacggtcaacgaattgcatcacgcatattggatcgcatggctcataatccggctgaatcacatatgcttcttagtggctctccgcaactgccggagtga

SEQ ID NO: 378015 - DNA, 246 bp, Salmonella enterica
atgaactttaaaaagtttttatttcgcaatagattaaaccgtcaaatatcgctcacacccagccttaaagcagatgaggaggagttcgctgaaatcatcaaaaacccggcaaaaatttcttcaaaaatggtcagaaaaattgtgcttaacggactcctccgccttgagaaagaaggcgcagatccgttttctaacgaatcagtgccttcgagccccacaaaaccaaagagtaaaaaaatttactaa

SEQ ID NO: 378016 - DNA, 654 bp, Salmonella enterica
atgagactgaagtatgccatcactattggcgatccgaaatcaccacagattgtagctcatccttctggttgttcgggagatgatcgccttaaccgtgatgatattgtcgcctccctcggcatcactcagtccagatgtcgggcggggttatcattgatatatgccaaatacacaaaagaccttcatgctgccgaactcgcgttacgcgatctgcaaaaatatgcttcgtcaatttcgtggaagtatttttcccgcattcctgatggcaacttccccattgctgtttcggtcatggcaatgctcgtactggaagagtactgccggactgcggacactcagggtgcaaagtgcctttgtggtgggcggggtgaaattcgtgacatcaagaaatccataaaatcgggaaaaccagtgatgaaaacatgctcacggtgtaaaggctcaggattgaagcccttttctcatggtcgttgccttcatgtgctcacattgtttgtcagtgtctcgcagtccagctattcgcgacactggagaccattttttaacgaacttatgacctggtgctatcgacaagaatcggctgcagaaggtatttacaaacgaatcacgaccccattttctttctctcaagaagaaagcggacatcccagttga

SEQ ID NO: 378017 - DNA, 231 bp, Salmonella enterica
atgaaaattgagtatcaggatgctggcatggaggccagactcattatcaccagcaccatttttagtgtgcgaaaactcaaccgactggtggatgaaatattgatgcgcattcctcagttgcgggaagaaagtgaaggatttttcatcaaaaacacttacatatatggagaaacggcttatgtactgtacgcagagataatcattcggcagcgcggggagaagctcaaataa

SEQ ID NO: 378018 - DNA, 906 bp, Salmonella enterica
atggaatctgtacttgatgcgctgaaagcgatggaaaaagccactgcgcgcgaaattgcggcaaggctggatattgaaccacgggacgcgctgaacctgctgaacgagcagcaggaaatcggcacggtaacatttctgaacggttactggtcgctgtctggcatcaagccagccacgacgaaaacggttaagcgcaaaacgtcgaagccgaaagtgccgaatgataccgccgctaaaatcggtgagccacaactgatggacgtcataagggagcatggtccacagaccgccgaagatcttgcgacgctgtttggtatcacatcccgtaaggttattgcgacactggccacagcaaccggaaaaggccgcctgagccgcatcaagcaggacggcaaatattgctacaccctgccagagtcagtttcagcgcatgaaccagagccgaccgtggagccagtagcggataccgacagcgccagtcctgacgtaattgtcaccgataaaaccgaaccatcgcaggaagtggtgaaaactgacgcgcaggaagcttctgacgagtctgccgatgctccagatatcgccagtgccggaaccgaatccatcagcgacaccccactggcagatacacaaccagcagcaccagcaccggatgtgatggaactcccctccccccgcgccgtggcgaaaaatctgcgtcggcacaaggcgcagctcgcacgcctgcaaaaagcgcatagtgcagtacaggccgtcagacgttacggacttcaggtcactccagcccccaaagaaatcgtgagggaaattcgcagactgaccgcgattgttgaggccggtacaaaactgggcggcgcggtgaacatggcgaaaaaatacctgacccggatcaatcgctatgaaaattga

SEQ ID NO: 378019 - DNA, 747 bp, Salmonella enterica
atgaaaaatatcgcgaacaacgtgattctggagcgttttcgtcgccttgcaccgccgggtgctgccgctgccgtgccgtaccgcaacaccgacgagtggcgtgcatggctgctgtccgaagagcgcaagcgcagcgaggaaatcgagcgccagaaccgccaggcgagggctgagaaaattttcgggcgctcggggattcgggacctgtaccgccggtgttcgttcgagaattaccgggtggtcaacgacggccagcgccacgcacggagccaggcgaaatccatcgcggaaagtttgtgcggtgatgattttaccagtttcgtgttcagcggctcgacagggaccgggaaaaatcaccttgcggcggctatcgggaaccggctactggcgcagggtaagaccgtgatgattgtcaccctggcagatgtgatgcttggtgtccggacctgctacgacaaggggaaatccgaagagacgttcctgtcgggactttgcgatgttgacctgctggtgctcgatgaagttggcgtgcagcgcgatacgaaaaacgagtttgtcatcctgaaccagattatcgacaggcgtactgcgtcgatgaaatcggtcgggatactcaccaacctgaattttgacgcactgaaggcgctggcgggtgagcgggtgacggaccgcctgcggatgaacggcgggcgctgggtaatttttggctgggaaagctggcggcaaaatgtgaaccaacacaaataa

SEQ ID NO: 378020 - DNA, 927 bp, Salmonella enterica
atggcagcacttccatacatgcagctttacatagccgattatctggcggacaccatgcacctgtccacagaggaacatggggcttatttgctgctgatgttcaattactggcagacaggaagagccataccgaaaaacagactggcaaaaattgcgcgggtcagcagcgagcgctggggagccgtagaagagtcattgagagaatttttcactgataacggcacggagtgggttcacaagcgcatagaagatgatcttgctttggtcagggaaactttagcgaaaaggtctgcggcaggaaaagcatctgttcagtccagaaggaacaggaaggaaacacaatctgccagcgaaagtaacacatgttcaacaggtgttgattctgtgtttgaacaagagtccaacacaaaaccaactaataaagatacagataaaaatacagataaaaataaagatctaaaagatcaaaacctcttgcgcggtgctgaaaaaatcagccccgcgccgccggaagaaaacctggagtcatgcggtttgaatttgcacgacggcaccagaccagcccatgccggacctgagcgtcggcctctgagcgctggtgtgcctgaaatgccccgtcccgatgaccctgagtttatccggctgccgctgaacgacggttctgagttctccgtgaccgaatcattggtttccgagtttgagatgctgtatccggcggtcaatgtccggcaggcgctgcgtaaccaacggggatggctactgagcgcccagcgacgtcggaaaaccgcacgtggcatcagaaaatttatcaccggctggctggcgaaagaccaggatcggggaggcaaccgcgggcgcgacagtccggcacgaatccaggaactatcaccgccggacaacaccattccaccgggtttcaaggggtaa

SEQ ID NO: 378021 - DNA, 462 bp, Salmonella enterica
atgaacttagaatctgtctactatcggatcaaagaatgccttattgacgcttaccaactagaccatctaggcgacagggatgatcaggttgttatggttaaatgccgggcgacagaactgaccaggctctacctcttaatctcagtaacaacagaaaattcttacctcaacctgagcaataaggactcgttgttcgtgcttatttatgacgcgagcaatcaaatcgtaactaaccctctttcgcttccacctgctctggttctgcgtgttctgcatgaccgcctttacgctcccgaactggaagtctgtgagaaattttctggaatagaggaaacaatgaagaaatggttcgttggctatctcgaacggaagcaagcaaaacctggagagtatccagttcttcctgaattgcgctggagtgatctgccgaatgaattatttggtctgatgtcagatagctaa

SEQ ID NO: 378022 - DNA, 258 bp, Salmonella enterica
atgaacgaaaaacacaccggaactgacacgatggctgaggccacatcctggcacgaagcgggaaaggacaccacaacgtctgatgaattgttaaaaagaagaatttacatggagtttcagggttttgttcttcccatgattggcgaactgattaacaggctggtactggaaggtaaatctgaggatgaggttgtggcggcagtaaaaaccgccgccaaaggatactcaacgtttcaccttgcgtttgttcgcaactga

SEQ ID NO: 378023 - DNA, 351 bp, Salmonella enterica
atgatcacccctgaaatcgtggaaatgtgggcgcggcgaatcacccaggaagaggccacacgtcttatcacgaacgaatggtttaaccagcctgatcgcccttcccttgcccttcatcagatagaacatgctgacggcagcatcgactacgccgcatggagcagaaaccgcatcaatctgttcacccgctggctcacctgccgcacggatgagcatcgcaagaaatttaacctgctgctaccggctatcaccagggctatcagggataacgactttgacctgtattccagtatcaccgcttccggcagcgttgagtatctgctttcgcgcgttttaaaaaagcggatgtag

SEQ ID NO: 378024 - DNA, 264 bp, Salmonella enterica
atgcgtttaaaagactatatttcctcaatggatcgcggtgaattatgcagtatggcgctaaaaatgggcattacatcctcgtttctgtctcagatggcatcggggtataccagaatacccgcctcccgagcactatctatcgagataatcaccaacggtaaagtcacacgaaaggaaatgcttcctgattcctggcgaaaattctggcttgaggacgaacttgagtatacagccagaaaatacagggaggttgaacaacgatga

SEQ ID NO: 378025 - DNA, 351 bp, Salmonella enterica
atggaaataaaagaaatcagacgtagacgcttgaaggagtggtttgccgatggcaaatatcccgagaaagattcaagctacatatctcaggtcatcaatggtaaagccattggagagaaggctgcgcgtagactggagcgtgattatgagatgccggaaatgtttctggatatgccttatgatgtccaggaaagcaaaactgtagagctaacggacaggcagcgtaagattgtagatttgctggactccctgccagatgatgaagttgatgagtttatcgttaagcttcaggagcgtaaggctttttatgatcgtcgtttacgagcttatctggctaaaaatatgccttga

SEQ ID NO: 378026 - DNA, 438 bp, Salmonella enterica
gtgggtattaaattttatctgcgcgacgacagaatacgtcgcaatctgattgagtatctcaataaacaaccgctaagtgttgatttccccctggtagtgtcattctccgatcctcgccgtacacttcctcagaatgctctgtttcatgctttgtgcggcgaccttgtgcgtaatgatgtgcagtgggcggattccacctggtcaatatcttcctggaaagcgattctggtatccggtcacgcaatagcaaccggaggggaagggaaagttatttccggtattgaaggggaactggtggctattcgcgaaagtaccgctgcgatggggataaaaagaatgaatagtctgattgaatacagtcaggcgtttgccgttgaacagggagtgcaactacgggaggtacgttacagcggggattatttcggacgactggtatga

SEQ ID NO: 378027 - DNA, 195 bp, Salmonella enterica
atgagagaaacctggttcagatacccggactgtactattgaggaagctgaagaactaatgaggcaatatcatcgccgtggcgtatcggtggaaaagagcctgaatcatgattttattacatggacggtaagtgctcttttgcctgaataccggaacaaaccgaagcaaaaggaacaatgctggtatctgagatga

SEQ ID NO: 378028 - DNA, 297 bp, Salmonella enterica
atgaaaagcatttaccgcaataaaaaatggctggctgccgtcgggcaaatagagcaatgcgtgttgtgtggcaggtggggaacgcaggttgctcaccgcaacgaatcaaaaggcatgggacttaaaaccgatgactgcgccactgccgcgctttgcctggaatgtcatcacgaaatcgataacggaagccatctgagcagggaagaacgccgtcagttgatgaataaagctatcgttttgacagtagttgagcttgctcgtcgaggactgataattccggcaatgattaaagcatga

SEQ ID NO: 378029 - DNA, 348 bp, Salmonella enterica
atgaaggatgattaccacctgccagtaataacccgcctcgaacgtgaagcccggcgtctgtgtatcaaaaaagcaaagctggctatggtgctggggttaaatgaacgccagtacaattatatcagcgatggctgggaggtactgagcatgaatcttctgacgccgtatgtttacaatctgtttacctcgatgagaatagatctgttttatgtgctaacgggcgtaagtggtgaaggactatgcgctgattgtcgaaaggcatttattcaacgatggctgaatgatctgccacctgatgaacgtttccgaatgcagttttttgcatcccgaatccagttcaatatgtga

SEQ ID NO: 378030 - DNA, 399 bp, Salmonella enterica
atgtcagcagaaacaccaaagagcgactgggatttaaacccaacaaagcggctcctcaaagagaagaagcgccttggaatcagcgatggtcagatggctaagattctggggcttcacatatatttctactatctcatcgctgatgaaaaacctgattttaaagtttacgaaatgtccggtgacgttcaggcggcgcttgataacgcaggctttgatctcttttatgtgctgaccggggagtaccgcagcgaaaactatgagcgcatgctggaagcgtttgattatgccattcaggaattaccacttgatgagcaagataatattcgcgtactggttgagcctgtatatgaaaaactcatgaaagccgccagtacaggtaaagaccccgttcaacattaa

SEQ ID NO: 378031 - DNA, 279 bp, Salmonella enterica
atgagaatgcacaaccccgcacatcccggcgctgttcttcgtgaatacctgggggatgtttctgttaccgatgcagcaaaagcgctcaatgttacgcgtgccgcgctttcccgtattttaaacggaagtgcgggtatttctgctgatatggcactgcgtctcgaagcagctcttggaaccagcgctgaaatgtggactgacatgcagtctcagtacgaactttgggttgcatcacagggtagcaggccggaagttaaacctattttgtctcacgcctga

SEQ ID NO: 378032 - DNA, 282 bp, Salmonella enterica
atgatcaaaagctttcgccacaagggacttgagagattttttaaaaccggctcaacttccggcatacaggcgaagcacgcagttaaacttcagatccagcttaccgccctgaacgttgcaaaaaagcctgatgatatggccgcttccggctgggagttacacccactcagaggaaatcgtctgaaaggacattgggctgtatccgttaacggtaactggcgactgacgtttcgctttgatggcgaagatgcgatccttgttgactatctggactaccactaa

SEQ ID NO: 378033 - DNA, 168 bp, Salmonella enterica
atgaaggatgctttgctggcgcttggttttgttacgccaataatttgtgtggcgcttgccggacttatggcatggaaagataaaaacggttggggatggtttttgtttgctgctgtagtgatcgctggcggcatgagtaccaatgtaagggcggcaggattctggtag

SEQ ID NO: 378034 - DNA, 936 bp, Salmonella enterica
atgaaactgagcgttggcgatataaaattttccgaatcttacgcatccgcgaacgttgaagttgagaccggaacatacccctttctccttctttcaatgtgtacgatgcatgtttccgttccgctggtggaaggtaaggccctggaacagtacaaagaagaactactggcgcgagcacgcgaacaaatcaccagaatgtatgaagagatcgtgtgcggtgggagtcaggtgcttaaaccctttaagatagaagttacctcatcccccagagacaatctggaagagcgcgttgcgctactggaaaaacgcctcagcgggaaaagaagtgtgcacgctgatggaaaggtcgttgatttctacagacctgacgggactcttggagtgagaattggggatctgaaccaacaggaaaagcaccctgaaaaggatgggttactgagtgagatttacgctgccggtaaaagagacgctgaagatttactgggaatgtctggggaagaaaatatttgggggttgggattcaggattgaagatcgagagggggtgctggtggtatgcgataaaaatggtgagagcgaaccaaccagcgagcatcgtgacaaaataatagaaagaaccatcgcggtgttgaggggcggtaacctgaacatgttaaagcgtatagggcttagcatggggcttcttcaggtggcagcgaatattgaggctgtgaaccagctttgcggttcagcgcgtcgtgagcatgtgctgaaggattttgataatccgccctttaagaaagtaccggacgactggatctcgcctggtgttgaatatcttaaaacgcgcctcggtgagggggcgcgcgaggatgaactgattatttcatctatttatggtatagccagaaaagcagtgaaagacgttatcaattcccagaagtgcagaggtcgatag

SEQ ID NO: 378035 - DNA, 261 bp, Salmonella enterica
atgatcaccgatgctgaaaataacgccgcgaaaattaccgccttaataaacgccgtcgcgattttattttctcaattacccgaagaaaaaaaagaaaatgccttattcttacttcgtggtctgtctgattgtgattacaaaacaatcgctccagaaaaaccagaatcagcaattgaagatgttaccagtatagaacaagccctgattcagggttacaaactgatattagagtctatcgacctctgcacttctgggaattga

SEQ ID NO: 378036 - DNA, 252 bp, Salmonella enterica
atgtacaaaatcaaggtgacatacatattgccggaaggcgatttagttcgtgttgcggtatgcgctgtgaaagaggacggtagtcagattttccagatggaaatccagtcaccgtacgaaaagggcaagtccctggacgcctacgagcaggccgcgattgagcagtacacctctactgtcagtgatatcgccgcttctgcgcaatcagcaccggctgagccggaagtcgcggaagccagcgccaaaaaataa

SEQ ID NO: 378037 - DNA, 291 bp, Salmonella enterica
atgctggagaaacacacaacgtggctggcctatctgtgggcggtgatatgcggtgctcttgctcagtggacagtacacgactacggggcgctgattggcatcgttctcggtattggtacgttctgggttaaccgccattacaaaaagaagctggagcagacgcaggcaagacaggcggcagcactggaaaagcgtaaccagatacttgaacagatgaccagaaagccggacagcgcgaccactgccctgatagtggaatctgagaggctggataatgcagataaaagttaa

SEQ ID NO: 378038 - DNA, 489 bp, Salmonella enterica
atgcagataaaagttaaaagccttatagctggtggcgcgggcgcaatagcgatagcggcggcgttaattactggaccgaatggtaacgatggcctggaaggtgtgcgttatcagccttatcaggatgtggtcggcgtctggacggtgtgttacggacacacgggtaaagacatcatacttggaaagacctacaccaaagcagagtgtcagacgctactggataaagacctggcactggtcgcagcccgcattgatccactgattaaggtcagtatccccgaaagcgaaagggcggcgttctactcctttgcatacaacgttggtactggtgcatttgccaaatccaccctgctgaaaaaactcaacgctggtgatcaggccggagcctgtaacgagcttaaacgttggacgtatgcaggcggcaagcagtggaaaggactggtaacgcgtcgcgagattgagcgcgaggtgtgtacgtggcagcaatga

SEQ ID NO: 378039 - DNA, 513 bp, Salmonella enterica
atgaaatatccaaccgtagcagtaaacgggttatccgttcgtgttgatgaagaaggacgttacagccttaacgatcttcatgcagcagcagtagccaatggcgaagcaacggaatcacagcgacccagtaacttcacaaaaagtaaatcaatcaaggcgttcgttcgagaattgaccgccgctacgaaaatagcggcgcttaaaaccatcaatggtgggtctaatcatggcgtctggggacttgaacttgtcgctatcaggtatgcggcatggctcagcgcgaagtttgagattaaggtctaccagacattccagatggttatgagaaacggaattgatgccatgtcccggctgaacaaactggatcacaccattaacactgaagtgaaagagataagccatcatgccagtaaattagctaaatggggttcaggtggacgcaagcaattgctgtatgccgccagagcgaaattagtaagcgaagtgcagatgtatctgccgggtattgagtaa

SEQ ID NO: 378040 - DNA, 465 bp, Salmonella enterica
atgaaccgcgtagctactggcgcgattgttgtgctgttgattgtggtagcagcgctggcgtggactaccgaccactaccacggtaacgccgtgaaatataaatcgcagcgcgacactgctactcacaacctgaagctggcgaacgagatgattgacgatatgcagatacgccagcgtgatgttgccgccctcgatgccagatatacaaaggaattagctgatgcgaaagctgaaaatgatgctttgcagcgccgtcttgatgctggtggtcgggtgcgcgtcaaaggacgctgtacagtgccctattcgaccacaaccaccagatccggcagcgtgggcgatgctgcctccgtcgaactctcttctgttgctggacgaaacgttctcgatatcagagccggaattatcagcgaccaggcaaaactgaggtatctacagcagtacgtcagggaacaatgccgataa

SEQ ID NO: 378041 - DNA, 369 bp, Salmonella enterica
atgaaaacatcctgcttttcgctgtataaaggcgatggtcgaatcagcatcgccagatatgctccacgcaacacgcccgccggttatcgtatttataacaaactggctccgggttcctggtttaattctgtttcagaagcaaaatataacgagttattcagaaatgaaattctcgctcctctcgatccacgacgaacgtgggatgaacttcacgccatgacgggaggttatgaacctgttttgttgtgctgggagaagcctggagagttctgtcaccgccatctggtggcttcctggttcgaacaggaacttggcgttaccgtatctgaatacgatccaaaggcaacaccgcaacaggcgcttttctga

SEQ ID NO: 378042 - DNA, 234 bp, Salmonella enterica
atgacttatcaatatattgaactggtagttaaaacctctacagcaaaatcaaacatcaacgcagcaattaatattttaaaagaacttaatttaaatccggcaaaaatgagaaaaatgaaacttgattatctgcaaacaaccgtatttttcctcaatcaggaaggcgaaaaaatcgggttcattcagggtaacgtaaacgacgaaaaacctgcactgttaaccctgtactgctga

SEQ ID NO: 378043 - DNA, 1278 bp, Salmonella enterica
atgtttgtcgggtcattacctaaaaaattaatcacacagatgttgattaatatacagcttaaaccggatgtatatatcggttgctcaggctcattcagaattgagcacgccattaaaaatatgatgccggagagaaaagtatacggtaatgatgtctcattgctctcgtgcgcggtcggcaatttgctcacagggcaacggctggacgtggaatttaccgggaggctggagccactcaatcaacttcgcggtgatgtagtggcaaacacatctgcaatatgccttgctgtaatgctgtcccggttcaaaggcaataaccagtacagccaggcacactttgctcacattctgcgtaatctggccgattatcacagcgctgagagagaaaaactgctgcgttacaccgatggttttggtcttgatggcttccatgccggggatttccatcatcagcttgatgcagcgagagaaaatggtggcacccttatcatgttcgcaccaacctataagggcggatatgaaaacctgtacaaattcgtaaacgagaacacgaaatgggattcaccctcctacggagtatgggaccctgagaatattggcgatctggtccttgaactacaggacaacaatcagaattttgcgatcatcaccgatcgccggctggaaagcaccgaaccgcggatgatgtttgccggaggcaataagccggttttcctgtacgctaacgatgcccggtcatcattacgccgtgaaaacaaaaaatcgcagccattccggtataaagtgattgatcccgatgcagtgaaagccgacagccggattgaaatcagcccgctaacctctcagcagctaaattttctgaaggatgtctatctggccaaaggtattaaccataaaaacgggatgattaatttcggcgtgtttatcgacggaatgctggctggcgctttcattttttccctgtctcagtacggggacaaaatacacagcatctacatgttgagcgacttctcaacgaccaggcagcggcggatctccaaactcattcccatgctggcaaccagtcgtgacgttattaacttcgttaaccgtaaatacatgatcgacatccgatcggtaagtaccactgcattcacccgcaatcccgtttcaatgaagtaccgggggatctatgaactggtcaaacgcggagagggatttctgaattatgagtctgcggtaagagaacagacaccgcaggaaatttatctcacctggtacagaaaatatgccacttga

SEQ ID NO: 378044 - DNA, 684 bp, Salmonella enterica
atgccacttgatactgaaattatcaccgtcgaaccgaaaagtctcaggctgctggaaaaaaacgcccattacatggagcctgccgaatttgaaagactggtggaaaacatcagaaaagatggcgttctgaccagtacgccggttgtgtatcagggaacggtgctttccggcaatcacagggtgcaggcgtcaattaaggccggactggaagtcattcaggtcattaatatccggtcagaactgacagaagatcagcaaaaagccattcagttaagccataacgccataaacggaaaagacgataacaacctgcttcaggagttattcgactctatcgacagtctggatatgaagctctattccggactgaccgatgatgatttcaaaattaccgatattgaggtgcagacgctttcatttgttcagccatcctgggaagacatggtgattgcgttcctgccggaagaaaaagccctgtttattgaggcgctggaaaaaatagggaaaaaggccaaagaccggctgattgttgctggccgtatcagtgattttgaccaggtgtttaatgccgtcatcaatgccaaaagcaaactgaacattatcaataccgccgaagcgctgaaaacgatggcggagcttgcgttacagaaacttgaggaaacagaagatgaaccagaagcctga

SEQ ID NO: 378045 - DNA, 255 bp, Salmonella enterica
atgaaccagaagcctgagatggatttagcgaaagcggaagcgctgggggccatgcaaatgaaatcacagcagattgcctgcgctatggatatagatctgaacaaactacgggaagataaagaacaatacgacaccttcacggcggcagtaagtaagggcagggcaaagggagaggcggagataagaagcctgctttttaaacgcgcaagggaaggtgacagcgtcgccattcgtgagttactcaattacaggtaa

SEQ ID NO: 378046 - DNA, 990 bp, Salmonella enterica
atgagcagaccggacgagatctcactgaaaagtgattactgcgccggggtgctttcaatccagaaggttgcagtaaagcacaatatcgccaaatccacactgatagatatggcgaaaaaaaatcagtgggtgcgggaaaaaaatccgaccaaaaaatccgaccaaaatgaaaatggtcggacggacggtcgggaaaaaaaataccttaaaaattcagatgaaaaaaatccaggaaattttccatctgataaccgatatagcgatagcgactatacgttcaacccagatgatttcggtatttcagaacagcagggcgttttcgctgaatatgtggcagcaggtaaaagcctggctgaagcctaccgtcttgctggctatcagggagaggggaatacaatctatgtcaacgccagccggttactaagaaatgctaaggtttatcgtgccattcgctggctgcgtgacaagcgccagcgtcggcttgctctcaccgaagacgaaatcattcaccagctttccgctattgccagtgccgatcccaatgaaatttctcacattcgccgcgtaaactgccgttattgttggggaaaaaaccatcaatatcagtggcgtgatatggatgagtaccacgctgcgcgcgagaagacacttgatggcgagatgcctgaatatggcgggatcggcttttttgattctgctgtccctaatcctgaatgtccacgctgtgggggagagggcgtacccgatatctatttcgccgacaccaccatgattgatggccctgccaggtggttgattgccggtgtcagacagaccatgaacggacttgaggtgaagattgccagccaggaagctgcccgccgggaactgttgcgcattctggaacgacaccttgccagtaaaccggaagaaccacagataccgggagacgattaccggttacaggagctgactcctgatgaagctgtacccccaaagcccgtcctctga

SEQ ID NO: 378047 - DNA, 1326 bp, Salmonella enterica
atgaagctgtacccccaaagcccgtcctctgacgaggtggtcagacttaccccaaaacaggcaaatatttacgtctggggctggcagccagaagcccgtttccgtgatgccgtatgcgggcgacgttttggtaaaacatatctgggaaaggcggaaattcgccgggcggcacgtctggcgcaaaaatggcacgtcagtatcgaggatgagatctggtactgtgcgcctactcaaaaacaggcaaaacgtgttttctggcggcgtctcaaacaggccattcctcctgcatggcgtgccggtaagccaaatgagaccgaactttccatcacgttgaaaagcggtcatatcatccggtgtgtcggtcttaacaactatgatgatctgcgcggctccggactgttctttgttcttattgacgaatgggcggattgcccctgggctgcatgggaagaagtcattcgcccgatgctttccacctgtcgctatgttgttgacggtgtgggtcgggttggcggtcatgtgctacgcattggtacgcccaaagggtttaaccactgctatgacacctggctggatggccaggaaggacggcagccagatcacaaaagctggctgtatacgtcagttcagggcgggaatgttccacaggaagaaatagacgctgcccgccgcaaaatggacccgcgtacattccgccaggagtatgaggccagttttgaaaactaccagggtgttgtctattactgttttgatcgccgaaaaaaccatactgatattacggtacaacctggcgatgcgctgcatatcggaatggacttcaacgtcgggaaaatggcagcggtggtttacgtgctgcatgacggcctgccgtatgccgtggatgagtttatggatgtatttgataccccggccatgacgaaggcaatcaatgatcgttacggcgagggtgggcattccattaccatttatcccgatgccagcggtaaaaaccgacagaccagtaatggactaacgtcagatatcgcattgttggaacaggccgggtttgatgtttgcgtcaataacagcaaccccgcagtgagagatcgtattaatgccatgaacgctatgctctgcaataccgtcggtgagcggcgtttacgcgtgaataccaccacatgcccacgcttcacacagtgccaggagcgccagatctacaacgacaaaggcgagccggacaaaaaagccggttttgaccatgccaacgatgccggaacctaccccatagcttacctgtatccgattaacgcaccggcaggcgatctcaaaataggattcttatactga

SEQ ID NO: 378048 - DNA, 1404 bp, Salmonella enterica
atgagcgacagtaatattaactacagacatccggcatacagtgagttcttgccggaatggcagatggtcggcgactgtgtagacggggagcgggctgtcaaaaaacagcgcgaaaaatacctcccccatccgggggacgaaggtcagaacagcgaacaggatcgggagcgctataaggcttatctgaaacgggcgccgtttatcaatgctaccggaagaacattaaccggacttatcggtattgcattcaataaacccgtaaaaatccagctttccgggaagctcaccgccatagaatcggatgccgacggtgaagggcaaccgctcacgcagctaatccgtgatgcactgagccagaacctgcaacgggggcgggcaggaatactgtcagattacacttccggtggcactcagacggtggcgacggcggggcgtccggttatccggctgttcaccgcgaaacaaatcatcaactggcgcgtcacgaacaataaaacgtcactggttgttctgcactatcaggagccggtaaacgatccggattcgtttgaactgattatgcaggatttctggctggagctgcgtcttgttgatggttttgccatgtcaagaaaatggcaggaaagcgacgaaggcattcaggcgaacgaatgggtggatctgaaagatgcaggcggtaaacgtatggaagaactgccctgggcgtggattggcgctgtcaataacgatcacacgccggatgcaccgccgctggcagatatcgcgtacatcaatatcaaacactaccaggccgaggccgatattgctgaaatagcgcacacagtcgggcagccaactatcgcaatatcagaagtgtctcagcagtgggtggataaaaaccttaaaggtgtgaaggttggtgcaagaaacggcctgatgttgcctgtgggtggaaagatttcaatggtgcaggcagaagaccgcaatctgccgcttatcgttgcagaacggcgcgaaaaacagatggcaatgctgggcgctaaactggtggagcgtaatacctccgcaagaaccgcaacacaggccagcgatgaagcccagaccgataactctgtattgtcgttatgtgccgggaatgttgagcaggcagttaaccgggcgctgtctttcgctgtggcgttcgcagggagcggtgacgggcagattgaactgaacaagcgctacgagttgtcacaactggattctgcctcactgactgcaatgatggctatggttcagtccgggcagatgcggctgattgattttattcgctatcagcaaagtatcggccttatcgaccagcaggaaaagccggaacatattgaagatgaactgcgtaatgacggggttgacctgacgggtggcgatgatggcaacggtgaatga

SEQ ID NO: 378049 - DNA, 1116 bp, Salmonella enterica
atggcaacggtgaatgaacgtcttctggatgagtccatcgcccacgcgctgtatctgtcgcggtactcgacgggaaccgcaaaaaaaatggttaagttgctcaatgacagtgacaaagagctttctgctcggttgcttgtagccctggaagatgctgatgccgacagtttaacggttcagcgacttaataccctgttgcgggacgtacgtaaatttaacagccaggccgttgagcatgttttctccgcgctgggcaatgatttgcggaattatgcgtcgtacgaggcgcagtatcagtacgatttgctcagtcatctgctgccggacatcgtgacggagcgctatccactgacggaactgtctccgcaccaggtgtatgcggcggcgatggccagaccgtttcaggggcggttactcagcgagtgggccgacaatatcgccgatgaccgtatgacccgaatcaataatgccgtccggctggggtatctcaacggggataccacggaacaaattatccggaaaattcgcgggagtcgggccagacagtataaggacggcatcattgagtccgggcgacggaatgtcatggcggttgtgaaaacggcggtagggcatatagcggcggttgcgcgggatgattttgccagtgccaatgattctgtcatcaaaggaaaacgctgggtgtccaccctggatttacgcaccacgcctggctgtattatccgcgatggacgggaatacaccgtcgacaacaagccggtgggacaccatattccctggttgcaggggccggggcgtctgcatttttgctgtcgaagcgtgtacaccttcatcacaaaaacattccgcgagatggggattgatattgacgaaataccggaagctacccgcgccagtatggacgggccggttccggcgagcactacttatgttgagtggatacaacgccagtcgccggaacgtcagaaaaaggtgctgggagcaatacgggcaaagctgcttcgggatggtggcatgaaaccggatgaatttttcaccgacaggggtgaatggatgacgctggaagagctgaaggaaaccgactaccaggcgttcgctgatgcaggcgtcgcctga

SEQ ID NO: 378050 - DNA, 717 bp, Salmonella enterica
atgatgaaactgaaattcaggatcacaaaagaagagtttgacgcgttaacggaagaacaacaggcgctatacggagaatctggcgagggctatcagattgccattgacggaataccggatacatcagcactggatgggctgaagttgaaagtcgaagagctgctgtcggagaaaaaagccgagcagaagaaacgcgaagaggcggaggccgaagccgaaaaagagcgactggagaaactgaagaaatcaggtgacatcgagtcactcgaaaaatcctggcaggaaaaactggaaaaagccgaacaggacagcagggcgaaaattgatgcgctgaacacctccattcacaaaatgctggtcgataacgtggcgctggatttagccacctcactgtgtggtgaagcggctcctgtcattcttccacatctcaaaacgcgtctgaccgtggagaccgattctgacggcaacccggtaacgcgtgtggtggatagcgccgggaaactcagcgcggcgtcactggacgatctgaaaaaagagtttaccgagaacaaactgttctcagcactgattattgattcaaaagccagcggaaccgggggtgacggtggtgaaaagaaacctgacgccgggggcgaaaggcagaagaaaacaaccgtggcgggcgatccgatggtggatgctgcccgtgaaattattggtaacatgaataaggattaa

SEQ ID NO: 378051 - DNA, 978 bp, Salmonella enterica
atgagtttagttatttttgaaacccaggtctccacggcggcaacggagcttattaaccagaaggtgcaggagttcaacgccgcttccggtggttctctggtgctcggcaatggcgatcacatcggtgattacattgagagaacaagctggcaattgattggcgggctggcgcaacgacgtaacgcctacggttctggcacgctgacgccgcaggagctggggcaaatcctcgaccgcatggtgaaaatcgacggtcgcgtggggccaatcactgtgacgccgaccatgatgaaacgtctgggtaaggatgttgcggaagctgctgctgttgttgctgcacaggctgcaaccgccatgattcaggattacctgaatactgtgggttctgccctgaaaacagctatttccaccaacaaaaaggctgtgacggatctgtcgggcgcgaagaacagtccaacctcgccgtcgctgcgtgggctgaacaaaggcacccgtccttttggtgatgcttattcccgtctgattgcctgggtgatgactggcgcggcattcaatgatttcactgacgaatcgctgaataacgccgagcgccttttccagatcggcaacgttaccatcaagcaggacagcatggggcgtcgttttgtcatttctgacatcccggcactgatggatggcaatctccagcatattctcggactgacgctgggagccggggcagttcagaccgcgccgctgagcatgaaggcgcaggatgtgctggggcaggaaaaccttaaggcgttgatgcagggtgagtacgacttcactatcggtatcaaaggctaccagtgggcaacggacaagattaagtcaccgaccaatgatcagatttccgccgccgcaaactggagccagattgcaacggatgtgaaggacacggcgggcgttatcgtcacgtttggagaaatagccgcagcgtcatccgcttcagcataa

SEQ ID NO: 378052 - DNA, 489 bp, Salmonella enterica
ttgcttgtaaccgatctgacgtcagacagtgccgacagctatgccggggtgggcgatcttcgtcattatgccgggctgcggggctactcagtcccggaggatgacgcatcctgtgaaacacttcttattaaagcaatggactatcttgccggtatgtcctggtgtggagaaaagacagcgcgggggcagccgctggactggccgagacgtgacgtttgcgtggatggtgccatcctgcaggatgggttgttaccaaaacgggttgttgatgcacagtgtcgcctggcggtggaagcacagtcagttgatttacagcccacgctcaatggtgaagccgacattctcagtgagagcatcgcgggggccgttgcggtcacttacgatcctgattcggcgggaacaccaccatcatttccgtggcttgataccattttgcggggactggttgaaaatggcggcgggatcaattttgacgttatgcgggggtaa

SEQ ID NO: 378053 - DNA, 384 bp, Salmonella enterica
atgccgtatgactattcacggctgaaaaataggggcacggcactgataaaaaaatacggatattcgctgtcgctggtgcgtccggcgaaatccggtattgatccagcgacgggcgacaggttgtctgacgcagaacagcagatattcagcgtaaacggcattgatcagcaatacaagcagtctgatattgacgggacgctgatacagacaggcgataaaaaaatactgcttaccgctgaaactgcgccggagcagggagattatcttacagatggtctttcccgctggaacataatcaccatcacgccagtaaaaccggcaaacgatgttcttctgtactcactacaggtgaggctgggaggtcagaatggggttcgcggataa

SEQ ID NO: 378054 - DNA, 456 bp, Salmonella enterica
atggggttcgcggataaaattcaccagttttccgtcgacgtgcctgagaggctttccggtacagcaaaaaaagtcactatcgatttattttctggtgtgatccgggatacgccggttgataccgggcgcctgcgggggaactggcagtgtacaagaggggaaccagcatcaggcgaactcgatgtaactgataaatcggggcaggaaaccatcaacaaaatggttcagacggtggattctgcgaagggtgactttgtggcgtatctcaccaataaccttgcgtatgcggcggtggcggagtttggcctgtggaaggataaagacggcaagcctgctaacggaccaaagaccacacacggctactcaatacaggccccttccggtatggtcgggctgaatgtgtcacgtattaacatttatataaaacaggctatagcggagatgaaaaagccatga

SEQ ID NO: 378055 - DNA, 411 bp, Salmonella enterica
atgaaagacatctccactgcactgcgtacccgtatgcaggaggtcgcagcatcgcttaatcttccggtcgcctggccgctggaagacttcaccccgccggacagtgactggattgaatttatcttccgtccggcgtgtgatacgccgctgtcgcagggtccagggggactgaacactatcgcgggttttatcaggataaccgttcactgcaaacagcgtgagggcgtcagttcagacgcccttttttatggcgacagactgagagcctttttcaccacaggtacgacgctcacctgtaatggcactcgcgtcaccctgagaaatcgcgactacaacggcccgttacccgtcgcgggtcatgttgtctggatactgaccgtctactggtcatcttacgaattacggagttaa

SEQ ID NO: 378056 - DNA, 978 bp, Salmonella enterica
atgacagcaccgattgtggccagctcaaagcaggtcagctactactatgtgccggaaatgaccgaaggggaaaccccggcaaatcccgcctttattcgcatacccaaaaaaccaggagaattaaccctgaaacgggagacgttcacgtctgaacagcgacgcggagaccgccagacagcgacgctgggctatggcgcggaaagtgtcgatggtacgcttgaaaccgagtttgcctttgccgactttgacttttttcttcaggcggcattgtgtggtgactggcagaacgatgtactgaaggtcggacaggtgaaaaagccgttcacagttgagcgcgtacagaacgacctcaaaaaataccgtcgttttaccggttgcctggtgaactctttggatttgagcgttgctcctaatgccatcgttactgccagctttgctctgatgggggctactgcgacgtatggcgatgccgtactttcaggggccacttataaagagcccgacaataacgatccgttcgactcaacgggcgagaatgtggcgctgaaagcgcaactgaaaatcaacggcaagccaagcaacgtagtcacgtccattagccttaaacttgataacggcgtggctcaggcgcacgtcgttggtcagcgggcagttgcgacaaccgggctgggtaattcttccgtcactggttcgctggcgtttctgtatacaggcgatgatatttccgatttgtttatcaaccgcgaggacgtgtcgctggagttcacactcagcgggaaaggcggttcatacactttcctgttgccgcgaatcaaactgaccagtgagtctcccggcgagcaggatgtcttcaccatcattaactccgattttcaggcactgcttgacccggcaaccggaactaacctgcaaatcacccgtaaggccgatactccgtctcagaccgcacataatgacactccatcagcacaaggataa

SEQ ID NO: 378057 - DNA, 402 bp, Salmonella enterica
atgaaaatttctgattttgccacccgtcaacgtgccaaccagggcgaaaaaatgtttctgtcccagccggacggtactaaaacagaagaatacctgattgtgcgtggtgtggattctgacgcctacaaccaggcacgcagtgaagcaagtcgtcgggtgttctcgctgaaagaagatgacgatccgtctccggtcgtggaagaaaaccgcttcaatcttatgacgagtctcgttgccggatggtcgctggaggaagagttcagcgaagcgaacctccgcgatctgctgaaagaatgcccgcagattggggaccagattaaccagtttgcggcgaaccgcgcggagtttttcagaaaaaagccggagaaatcctcgactacggcagataccagaaaaagctga

SEQ ID NO: 378058 - DNA, 288 bp, Salmonella enterica
atgatgaagaaccctgtacaccctggcgaaatattgcgtgaagatgtaatagcagaacttggattatctgttactgagaccgcaacccgtcttggcatgtcccgcgctgcgttgtcgcgtgtacttaactgccatgcagctattagccccgatctggcgttaagactcgaaatggctggtgtgagcaccgctaaagcatggcttgccatgcaacttaactttgatctggctaaagcccgtaagcataaacagccccacataacgccattacagaccgctgcaatttga

SEQ ID NO: 378059 - DNA, 279 bp, Salmonella enterica
atgataataagtttcaggcataagggactggaattgttctataaaactgaaaacacaaaaggcattcaggcagaacatgcgccgaagttaaaacgtattttatccttgcttgaagtagcctcgtcccctgctgacgttaaagttccatcctttaagttgcaccaactcaaaggagacatgaaaggccactggtctgtgtgggtgaatggtaactggcgcgtaacatttcgattcacagatagcgatgtagagcttattgactacctcgattatcactaa

SEQ ID NO: 378060 - DNA, 291 bp, Salmonella enterica
atgactgaacaatttgcacaatgggatacagcggaatacctgaaaacggaagaggatatggctgagtatctgaacgcctgcatggaagaagccggagacgatcccgctttcatcgcaaaagcgctcggcaccattgcccgcgcccgtggaatgacacaagttgcccgtgatgcaggtgtatctcgtgagagtctgtatcgcgctctttctggtagcggtaatcctgagtttggcaccattctgaaagtcgttaaggcacttggtctgaaacttcactcaacggctgcgtga

SEQ ID NO: 378061 - DNA, 324 bp, Salmonella enterica
atgagctacaatttaatcatgaaagaaataatccgtagtgaaacattttctgactggttgttatctcttaaagactcacgagcaaaagcccgtgtgcttgcccgaatagatcgcatgaaaatgggtaattttggagattcagaacccattggtgatggactcagtgaagcacgaatccactacggaccaggatatcgggtttatttcatgcagcagggcgaggttgttgtcgttttgctctgtggcggtgataagaattcgcagtcaaaagatattaaaaaggcaaagcaaatcgctaaggcctggagagaggcaaaaaaatga

SEQ ID NO: 378062 - DNA, 3114 bp, Salmonella enterica
atggcagacgaaatcgccagccttgtgatcaaggttgaatcaggaggcatcaataaagccactgatgcactcaataatctggcaaaatcaggccagcttgctgaggatgccgccgggtcattgtcagatgcctggggcggtcttggtaaaagtgcgcagacagcaaccggctatcaggacagatacgtccagagtgttaaccgttatctgcgacaggagaaggaagcgcagaagcagacccggttaacgtcggaagagtggaacaagcagaatgacgcgcttcaggagttgctgggacagattaacccactgataggcgcattcgggcgactggatgaagcagaaaaaaagttacagggcttccacaagtccgggctgctggatgcggacgattttaaggactacaccgcgcagattaataaaatgcgcgttgacctggaggcggcagcacatgcccgtactgaacaggggcaggccgaagccagagcagcacgtgaagcggctgcggttgagaaagctgccacagttgccaaacagtcgtttatcgacaaactgaaaaccgaatccgaaacactgggactcactacgcaccagatgctggaatacaaagcggcgcagcttggggtgacaaaggaagcgcaaccgtatattgcaaaactgaaagccgcagaagccgctaccggctcgctggggctgaaatcagcaatggcccgtcgtgaactgggtgtgctgattggtgagctggctcgaggaaactttggtcagttgcgtggctcaggtatcacgctggctaaccgtgccggatggatagataagctgtttacgcttcgggggctgggtattgcgggcgtaattggcggaattggtgccgctgtctatgcgctgggtaaagcctggtacgaaggttctcaggaggcggtagagtttaacaaacaacttattctgacgggcggctatgccggaaaaaccgcagggcaattgcaggatatggcccgcgcattagccggtaatggcgtcacgcagcacgatgcggcgggcgtgctggcgcaggtagtggggagtggtgcattttctggtagtgatgtaaacatggtggcgcgtaccgcagccagaatgaaagaggttgtagggcagtcggtggatgaaaccgtccgccagtttaagcgcttgcaggatgatccggttaatgctgctaaagaactggataaaaccctgcactttctgaccgccacccagcttgagcaaatccgggttctgggcgagcagggcagaactgccgacgccgcgaaaatcgccatgtccgcttattcggaagaaatgaataagcggatgagcgatgctcacgacaatctgggctgggttgaaagggcatggaacagcctgggggacgcggcgaaatgggcgtgggaccgtatgctggacattggccgcgaagacacgctcgatgaaaaaatcgcgaaattacggaaaaaaattaaagacggcgggcagcagataggcaaagcgtttattcctgtaacccagcaggacagggatagacttgccgcgctagaggagaaggactttcaggaaaagctgaaggccgcgaaggataagggtgagcgtgattaccaggaaacgcagaagcgcaggaataaagaaaacaccgcgcttgatcatgataacgaaacggaggagatgcgtcataagaataagatcgcctggattaagtcacaggaatatgccgacgcctcaaagcgtaatggcgccctggagcgtgaaaacgaacgccataaaaaggcgatggaacgccagacgaaaaagccatcagcttaccacgacgatgaagccacacgcctgctaactcagtaccgcgaaaaacagtctaagttgcagggagaactggacaattcccgcctttacagcaaccagaaactcaccgagtccgaaaaagagcttctggcactggaaacgcgcattgccgggatgaagggaaaagcccttaccgcggcagataaaagcatccttgctcgccagaaggaactggaagcgattctggggattaatgcgggaatagagaaacaactccgtaatcaggaagcgttaaacaagttgcaggagaaaggcgttcaactggctcagcagcaccggcaacagcttgaacaactcagggctaaaggtgagtttgacgttgcctcaatgggaatggggagcaaggaacgccagcgggcgcaggaggagttcaacctcaaacagcagtttgccaatgagatgaaggaaatcgatcgcgttactcagcgtgatggcacttatggttcccaggaatattttgcactggcagccgaaaatgctgcttctcttaacgagcaactggttcagatgaagcagaactacgagaatattgatgcggcacaaggggactgggtaaacggcttttcagcagcataccaggatttcatggctcagggggccgatgttgcgggaatgacaaagcaggtattcagtaacgcctttaatggtatgactgacgcgctgacgcagtttgcactgacaggcaaaatgaatttcaaaagctttgctgtttcggtgctggctgacctggcaaaaatggaagctcgtatagccacctcaaaagcgttaggtatgctgatgaactggggaatgagtgcgctgggtattggcgcggcgggcgcagcaggaggcagtacaccttcgggggcgtatgaatcagccgcagccggtcttcaatttgctaaaggtggtgctgtttcatcgccagacctcagcatgtacagcggccagatcctgactcagccgacattcttcaaatttgcccgtggcggtggcgttgccggagaagcgggacctgaagcgattcttccgctggcgcgtgacagtcgcggctacatgggcgtgcgtcttgctgataaaggcggaaagcagcaacttcccccgattcagatcacagtgacgcagcatattgaccagcgcggaacggaccagaatgaccaggcggccgcgcagcgtaataaccagcaactggcaaaaatgttgagtgatatggttgaaacgaagattaatagcactatcgataacgaaatgcgaccaggtggaaaactggcaatggtgcgctga

SEQ ID NO: 378063 - DNA, 852 bp, Salmonella enterica
atgagtaaccccatttcagtaaagtccctcaaagttgtcacttattataatgagccagttctcactactgaacttgtagcaatgctcatgggtgaagaacccacgtacatccgtcagatcttcggcagatatcgcgcccacttcattgaaggtgagcactatttttacgtgacgggagaagaacgccgaaaaatcaaaaaaaccatgattcgtggcaatatgacgtcaactactcatggaggtaaactcatattacttaatgaacgcggtattacaaaacttctccggctgttcaataccgatgaagcagacatgttacttgaagatctggaaaataactatttcaacgttcccgtaaaaaacaacgccactacaaaatccagaccgaaccttagcacatcaaaacagacaacgcccctccgccagctcgttgagcgcttaatcaccacagaccttggcaaagcttatcctggcatatggaagcttgttcatcagcgtttcggggttgatcagatccagcaacttagtcctgagcaaataactgaagccattgaatacctcaaaggtctggaaatcgaacacaggaaaattgccagtgaagccagaagtcagaaaaccaacacgggaaaaaaccaccttccctattttggcgaactgaaacgcggcgatcgcctgcttattgaagtagatagctcaggtaacatttcgcagaaaaagctggatgatgaggtaatcgttggcacaattgacacatttttatggttacaggatcgcgctggtttcatggcaatacgcaaagatgctattcctgctaaacacggggttgcagcaaaaataagcgcccgttcgtaa

SEQ ID NO: 378064 - DNA, 525 bp, Salmonella enterica
atgaagaagattgcagcggcggttctggttggactggcattgggtagcgttggtgtggtgaatgctgagtcccggaatactgtttcaatagggtatgcctacactgatttaagtggctacatttctggtaacgcaaatggtgccaacctcaaatataactgggaagatttggatagtgggtttggggtgatggggtcggtcacatacactaccgctgacattgaaaatggttacggaaacaaagtgggagatggatattatacgtcaaccctcgttggcccctcttatcgtttcaatgattatatcaatgcttacgtgatgattggtgtcgggaatggacggctcaacgattacctcggtaattcttacgataaaaccagctttgcttatggtgccggtattcaggttaatccggttgaacatatcgctgttaacgcttcctatgaacatgcgagcttctccactgatgctgacggtaacatcaacgccggaacttgggtgcttggtgtaggttacagcttctga

SEQ ID NO: 378065 - DNA, 567 bp, Salmonella enterica
atgaagaaaatagctgcattatgtattgctatttcttttttaactggttgtgctgttaatttgccgtttaataacaggctttcatatagcgcaataaaggaattacgacaaagcattcacccgacaggagctaaaataaacatttcatgggaaccttccggtttccctgagcgtattgatgttcatggctcaagtgggtttgttggtggtggttcaagaacgcggatacctacaggaatcgcattatcagcaaggatagaagaagcaatatcatcttacgcagatatcgcacctgatgggaaaaatctgatcattaaggttgatgatgctcaaagcaaatttgagttcgcttctggcctcgttaacgtaacgcctactatagatgttgcagatgctacatttaaggccacattcaatcttgatggtgatgtctggacaaaagagtacaaatcaaagttgaaagatccgactatcgggggaaccagcgaaaccggattacttgaaaaagcatgggataatatagccgttcaggtagctacggatgtggcacatcatctcaggcaataa

SEQ ID NO: 378066 - DNA, 360 bp, Salmonella enterica
atgcagattaaacctatccgaaccgagcaggattatcagtccgcgcttcgtatcgtctctccgatgtttgataatgagcctgaaatgaacacccctgaaggcgatttttttgaagtaatgtgcctgctgattgaggaatacgagaaaaaacactatcccatagatcctcccgatcctgttgaagcaattaaattccgaatggaacagcaaggactgagcgttaaagatcttgaatccgccataggaaaaacaaaccgcgtctatgagattcttaacggaaacagaaaattaacgctcccaatgattcgtaaccttcataatcagtttggcataccattagaaagtctgattggtgtatga

SEQ ID NO: 378067 - DNA, 378 bp, Salmonella enterica
atgttctcattgattttaacctgtaataatgtaacactattgacactagtcccattatgggactacaataacaatatgaaaattgtctccgttaaaacattaaaagatttctggaccaaacaccctgcttctgagcagccactaaaagcatgggcagatgaagccagtaaagcagactggaaaacaccgtctgatattaaaaagatgtatcgcagtgccagtattcttaaaaacaggagagtggtattcaacatcaaagggaatgattatcgccttatcgtttccatttcatatcaacgtggctggctgttcgttaaatttatcgggactcataaagagtatgacaaagttgatgccgaaaccgtagaattggagtga

SEQ ID NO: 378068 - DNA, 297 bp, Salmonella enterica
atgcaggtgaaggtcgctccacgcgtcaaagtcgtcaaatttggtgatggctacgaacagcgagcaccggatggactgaatactgatctgagaacatacactgttaagttcagcgcggaatcagcagatattaatctgatagacaagtttctcactgaacatgccgggtatcaggcgtttgtgtgggtgccaccagatcgctataaaacgggaaggtataagtgcgaggagtggagtaaggaagttagcggcctgtgggacacactgacggcgacgtttgaacaggtggtggtctga

SEQ ID NO: 378069 - DNA, 1137 bp, Salmonella enterica
atgaaaaaattagcagtggcattatcagcagttgcagcagctattcttgtgtccggaatggctaatgcggctgaaatctacaataaagatggtaacaagctggatctatacggaaaagtagacgcaaggcatcagttcagtaaacacaagtctgatgacggggataaaacctatgttcgtttcggattcagaggtgaaacccaaattaacgatcaactgacggggtttggtcagtgggaatacaatattcagggaaataactccgaaggttccgatgctcaaaaggggaatgcaacccgtctggcgttcgcgggactgaaatttgacggtgcaggttcgcttgactatgggcgaaactatggcgttgtttatgacattgagtcatggactgatatgttgcctgtatttggtggtgacacttacagtaacagcgataatttcatgaccggtcgcgccaacaatcttctgacttatcgtaataaagatttctttggtctggtcgatggactgaatttcgcgctgcaatatcagggtaaaaacggcggcgcgggcgaaagtaataatggccgggatgttaaaaaacagaacggtgatggctttggtatgtctgcatcgtgggaaagtgattccggttttggtgtaggcgctgcatacagtaattctaaccgaaccaaagagcaacgcaatcacgagtacagttctgacggtaaacgtgctgaggcctggactgcgggacttaaatacgatgccaacaacatttatctggcagcaatgtttgcccagacccgtaatatgacatgggttgatattggtaaggacagccagatcggtaaggagattggtctggcgaaggattccggcgcattcacagataaaacagataactgggaaattgttgcgcagtatcagtttgatttcggccttcgtccttctgttgcttatcttcaatctaaagcccgtaacacaggatttggggatgtggacctcgtgaaatacgttgatgttggcgcaacatattccttcaataaaaacatggcggcctatgttgactataaaatcaacctgttgaaagacaacaacccacttggtttagctaccgacaatattgttggtacaggtctggtgtatcagttctga

SEQ ID NO: 378070 - DNA, 552 bp, Salmonella enterica
atgcaggacattcctcaaagtacccttaatgaaacaaccaaaacagaacaacccgccagggttgttttgtgggaatttgatttaaccctgatcggcggcgagcgttattttttctgcaatgaagctaacgagaaaggcgagccggtaacgtggcagggcaggcaataccagccttatccggtaaaaggcgatggttttgaaatgaagggtaaaggggccagcaaccgtccctcaatcgaagtttcaaacctgtttggcctggtaacgggcattgcagaagacttaaacagcctggtgggatctcgtgtttatcgtcgccaggtgtattcaaaatttcttgatgcggtaaactttaccgctggtaatccgaacgccgatccggagcaggaaattgtgatgttttatatagttgagcaactgagcgccctgaatgccaaaggagcaaagtttacgcttgcctctccggttgaggcagatggtgctgttatacccgcaagaaccatgctggcaacgccagacggcttcccgtcaattggtaaactttcccggtaa

SEQ ID NO: 378071 - DNA, 738 bp, Salmonella enterica
atgattaacgatgagattctggcgcatgcccgacagtgtgcgcctgcggagtcgtgcggctatgtggtcagaacgccgcagggcgaacggtattttccgtgtgaaaatctgtctgctgaacccacaatgtattttcgcatttcaccggaagattacctgctggccatcgctgcgggtgaggtggtggcgctggtacacagtcacccaggagggttgccgttcctcagcagcggcgaccgcacactacagctacagacggcgctgccgtggtggctggtctgcgatgagcggatttataaattccgatgtgtgccgcacctgacaggccgccagtttgagcatggcgtatacgattgttacacattgttccgcgatgcgtatcatctggcggggattgaattacctgatttccatcgcgaggacgactggtgggataagggcaaaaacctctatctggataacctggaggcaaacggtttttatcaggttcgcgcggataaagcgcagccgggcgacgtgcttatctgttgttttggcacatcgaccgccaatcacgcagcgatttattgtggcaacggggagctattgcaccacgtaccggaacaactgagtaaacgcgagaggtataacgaaaaatgggaaagacggacgcactcaatctggagatgcagcgcatggcaaccctctgcctttacggggatttgcaacgatttggaaagcgcttcgatctcagcataa

SEQ ID NO: 378072 - DNA, 612 bp, Salmonella enterica
ttgtacctccagataccgggactcaggcagaagatacaggaagggtggtatcaggtcaggattgccggtaaggatgttacgccggatgacgtcacggccaggctgcacgaaccgttaccatcaggcgccgttattcacattgtgccgcgcatggaaggtgcaaaaaacggcgggatgtttcagtttgtcgccggggctgttcttgctgttgttggttatgcgctgggatggacgggaattggagccgtggttggttcaatcggcgtttcaatgatggttggcggtatagctcagatgctgacaccaacccccaaaagccccacgtcaagccatgccgacaatggcaaagccagcgtttacttttcttctgttgataacatgattgcccagggtaatccggttccgatcccctatggtgaaattatgtgcggctcccgcgttatcagtcaggaaataacaacccgtgacgaaagtacgccggacaaggttataaatctcgggggaatgccgttcctcagtcgcaaggcgagagaacgtgcgcaggataagctggaacagcaacttatcgatcaggggctacccattacaaagccaagagtgctgatccgataa

SEQ ID NO: 378073 - DNA, 3219 bp, Salmonella enterica
atgtcaaaaggcgacaaaaaacagcataccccccgcgaagagcccgataatctgaaatcggtgcaggaattgagcgtcatcgatgttatcggggaaggcccgatacagggacctgttaacggtctgcaaagcctgcttcttaacgatacgccggtggttgatgcgcagggcggcgttaacgttcacggcgtcgaagcgcaatttcgttcaggggaagatcatcagtcgccactggagggttttgacggctccgccgctgaaacgctgatacaggcggaggtgacgcacgacaaacccattacgcgcaccatcacatcagaagtggtcgaccggctgcgtgtcactgttggcgttcaggcgctacagcaaacgaccgataaaggcgatcgcatcgggacttctgttcagatggatatccagctccagcaaaacggcatctggtcaacggtcaaaagcgtcattatcaatgatggcaaacgtaccagcccgtatatggcagcggttatcattaataatctgccgtcacgtccgtttaacattcgggtggtcagaattaccgaagacagcaccagtgacatgctgcagaacaaaacggtgtggcaggggctgactgaaattatcaatatcactcagtcctaccccgacacggcgttagttggcctgaaggttgacgctgaccagttcggcagccagtcagtaagccggaaatttcactgcctggggcgtattgttctcgtgccgtcgaactatgacccgaaagccagaatatacgccgggttgtgggacggtacatttaaaccggcctacaccaacaacccggcctggataattctggacctgctgacacacccccgctacggtctgggacagcgtactggtctggcggacgtggacaagtgggcgctgtatgccattgcgcagtattgcgatcaactggtcccgaacggcttcggtcaggatgagccgcgcatgacctgcaatgtgtatctcgctgaccgtcgcaaggcctatgacgttatcagtgatttttgctcggtgatgcgctgtatgccggtatggacaggccagcggatgacattcatccaggaccggccatcggataaggtctggacgtacactaacgcgaatgtggtgaacggcgagtttaattacagctacagcgcggcaaaagaccgccacaacgcggcggaaattcgtttcattgatccgcaaaacggctggaatgtgtctgtcgaactggtcgaggataaggccgatatcgctaaaaatggtcgtaaggtgctccagatggacgcctttggctgtaccagtcgtggacaggcgcaccgcaccgggctgtgggtcattcagactgagttactggaaacgcagatggtgacgttcggtgtcggcgcggaaggactgcgtcacacgccgggcgatatctttgaggtgtgcgacaacgattatgccggtgcttcgatcggtggccgcattgttgccgttgatgtggcggcgcggacactgacgctcgacagggatattgaattacccggtacaggaaagacggcagcggcaataagtttcatcgggcataagggtgagccgctgagcgctacggttgtatcacagccagacaaaaacagcgttgttctcagcagtcttccggaaggtgttgtggaaggtagcgtgtgggggcttaaacttccgacattgcgtcgccgcctgttccgctgcatggcgatacaggagaaagaggacggcacgtttgccgtttccgcgcttcagcatgtgccggaaaaagaagcgatcgtggacaagggtgcgacgtttgaaccggagtccggcacgcttaatggcgtgaccccgccagcagtgcagcaccttgccgtggacacctccgcagacagcagcctttaccaggcaaaagcgacgtgggacacgccgcgcgtcattaaaggcgtacggtttgttctgcgtctgacggtaggtgccggaacggaggaagagcccgcacgtctggtgacgaccgtcaggaccagcgagaccgaatttacgttccatgagcttccctatggacactacaccctgacggtgagcgcaataaacggttatggccagcagggtgatccggcgtcggtggaatttgatatcgacttaccggaaccgcctgattttatcgagattacaccggcctactttagcctcacggttgccccgcgccagaaagtctaccatccggaagtgagctttgagttctggttttcggaaaagcagctaatgagtgaggatcaggttctggcagaggcgcagtatctggggcgtggcagcatgtggataaaggacggactggttttgctggggacggattactggttttatgtccgcagcgtgaatctggttggtaaatcggcttttgcggaagccagcgggcaggttaagagtgatgctcagggagttctggaactgctcaaaggaaaaatcaccgctaatctgcttaaccgtgagtttctcagcaccatcgagaatgacacggtgcgtcgtgagtttgaggccgcgttgcggatatcggaaaccaacgtacagcaacaactggagacgctgaaaagtaccgtcaatgtgagcgtggccgccgaactggagaccatcaaacggacggcagcagacgagcacgctgccgttgcgttgcagatgagtacgctgcaaacacagatcagcacggacattaccagcaagatcgaggcgctacagcgggccagcagtaccgcagaaggctcgctgacggagaaactgacgcaactgaacgccacagttaacgggcaggtgacaaccgtccaggaaatcagccgggcgcaggccatgctcaacgacacagtggcggcgctgaaatccttccgggttcagtatcaggcgaacggcaaggccgctatcgccggtattcagttgtctgccacgcagacgcaaagcgaaatcctgatgatggccgacaggttcgcgttgcttaacccgtacaacggctcggtgacattgccgttcgtcgtacagaacgggcaggtgattctggcggatacgtttgtgaagtcgctgaacattaacgatcgcttcgtggttgatacggcgggtaatgtgcagatcagggacagtgcgagaaacgttggtatggtgataaccaacagggcgattaaaacgtttgacgactacagccgaaagcgggttcaggtgggcgatctgtgggcgtga

SEQ ID NO: 378074 - DNA, 357 bp, Salmonella enterica
atggagcgctacggtattcaggtgtgggatgagaacggtaaatccactgccacgggcgttacgccggtattgatactggattacttccaggttctgtcggggcaggcttccgggacgcgtttttatccggagttaccagcaggcgcgagaattaattttttcgcgtttccgtctgacggaggctcaggcgggggagggatcagccggacaaatcgaataagagggatacgtatcaacgggaaccaggtaattattgaagagctgcccaacccgcaggccgggagagaggcgctgccgtgggatatgagtattgattcggagcttgatgtggtggtttacgtggagaaggtttactga

SEQ ID NO: 378075 - DNA, 753 bp, Salmonella enterica
atggcgtttggtatttatctcgaagacgaatacggtaacccctggtgctgggacggaacccgtaattttcagcttatagagacacgcagctataacggtgtcactacgggcagtaattacgataccgggatcagtgcgtcacgtccgtgttttttgttctggcaggtgacgtggacgccggatattaccagtattcccatgatgttctacgggaaaaatccgggtggaaactggtattaccggttcgataaagatgctgacagtccgggctggggaagtaacgttaatgtgaagatttttatcttcagcaattacgcgccggtactccctcattatggcatcgcgatatgggatgaacgaggggatctggcgttaaccagtgaatcaaaactactgcggatagccggaaccctggactgtcgtgttattggtgagcgccgggcaatagcaggcagttacgcgattatgccgatgagaacagggagtgcgctttttaacaacctggggctggatgcggtgatcggagatccgtccgatgaagcatcggatgtggatttcggtacatcggcgcacattgaaggcggtatcacggtgctgacaaacgggctggcaaaaagtggagatccgaacagttggggccacctcagcatcaagggtgggcgttattcctggtttgagctgttatttggccccgagggaaaaaacatcattaacacgccgataccgtatatcaatgccgctgaatatatttag

SEQ ID NO: 378076 - DNA, 153 bp, Salmonella enterica
atgaagccacaaaaaatggcgctgttagcgctaatcgttgtcagtatcacgcttcttggagcactgttactgaataacaaaaccctttgtgatgtcagcttccgaagcggcggaacggaggtggtggctcacatggcttacgaatccaggtaa

SEQ ID NO: 378077 - DNA, 2076 bp, Salmonella enterica
atgccagtaatttcaggtgtcttaaaagacggtgccggacagcccattgccggttgcaccattcagctaaaagcaattaacactaccagtgcggtaatcagaaccaccacggcaagggttggtgtaacggctggcgtataccgcattgaggcacagccagcccggtatgaagtgacgctggcagtagaagactacccgccgcataaagttggcgtcattgatgtctatgccgactctccggacgggacgctgaatgattttctgaccgcaacaaaagcggagtacctgacgccggatgtgatgaaccagtttaagttgctggcgcagcagtccagggaagcagcagaagcggctggcgtggcctctcagggcgtatccacgataaaggatgcagcagaaaaagccgccagtaacgctgatttgtcagagatctatgcgtcagccgcagcgcgggcggccagggcaagcgaaatcaacgctgcgggttcagtgacacaggcagcggcctcggcagcagcagcgctggtcagccagaattcggcaaaaacgtcagaagatgccgcgtccgcatcagccgttaaagccagcgtatcggaagtaaacgccaacaacaacgccgccgccgcgcttgccagtcagaatgcggcaaaggtgtctgaagatgcagcaaaggcaagtcaggttgccagtgccgcaggcgccgactcggcatctgccagcgcgatgtcagcacaaggaaacgcaacgagaagcacgcaggctgcgacagacgctatagcggcaaaagatgcagcggttgctcaggttacaggctttgatgcgcacgtcagccagcaaaagtcggtcatcactcaggcggtagacagtgccaccacaaaagcaaacgcagatattgcggcggcaacggatatcaaccgcaacaacgcaatccaggcgataaaccagaagcaggcagaagcgaccagtgcaattcagacgagtgttgatgcggccgcgttaagtgagcgtaatgctcttggttctgcggcagcagcaaaagccagccaggtagccgccgcaacgtccgcatcaggtgcgaatacatctgcaattgcagctcaggcttcagcggcggcggccaaagccagccaggacgcagcgaaattatcggaagtgaatgcttcaggctattcagcttcggcatcaacatcagcagcggcagcaaaggcttctgagtctgcaacgggagtgaataaaaccgcaacggaactggccagggcagcagcacaggccgcactggaagaagcgaggctgatagccaaaacgccggggccagcgggtccagtgggaccgcagggcttaccgggagggcagggtcctcaaggtattcagggcttaaaaggcgataccggccccgcaggtccacgcggtttaacggggccgacagggccgcagggcctccaggggattgcaggtatacagggaccaaagggtgatactggtctacagggtccagcgggtctgcccggtctggcggggcccgcaggtccggcaggtgctacaggaccgcgagggttaacgggattaacgggtccggctggcgcaccaggaccgaagggcgatataggtccagtcggtccgcaagggttcacaggtccggcaggccctgctggtccatctggtcccgttggtccacaggggccgcgtggttttacaggaccggctggccctgcgggtccgacagggtcggttagcgggacggtttatggcgacctgaccgtgacgggcaatacttacgtcaatgacacctatattcgttctgaccgccgcagtaaacgtaacttccgtacaatggacagcgcactggacaaggtggataaactgcatggtcagttgtatgacgttctgagcggagggcggcttgtacgttccggtggtcttatcgctcaggatgttcaggccgtgctgcctgacctggttacggcagataaagacagcgggctgctgcgtctgaattataacggcgtaaccgggttgctggttgaggctgtgaaggaattacggacagaattgcgacagttaaaaggagttgcataa

SEQ ID NO: 378078 - DNA, 522 bp, Salmonella enterica
atggcggttggctcaggctgggttggttctcaggccgtggcagaaacagggcagcggtggatgtctgccgcgggggcggcgttaagagccccggcgccgttctggatgagtgcgctggtcggaaagtcagtagtgggagttgcgtcgtacgctaatcccacaggccggggatatgagacagcgagctggtgtttcctggattcgcagtatgtggatatcaccctgacagcgccattttccggcacggttgcaacaaacaacccgtctcttgtggtatccacttccgatgcactatttattgataacaccacggcgggagtaacctgggggacaagtatcacagcgaccagcaggcaaagatttttcattggattaaggtttgttgtaagccgggatgataccagaatagacctgccaaacacccaatggcagctattgctgaacggcagtgcggtagcgacatatacatcaaacttccttgcataccgttcatatgacacgaccacagaggatgactggtaa

SEQ ID NO: 378079 - DNA, 234 bp, Salmonella enterica
atggcaacaacagctaaaacggttggccgggactggcagcagataacggacggtacacaaagcgtgctggtacagatatttggctcagcgaacgtctgcgacagccctgtaaaaccgggagacgaccagcccgcgcacagcttcagcaataccgaactgaccgtcacgccgccaacaaccatgtggattcgttcttcgtggtttgaaggtagtgttcgtgtggtcgtgtcgtaa

SEQ ID NO: 378080 - DNA, 366 bp, Salmonella enterica
atgattatcacaggaaaaatgctgtctttcggaacatccggaactggcaatggtggtgatctcaccactgtaaaaacagacggcaccactattactggtgacggcaataccacgccgttagcgctggggccgggcgagaaaaacagcattggcacgtatgtaatggcgtattgcctagcaaatggtggagggcatgatgcttacggacagactataacgggttcatcaataacaccatcgagtaccaatgcgggtccagcccccaggcaaccccttaacccgtcaagtttaccaggaacctggcggctttgttgtgaggcatggactacttacgcctcagtcggcttataccagcgtattgcgtaa

SEQ ID NO: 378081 - DNA, 579 bp, Salmonella enterica
atgaatattttttcagtaaaaaacagcgtttataccgaaaacggcctgattaactgcctggtacattttgagggcttcgatgatttcattccattcaccgcttcccctgacgataccgaagaacacggacgtacactctttgccgacctaaaagccggtaaatacggccctgtcactcccttcaccgttacccctgaaatgctcaccgcagcaaaacaggcaaaacacgctgaaatcaataactggcgtgatactcaggagaacggcagcattatcttcacgctgaacggccaccgctgggactgcggcaaagcctcacaaacccgccttgcgcccgttgttgccgtggctaaatccggtgcacttccgcccggcttcttctggacagacgccgacaacatcgatgtgccaatgactgctgacgaactcaccgcgctggaagccgcaatgcagcagaacatggtgctacagggcttcaaaatccacgaacgccagcgggtaatgaaagaacaggtggataatctcaccgactataaggcgattcagggctatgttgtgggctgggttgagggaggttag

SEQ ID NO: 378082 - DNA, 384 bp, Salmonella enterica
atgagcaaattcacaactcccgccattctggaaatgctgggccacttcaactggcgcgtatatgagccgttcgcgttttacctcagtgacgacgaaagcgacgtgatagaagtgccagccggattcatcaccgacctggcgaccgtcccccgtattttctggatactccttcccccggatggaaagtacgccaaagcggcaattattcacgattacctgtacgacaacgcactacgtacgaagaaagaagccgacaaaatcttcctcgacggtatgacggtgctgggcgtgccgaagtggaagagaacggtaatgtattgggcagtgcggttgtttggcagggggcaatatagccagcgtgagcgacggaagtcgctcacttaa

SEQ ID NO: 378083 - DNA, 327 bp, Salmonella enterica
atgaacgtacataacaccaatttcaggcagcgcattgataatgtttactctctacctaatgagcgcaataatcatgtatcattaactcatggcggcggcagtggtggcggtgatgatatgcatcaaagagtaaagtacctggaagacaaactctcagatatcgccattgatgtagcgatacttaaggataaggttgccacaaaagaagatatagctaacgttaaagtagattttcacaaaggcctaaacaatcagacctggaagataatctccgcactgttcattgcggtgctgcttgctgtgttttctcattacttcattaagtga

SEQ ID NO: 378084 - DNA, 408 bp, Salmonella enterica
gtgattaacgacaacccaaaaattgcattcatgtatccatacccgggaatggaaaattcatccccaagggttttttatcaacttcagaatggtcaagttgatataggcgtgggaattgcctttatgtcactcgatccaacaaaagattaccaatgtggcattgagattttttcaccttctgaagttgatgtgctgaatacacatggcggaataattctcttccctttatcccatcttagtatagagcctggctatggtgtaacgttcgcacaaatcggcatgaccttatctacaacagggagaggaaaccacaaaatagtctgcacgcttttcgaccaaaatgaaagcgagcctttggataagcgtgaggcttggttctgtatagatctatcggtagaaattaaatga

SEQ ID NO: 378085 - DNA, 258 bp, Salmonella enterica
gtgaaggattgggcgggtgcatatccgcaatcaactatcgtgaccgtgcaaatactcatcaacaatggctatcatgataacgataagcgccaggataacgccaagtccaagcaatataagcgcgagtttactcatggttccgccaaaaaaaaagaggggcgtcggatcatgcccctaatcacaaaaaaataccaacaaggattatatgcatcaatcttatttcatatgcagaagatgcaggtcaagccagtaaaatga

SEQ ID NO: 378086 - DNA, 558 bp, Salmonella enterica
atggctctgattgatgatatctttaaaataattggtgcggcgtctggtgtagaagatggccgcactgtatcttccacctcagaagacaagacatccacacagcctcataacgttaaaaatcccgctgattcctcttatcccgagcaacaacatgctaaagagccaccagaaagtaaggcagaacaggaagagcaggcctttgcatctaatacaggggcattgcatgaattcatgcagcaaaatcgaatggatagccttcaggctcagttggatatgcttcagtctcaagttagggacaagatagcggacgcaaatggaaaggaaatagataacgatctccgcaagcgcatggcatcatttaccttcaaattcatggtgtgctggtgttcatttgtagcgactatgtttacatcttaccttatagctaacgatggatcgccaccagcagaaacaatagtagccttattggggactagtactatcagtatcgtcgggcttgttggcttcgtcgttagcggattattcaaatctcgaaaggaaaatgataaagaaaagtga

SEQ ID NO: 378087 - DNA, 471 bp, Salmonella enterica
atgtacagtccagtacaagtagccaatagattcgttatgctgggtaaccagcaccagaatcctctgactcatatgcagcttcaaaagttgacatatatagcgcacggttattatctggcatttaccggtcgtccattactgaatgagtttgtctcagcatggaagtatggtcccgtaatccctgggatgtatgatgcctttaaaaactatggtaacaaaccagtagcatctcccgctatggcgccacagggcatgactcctatggacccccaggctgatagcgttattggtgctgtttatcaatattatggaaataaagatggtatcgagctttcaaccttgacccacatgccaggaaccccttggtcacaagcatatacagggttaagttcgaccatcattcctaatgagataattaaatcttattataatgctcttatcacaaatcaacaggcatgtcagggcttatag

SEQ ID NO: 378088 - DNA, 1506 bp, Salmonella enterica
atggcacaagtaatcaatacaaacagcctctcgctgttgactcaaaataacctgaacaaatcccagtcggctcttggctctgctattgagcggttgtcatctggtctgcgtattaacagtgcaaaggacgatgcagcaggtcaggctattgctaaccgtttcacctcaaatattaaaggtcttacccaggcttcccgcaatgccaacgatggcatatccatagcccagactactgaagggtcattatctgaaataaataataacttgcaacgtgtacgtgaactggctgttcaggcgcaaaacagcaccaactctaaaagcgacctgaagtccattcaggatgaaatcaaacaacggttagacgaaatcgatcgtgtttcaaatcaaacccagtttaatggtgtaaaagtacttgcctcaaatagcagtctgaaaattcaggtgggggccaatgatggtgaagccattactattgacctgaaagagataaacagtaaaacccttgggcttgataagcttgatgtaagtaatacattcgtaacctctgaccttcaggatacagcgctgactgaattgtctgcggggaaagtcagtgtcaaagatcttgattttaccgatactgcgggtgctgctgcctacaaagtttatgtccagaaagctgacccaaataaaatttttgtgggtacgggaaccggtgctacagctaaattctatgaagcaacttacgatgagaaaacaaactcatttaagtttagctctgctgcatcagttggcaaagaggccgattactcggatgctacaggtaaggatgttcatgtcggaggtggaagagctattgctgctgacagtattaaaggtcgtacagatactaacgacgcaacgaagccgacgctccaccttgatgaaaaaggtgcctatcatgtcagcttcgacaagggaaccactttccgcactgcaacagtcgctgatggtaaggtcagttatacttcagcagacgtgcctgctgcattagctactggctccaaagcaacggctgctttaaaagagattggcacgccttctgctcctgttgcaattgatatgactggggtaactgatgtggatggtgctcagctattcgccagaaaagatggtaatggttatgtcataaaaggcactgttgacgggaaagttagttatttcaaagctgatgtcgctgctgatggtaaggtaaccaaaggtgatcatctttcagaagacccgcttgcaaatcttgacagcgcactggcgactgttgacaaattccgcagctctttaggtgcaattcagaaccgtttcgattctgcaattaagaatctgggtaatacggtgaataacctgtcttcggcacgtagtcgcattgaagatgctgattacgctacagaagtgtcaaatatgtcccgtgcacagatcctgcaacaggcgggaacttctgttctggcacaggctaaccaggttacgcagaacgttctgtctctgctgcgttaa

SEQ ID NO: 378089 - DNA, 171 bp, Salmonella enterica
atgctctacatgaagtatcagttgaaaatggtgagcaatttaataaaagagaaattcctgcttcgagaaaggattttttttcaatttgtaataaatgttttaagcaatgtgtgggtatcagagttcatatggctgatggtcgtgttatcgaaggaagaactacaggggtaa

SEQ ID NO: 378090 - DNA, 486 bp, Salmonella enterica
atgcatatatcccgccgcgcactgaattaccggcaaattgtccttatagcccctcctgatattcccgccagtcatattgcggtatttgacgctgaaaccaaaacgtggagtctacatgaggagcaccgcgacgaaacggtggacacgcaaaccggcaacccgatttatatttcagaacccggcccgctacctgaaaacgtcacatcagtttcaccagacggtgaataccacaaatgggatggtaaggcgtgggtaaaggatgaagctgcggaaacagcggccagacttcttgaagttgaagggaccaaaagccgtcttttgcaaatggcatcggggaaaatcgcgccattgcaggatgcagttgatcttggaatcgcaacagatgatgagaaagcgcggcttgacgaatggaaaaaatacagggtactggtaaaccgggtggatacatctgcccctgactggccggaggtgccaatcagccattaa

SEQ ID NO: 378091 - DNA, 993 bp, Salmonella enterica; identical to SEQ ID NO: 377543

SEQ ID NO: 378092 - DNA, 549 bp, Salmonella enterica
atgaaaattattgaaaccgagatcccagatgtatttattttagagcctttagtattcgtagatgagcgcggttttttcatggagagttttaattatcgggtatttgaaacattattagatattaaagtaaattttgtccaagataaccactctaaatcaacaaaaaatgttgtcagaggattacattatcaaactgagccatatgcacaaggtaaattagtacgttgtatatcaggggccgtttatgatgttgcagtagatttacgttctacttcccaaacttatgggtgttgggtcggagttgaattatcagcattaaatatgcggcaactatggataccagaaggttttgcccatggtttccttactttgacagataatgtggagtttttatacaaaacaactaactattataataaagaaagcgagcggtgcattagatataacgatccagatcttgatattatatggcctatttcaaataaggataatataatagtttctgataaagataaaaaaggtatactgtttagagatataaaaaaataa

SEQ ID NO: 378093 - DNA, 996 bp, Salmonella enterica
atgaacgataacgttttgctcattggtgcttccggattcgtaggaacccgactccttgaaacggcagtggatgattttaatatcaagaacctggataaacagcaaagccatttctacccagagattacacacattggcgatgttcgtgaccaacaaatccttgaccagacgttggtgggttttgacaccgtagtactattggctgcggagcatcgtgatgatgtcagtcctacctcgctttattatgatgtcaacgtccagggaactcgtaatgtactggcggcgatggaaaaaaatggtgtaaaaaatatcatttttaccagttccgttgcagtttatgggctcaacaagaaaaatcctgacgaaacacaccctcacgatccctttaatcattacggaaaaagtaaatggcaagcagaagaagttctgcgtgagtggcatgctaaagcgccgaatgagcgttctttgaccataattcgtcctaccgttattttcggggagcgtaaccgcggtaatgtatacaatctcttgaaacagatcgctggtggtaaatttgcgatggttggtccaggaaaaaactataaatcaatggcttatgttggaaatattgttgagttcatcaaattcaaactcaagaacgttacagcgggctatgaagtttataactatgttgataaacctgatctgaatatgaatcaactggttgccgaggtagaacagagtctggggaaaaaaatcccatcgatgcaccttccctatccactaggcatgctggggggctactgtttcgatatactgagcaaagtcacgggcaagaagtacgctgtaagttcggttcgtgttaaaaaattctgcgcgacaacacagtttgatgcgacgaaagtgcattcttccggttttactgcgccatataccttatctcaggggctggatcgtacgctgcaatatgagtttgttcatgcgaagaaagatgacattacatttgtttcagagtaa

SEQ ID NO: 378094 - DNA, 1242 bp, Salmonella enterica
atggcgcgcataactaccccgctaaccaataccgagattaagtcagcaaagcctgccgacaaagagtacacgctacaggatggcgcaggtctgtacctgctaatcaaacccagcggctctaaaatctggcgattctcttactaccgccccaccgataaaaagcgtgcgctggtgagcttcggatcgctggatgccctttcccttgccgatgcccgaaaaagacgggacgagtaccgtgcattaatagcacaaggcatcgacccacaaacccaccagcagcaaaaacgcgaggccgaagagttgcgccgggggaataccttccagaaggtagccgctgactggtacgaaatgaagaagagtcagaatcttgcggctaataccatcaaagatatctggcgatctctggaaaagtatgtgttcccggacatcggtagcacccccatcaacgagctgacggcgcgtaaattcgtgaccgttcttgaacccatcaaagcgcggggcaatctggaaacgcttaaacgtgtgttacagcgcatcaatgaagtcatggattttgcggccaatagcggcctgatagaaatcaacaccgccgcgaacgtccgtaaagccttccctaccccggtaaaaaagcacatgccgactatccggccagagcaacttcccgaacttatgcagacgttatccattgccagcatcgaacggcaaacccgcctgttaatcgagtggcagctactgaccgtaacgcgtccggtcgagtctgccgaagcccgatgggaagaaattaacctaacggataacacctggacgattcccgcaggccgcatgaagatgcgccgggatcacatcatcccactatgcgagcaggcgctagccgttctgaaggcaatgaaacctatcagcgcccatcgcgaatatgtcttccccagctttaagacgcctaccctgccaatgagcagccagagcgccaatgcagccctacgccgcatgggttatcagggtgttctggtgtctcatggtctacgagccatattcagtaccgcagccaatgaggaaggattcgagccagacgtgatagaggcggccctcgcccacgtagacactaacgaagtgcgccgggcatataaccgcagtaactaccttgaaaaacgcattgtgctgatgcgctggtggggtgagttcgtcgaagcggcatctactggcatcacgctagcaacaggaacgcggggaattagggctgtataa

SEQ ID NO: 378095 - DNA, 732 bp, Salmonella enterica
atgcctgtatatgacaatcttcctgacctgactcactggaaaactgttcaggaatttagcattactcaagctgcattgttattagccggaattgacccgttcgattttgatgaggacaaggcccttgagcaagttagagcacgaaaacacgaacgctggaaactagcctggggaatgagcgctgggattataacggctatcaggcgtggagtattaacgccaatattatgcttttctgaaaaatgggtagaaaattggaatggccctgattatattgagtacgaaataatcaagccaacggatagaagtcaagaaatatcaaagataaaaacaataatgactcgtgactccttaatggcatggattgaatcagaatgtattgatattgcccaaaagccacgcaaaattagccatgaacaaagccaaagataccaacgatgcgatcattctgaaaaaattatacatcccccagcgcaagatattgtaacaatcaatgagcctttagctttgccatcttatgagcacagaagtgaaggactggaatatgtggatgaggcaataaaacaattctggtcaacctatgatgaagacgatccaagcaccgcgcctaaaaaagatgatgttaccgcatatctccagtctaaaggggcatctggtaacgttgccaaggctgttgatctgatagttaggccggacgcattgagaaatttaggaagaagaaaaaacgtttaa

SEQ ID NO: 378096 - DNA, 210 bp, Salmonella enterica
atgaattattcagaaagaaagatcctgaccaaaacagaagtaaaaaacattatccgtctgaaatccgatagcgcatttcaggaaatgattaatgccggagaatttcctcgtggctttcgtattggcctgcgtcgagtcggttggtttgaagatgaagttaatacatggctgaaagagcgtgtattagaagctcgtggcgaagtggcctaa

SEQ ID NO: 378097 - DNA, 804 bp, Salmonella enterica
atgaacgaagaaaacacccttcatcgggcgggcttagctcaccctgaaaacgacctgaaactaattactaataatgactttgccaatatcgtgccggttattcccggtcagatcggcgggcgggaaactggcgttgtgagtgccagagcgctgcatagcgcgctgggtattggtcgtgatttcacgaactggattaagggacgcattgaccaatacggctttattgctggcactgattatgttcgtgtagaaaatttgagcacgccaaaacgggcgagcgcaaaaactcgccagcagattgagcatgattatcttctctcgctaaatatggctaaacagctaccaatggttgagcgtggcgaccaaggccgagccgttcgccgatacttcattaagtgcgaggaagcgttacacctcagcgcgccggaagtggcctcccgctttcgccagcaactgaaagcccgcattactgccgccagttacttcaaaccgatgtgcgaagcgctggaagccgcgcgcgcagaacagggaaaacagacgctgccgcggcactatagcaatgagagcaacatgatcgcccgcattgtgctgggtggcttgactgcaaagcagtgggcactggcaaacggcctcgatggagaaccacgcgacgggatgagcggcgatcagttggagcacttcacctatcttgaaagcaccaacattacgctgattgagttggggaaagattacgggcaacgtaaagcggaactaatccgtttgtcacagcgctggctggctaaacggctgggggcaaaccaatga

SEQ ID NO: 378098 - DNA, 798 bp, Salmonella enterica
atgattaaatggccctggaaagcacaagaaataacccagaacgcagactggccgtgggatgatgcgctggctatacctcttctggtaaacctcactgcgcaagaacaggcccggctcattgcgctggccgaacgttttttgcagcaaaaaaggctggtagcgctacagggatttgagctcgactcgttgaaaagcgcgcgtattgcgttaattttttgcttaccgatcctggagctcggtattgagtggcttgatggtttccatgaagtactcatttatcccgccccctttgttgtagatgatgaatgggaagatgacataggtctggtgcatagtcagcgcgtcgtacagtcggggcaaagctggcaacaagggccaatcattttgaactggctggatatcaaggactcgttcgatgcttcgggtttcaacctcattatccatgaagtcgcgcacaaactggatatgcgcaatggcgatcgcgccagcggtattcctttcatcccgttacgggacgtggccggctgggaacacgatctccacgctgcaatgaataatatacaggatgaaatcgatcttgttggcgaaagcgctgccagtatagatgcctatgccgccaccgacccagcagaatgttttgccgtgttgtcagagtattttttcagtgcgccagaactgtttgctccacgctttccgtcgttatggcagcgtttttgtcagttctatcgccaggacccttctcagcgcttacgggtacactcaaccgagggcgactacgggaaagcatcagagcattaa

SEQ ID NO: 378099 - DNA, 399 bp, Salmonella enterica
atgccatcaggtgagatttatttatgcgcagcaaaagtcaaaaaaatgataaaagttattctcatttctcttatggtaaccgtcagccttgctgctgcccgttactcacccgtcacagtagtcaatgcgtatcccagcgtcattgcccgctgtctcgctgataatctgtaccagtatggttatatactggatctccatgaaacagattttccaggcgttaataaagaatttaccgtgtattatcgcaacggcgcgcacattgccggaacattctggatcgcaaactcaatgtcaacatcgccagaacgaacggtagggatgtatggcgtcagtaaacaagcgtaccctatttttaataagtccctgcaacaatgtgcaacccgcttatcaatgaaatga

SEQ ID NO: 378100 - DNA, 420 bp, Salmonella enterica
atgaaaaagattttttctgtctgtgctttgttaattacagcatggcctttgagttcgtgggctgaatggacaggagatagttctataaactattattctgatgaagttatctctgattttcatgtcggtcagtttaaccacagtgcatatttttgcataaaaacagttaaaaaatcaggagaagggacaccgattatagcatgtgcactttcacatgattctaaatggataccttcatttaatattatgttggaacaggcaaggaatttttatattacagggcactctataagagtgtatgttcaaccaaatgtctggagcaataaatcctttatagaagcgttatcatccaatgcacttgttggactttcttcatgtagtacatctgaatgtttcggacctgtgaagccgaagatgtaa

SEQ ID NO: 378101 - DNA, 453 bp, Salmonella enterica
atgaaaaaaatcacctctgtttgtgcgttattaagcctcatttgttctttcaacgccagcgctgagtggacgggagattacgaaaacattggttatttttcacacgaagttatcagtgagttccatgttggccagatcgatgggggcgcttatttttgcataaaagcggttaaagccgatggtagtcgtagtactcctcttattgcatgctcagtatcaaatgagagtgtatgggctccttcttttaaagtactcctagaacaagcaaggtatttttacgtcaccgaacaatctgtaaggatttattatgatcataatgtctggacaaatcaaccctttgtaaatacattttcaacaaatgccctcgtgggattatcgtcatgcagcgcagcaaccgactgctttggccctggtaagcctaagactaagagtaagagggatgtggaacaatga

SEQ ID NO: 378102 - DNA, 732 bp, Salmonella enterica
atgaaaaagttaatattactgaccttaataatagccagttttgatatctatgcgatagattttgtttatcgtgtagatccaaatccaccggatgttatttttcgtgatgggttctctctacttggatataatcggaacctacagcaattgatcagtggaagatcgtgtgctggtggaagtagtgacagtcgttatattgtaacgacatcagatattaataaaacatacgctatagccagagcgtactattctcattcaaaattcaaaggtaatctgtacagatataaaattcgcgcagacaataatttctacagtttgactccatccgtcaactacctggaatcgcaaggcggtcactttaatgcttatgaaaaaagcatgatacgattacaaagtgagtatgtttccacattgtctattttgccggaaaatattcaaaaggctgtggcgctcgtttatgatagttcaacaggtcagataaaggatggtacaagtacaataaataccgattatgtaagtataagcagtgtgtcgaatccaggagtgataccttttctccccgagccgcaggctaatacacagcaacggattgatgcatttggctcgttaataagttcatgcttttcaatttatagcgtgtgtcagacacatagaggtcaaaaaactgaagtgtacaaaatgccattttatgatgcaaggccagtaatacaatttatcatttcaggtaattga

SEQ ID NO: 378103 - DNA, 1653 bp, Salmonella enterica
atgactattcccctctggtggcaaaacggcgttatttatcagatctacccgaaaagttttcaggacacgaccggcagcggcaccggcgatttacgcggcgtcacgcagcgccttgactatctacagcgactcggcgtggatgccatctggctcacgccgttttatatctcaccgcaggtggataacggttatgacgtcgcaaattatacggctatcgacccgacctacggcactctggatgattttgacgagctggtcgcgcaggcgaaagcacgcggtattcgcatcatcctggatatggtgtttaaccatacttctacccagcatgcctggtttcgcgacgcgctgaacaaagagagtccataccgtcagttttacatctggcgcgatggtacaccggatgtctgcccgaataactggcaatccaaatttggtggtagcgcctggcgctggcatagccagagcgaacagtattatttacaccttttcgcgcctgagcaggccgacctgaactgggaaaaccccgccgtgcgcgccgagctgaaaaaggtctgtgaattctgggccgatcgcggcgtggatggcctgcgtctggacgtagtgaatctgatcgccaaagatcaagattttcctgacgatccggcgggcgacggacgccgtttttataccgacggaccgcgcgcgcatgcgtttttacgcgaaatgaaccgtgacgtttttacgccgcgtaatctgatgacggtaggcgaaatgtcctctaccaccctggaaaactgccagcaatatgccgcgcttagcggcaacgaactctcgatgaccttcaattttcatcatctgaaggtggattaccccaatggcgaaaagtggacgcaggcaaaacctgattatgtggcgctgaaagcgttgttccgccactggcaacaggggatgcataacgtcgcctggaacgcgttattctggtgtaatcacgatcagccgcgcatcgtttcccgctttggtgacgagggtgaataccggattccggccgcgaaaatgctggcgatggcgctgcacggtatgcaagggacgccttatatctatcagggcgaagaaatcggcatgaccaacccgcgctttacccgtatcaccgattatcgcgacgtggaaagccataacatgtttgccgcgctacgcgccgccgggcgcgaccccgacgaactgctggctatcctggccagtaaatcccgcgacaacagccgcacgccgatgcagtgggacaacgctaaaaacgccggtttcacccagggcgagccgtggataaacctgtgtgataactatgcggaggttaatgtcgcggcggcattgagcgatgaaaactcggtgttctacacctatcaaaaactgatctcgctgcgtaaaacacagcctgtactgatctggggcgattatcaggatctcctcccggatagcccatcggtatggtgttatcgccgccaatggcaagggcaaactctgctggtcattgccaatctgagcgatcagtgtcaggagtggcatccgccgcatatcaaaggacagtggcaggcgctactgcacaattatggcgaggtcgccagccagccagccacgatgacgctccgcccatttgaagccatctggtggttacaacgctag

SEQ ID NO: 378104 - DNA, 363 bp, Salmonella enterica
gtgcctatctcctcccgactgcggccacatctggaaacgttactgtatgaagcgcgaaaacgagggatcgcctccggcgagcagctatttaatatcaactgcttcaaccagcggacgctgcgccagggtaaaccgatgacagaaaatcaggtcagctacttctttgccaaactgagcgacgcctgccacagtcgtttttcctcacaccgctaccgccacaccgtggcgaccgaactgatgaagaaaccggagcaaaatttatacgtcacacagaagctgctggggcacagggatattaaagtcacgctcagctatatcgaacataatgtcgagatgctcagaagttgcgtggagagagattga

SEQ ID NO: 378105 - DNA, 936 bp, Salmonella enterica
gtgcagaaggctgaccgtgcatcggtggcgtttaatctcggcggcgatccggttaaggctattcatcgcccgcaaacgtcactgccgcagcaaattattaccgccctgcgcgacctgctggcgcatgagtttcggctcaacaacccgaacggaggctctgacggctggctgacggaagaagcgctgtggctggtcagtaagaacgctgccgatgccgtgcgtggctggctgctgcgccaggggattgacgccgtaccgcaacataacgttcgactgttcgacgagatgcaggcgcaccagttgcttatcccctgcgaagataaagtcatctggcattgtcggattgaggcctgtggcggctggagcagtgagctgaccctgctgcgcttttcaccgtcgcttatctgggaaaacctgcaacaacggccagacgtctttcagggaactgtaacgcccatcgagccagaaccggataaaccctgcgttgccagtgatcatgagcctgaacctgaacctgttcccgccacaccgccggatgaagaaccgctgtccggcgaagccttctggcagtggctgacccaaaacgtccaggcgcaacatctggaaatcaacgaacccaacgcccgaatccacaccgtcgccggaacggcgtttctggtgactcctggcatttttaagctttggctgaacgcctgcggcagggatatcccggcagagcgctggcgggaggtacagaaagcgtttcaggacctgaatctgcaccgcaaacgcaaaaacggcctcaacatctggaactgcgccgttgtcggccctcgccgcagttcgcgtttaaaggggtatctactccacgatcccacgctgctgttcggcgatgacgtcccctttaataacccgcatctcttgctgaatgaaggagagaatgatcatgacctttga

SEQ ID NO: 378106 - DNA, 768 bp, Salmonella enterica
atgaccttcatatcaacggtggagcatccctgctctgccgtttttctccactccaataaatttgcgcagcctaataaacaatttcgccccaaatctgacggcaccaaaaggcaaaatccaaagggtgaagggaaagagagtgaaggggtaacgggcttacccgaaaaaggggaaaaggccattatgcggatatggctgacgcgcaaaaaaccagaaaccacaccatccgacggcaagcagagcgccacggagggatggctgcatcccgaatccgcacaaacgttactggctgaaactacccgccagcagcttatccagtttattcgccagagcaccgcactccctgcctcactgtttgaacgtttctggctgacaccacttcatcgtttcgcagaactggcgcagtcgtttcccgcttcggaaaaccaccaccactcccacgcgggcggcctgctcgatcacagccttgaagccgcctgttatgccgcacggctgcggcagagttatctttttccacctgatgcagcgccggaagatcaggccgctcagtccgaacgctggaccaccgttatcatttacgccgcgctgctgcacgatctaggcaaactcatcaccgatatcgaagtggaagatattagcgggaaacgctggtttccctggcacggcccactgacccgaccttatagattccgctatctgccgcaacgtgattacctgcgccatccggctgcggcagctcttctgctcacccaactactcccaccgtaa

SEQ ID NO: 378107 - DNA, 267 bp, Salmonella enterica
atgctttacgtcgtaactttcatgggtaacccaagggtatttagttctctaaagagtgctcataacgaggattgtattcaactcattgttttatttgtattatttttctcaagtgctatcagcgtgagttttaaccttggtttagttacttttagacttcttagttgcactaccagtattggtgttatgaatctaaaatcagaatcattttttgaatctaaaattgatctttttttgagtacgatgtatgttgtcatacgacactaa

SEQ ID NO: 378108 - DNA, 627 bp, Salmonella enterica
atgtctaattttattgatgccttaaaggccagcttgaaggctggagacggtagttctgtgacggtatccgttcgtatcagtcaggatgaaaatgatgttcttcaaaatattgcagcgcatgtcggtacttcccgacaagaagttgtccatcagctgatcaaattgcatgctatccctgcttggcaggcattacaggcatccggccaggagaagaactcgcttatttcagaacgaaaatcagaatactttattttgaacacgaataagacgaatagtaaaagtgatcatgaactcatgataaacgaaggtattgctgctgcttttgaagatgggtacataggaaagatagatagaataaaaaagggggatgtcgtttttttgtatgaatcaggtaagggcattattgcctgtggtattgcaactggtgagtccattgatgaggaagaacctgaaaaatatggacataagagtatgcgttatcaatatctcaaaaactttcgacgtttgtcatctccggtttcagccaaggaagtgaagcgtatcgttggccgctctattccttttgttcaaacattagcgtcgatttccgatggtgatatactttaccaaaatttgaagaaacattaa

SEQ ID NO: 378109 - DNA, 594 bp, Salmonella enterica
atgaatgaaacagtacctacatcagacaaagaaaggtttctcgaactattcccttatattcgagaatatcaaaagttagcttcaaagtataaaatcaatgatatatttcaagataacggtggtaaatatttacaattactaatgatcttagacttaactactgatggtgctcgagagggaaatgatgctatagatgcggctggaaatgaatacgaaataaaaactgttaatattgaattacagcatcaatttacaacgcatcaccatatgaatcctgtaatcatagcaaaatacaggaaagttgactggtattttgctgcattcaaaaatattgaactacaagttatatataaacttacacctgataaaatggaacccttttatcaaaaatgggaaaataaatggcataatgatggaggcaaagatattaacaaccccaaaatatccttaaaatatgttatggataatggtgaagttgtatggctcccagaaggtattgattctttcataaaaccaaaactaattcgaaatcgcaacgtaccaataaataaaagaaaaacaagagctaatgctatatcatccgttgatgaataa

SEQ ID NO: 378110 - DNA, 213 bp, Salmonella enterica
atgtcagccagacaaaactttgcccggaatctgcgcaaaatcagactgtcacagggaatatcacaagaaaaacttgcggatctatgtgatcttcatcgcacttacgttagttctgttgaacggggtgaacgcaacatcgccgtggataatatggaacgtttggctattgctcttggtgtcgatattagagagttacttgagccaaatgaatga

SEQ ID NO: 378111 - DNA, 957 bp, Salmonella enterica
atgtcattaccaaattttgataaaaaacctttgtataacactccattaggggctgcttatgtagctgattcattggatatgcttgtacagctccctgatgagtcggtcaacttggtgatgacttccccacctttcgctttacaacgtaagaaagattatggaaataaagaacaacacgagtacatcgattggttggctgaatttgcctcattagtatatcgaaaactcactcctgatggctcatttgtagttgatctcggcggcgcttatcagaaaggtgtgccagtacgtagtttgtataattacagggtattgattaaattttgtgatgatattggattccatttggctgaagaattcttttggtataatccatctaagctaccgtcacctattgagtgggttaataaacgtaaaataagagcaaaagattctgttaacacagtctggtggttatctaaaactgaatggcctaaggctaacgttagtaatgttttgactgaatactcggatagaatgaaaaaactcattaaggatcccgccgcatattactcaccagccaaaagaccatctggacatgatattggctcatcttttggaaaagataatggcggtgcaataccatctaatctgttacaaatctctaatgctgaagcaagttcaaaatatttgaaattgtgtaaagaggttggaattaaagctcatcctgcgagattcccagctaaattgccagagttttttattcggtttttaacagaaaaaaacgacttagttgttgatatttttgctggttctaacactacagggtatgttgcagaaaaagaaggtcgccgctggttagcatttgaacaacttcctgaataccttagtgcatcaatatttcgtttcatggagagtgattctattgatgatataaaaatacgctataacgaaatagtttcttctacagaagcataa

SEQ ID NO: 378112 - DNA, 1794 bp, Salmonella enterica
atgacttttacttcggatcttttcctcgctagcagatggcaagaggcggcctcaagcaccacacatggttatcattcattaaaatgtaactttcaggaactggcggaggcttatcatagggaagcatcagaactactttcgaatatgatgaattttttcgcaagtctctgctctatggcactgacaccagaaagccccaacgaaccttacagaccatttataacgtcttcaaatagtagaagtatgattccagacgatcttaccggagaggatcttatatttatagaatctattttgggtcatatcgactttccattacttaaagcacgtttggcagatttattatggctgcgtaaacgtccgagaagtgttgaacatgccagaattgttatttcatcatacctagcgcttccaataactagtgaggaatggacgaaaggtggacagctatgttgggaaagggccatagcacttagttttcaagtaaaagacttcacaacaattgatataataaaacagcgcctcacagaagcattgacattgagctatgaagattttccactaatgcgataccgcataggtgaatcaatcaatagaacgaatttattcgggaatgatacaggtacaattgctcaagctctttttgaagtaggggatgggatcaccgtacctgaaactatatcattagcctttcatatcaagagatcatattttaaagtatcagaaaagttatttagaaaagcaaaggagcacaaccgagctatcgcctgtcaggtaagaatcgctgaagcattcgtaaatgaagctgagcagcgactttctggtgaaaatccaaaccccggtgttgcgaacagcttttatgaagacgctttgcaagcctatcgcaaagttccacaagcctatagatctgaatataatgtggagcgtaaattagaagaaatcgaacaagccattctcagaacaggtgccgaggcgcttgagaatatgtatgagattcgaacagatggcattgatttatcaacccaagtcgaacaagctattgctcatgttacaaacaaacatccactggggatggcaattttatattttactggttttaatacagaaagttatacggcattaagagagcaggcgattgccagtttatctgagccaagttttctaaataccattggaaggaccataatatcacaagacggacgcacgatcgccagaactccgagtgtatcaagcaataatagtgcatcagataatgaatttatcatctttagcaaaatcatggagatatttaacttcaatctgagtattattgttaatggaactcttattccggccctcgatcaaattataatggaacaccgtataactaaagatgacatggaagcattgtgcttttattcatcaataataccacgaagctataacagctctgttgcgaatgcattatggtatggttttgaacgtgactttcgaacggctatatatctattatgtccacaaatcgagaatattatacgtcaaaaattaaaaagtgtgggagtaaacacaaccattacagatgaaaatggaattactcaggaagtcggcatgggaacattacttaattttaattcagcaacagatttattgggggagaatctcattttcgagttgaaggctattttcactgaagcacttgggtctaatttaaggaataatattgctcacggcttactggatgatgatagttcaaattctgatgcatgtgtttatgcctggtggtcagtgttaaaactcgtcattcgaaatgaataa

SEQ ID NO: 378113 - DNA, 1479 bp, Salmonella enterica
gtgacgaccaacagctacctggagtactttctgacgctgctcggctgggtggtcaataacgggctgtggaatgcgatcagcgcgaccggattatttgctctgccgctgttgattaagctgctggcgctgtggctacaggccagaagtcagggagcggatgagggcaacaaagccgcgctgtccctgatatgggccgagcacctgatgtacacctcgttgctggtcattatgttcacctgcgtgccactgctgaacatcgacctcgataccatcaaatatgacaccacgcgatcgaagcagtgcggcatgtcggtgccgcaacccgccgatactggctatcagccgattataaactcgctgggcggtaaaaccgccgcagtcccggtctggtggtattttattcatgtgatcagcaaaggcatcaccagcgcaacggttgccacccttccctgccagccggatctgcgtcagatccgttttgaggtgcagcacacccgaatcaaggatccagcgctggcacaggaactgcgggattttgtcgaggagtgttatgccccttcccgcgcccgtctgaaatttctcgccggagagctggacgatgacaccagtaatgatactgcctggctgggatcatcgtactttctcaacacgacgggttactacgataccgaccatgcactttcaccacacagtacctggccgtacagcgcaccacgcgacgccgggctggccgatacgggcgcgagcggctatcccacctgtaaacagtggtgggccgacgacaccgttgggctgaagtcccggctactgcaattcccggccccggatatctggacagcgtttaaaaagatcggacagtcacaggcagtatatgaagaggccgtgttgcgctcgctggttagtgaacgaaatatgcaggtatcgcagaacgggcgcgtttaccccggttatggtgggaatgtcgatggcaccgtcgccaatgccgccaccaggctggcatccagcgccggaaatatcctcggcagcatagcggcgttcccggcgttcgacagtgtgcgccaggcactaccgatggtacaggcgctgctgcaaatggcgctggtgatctgtattccgctgataacgctctgttcaacatgggacgttaaggtggtaatgacgctgacatttgtgcagttcgcactgttcttcctcaccttctggtgggaactggcgcggtggctcgatagctggttgctggatgtactctacaacagcgatacccacagtagctggaatctggccgggatccagaatacgcaggatgacgtgattattaatctggtgatggggtcgatgtttctggtactgccaaccttctggctgggagcgatgacgtgggcgggagtgagggttggcgtggcggttaatggcgcactggcgggtggggttaaggtggcgcaggatagtggggggaaggctgggggacggttgttgtaa

SEQ ID NO: 378114 - DNA, 258 bp, Salmonella enterica
atgaaacggctgatactgtccggctccctgcttctggtctgcatggcggtgatgttttatctggctgctgacaatacaccacagattaaccgcagcgacctgctgccctggcgcgtaacgctatacggcgtgatttgtggtgtgggctggcatctgtacgaccgcttatcgccacatcgtccggcaatccgccgtatcgcgctgatatttatcatactgattctgctcaacgaaatcgtaccggaggtgttccggtga

SEQ ID NO: 378115 - DNA, 987 bp, Salmonella enterica
atgcgcccggcattctgtcttttattcatcgcctttctcgccccggcggctgataaataccagtatcagcaacagggggcgatcagcgactggatgtattaccgcatcggcggcggtgcggccatctctccaccgccaacccggcgtaacacctttccgctaacggcaggcgtaagctggaacagtgacatgatgtgcggcaatttcgatattgataccacagtgcgcaatcaactcaacggcgtgacggacggcttccagcaactgatgggagagattatcgaaagcgcaaccagcaccagttcggtatccagcaacgactgtcagggtgagctgtgtcaggtatggagcaaacccgacgacgctgcacaatggctgacgcgggtggttggcgagcagaccattaacgtcgacccggataacgatcagtccggcgacactgaccagcaaagcggcgcgcaatccggcgtcgggctgacgccgctgattcaggaagagcaggataagatccagccgctgattatcgatatggtgaaccacagtcagcctgttaacgatgacacattagcccaggccagcggcggcgaactgcatctgacgcgcggcgtgattgaggcgttgcgcgatgatcctgatgcagcagtacttatccagcggctctccggcgaactggcgctttcccgcgtgatggagcaggcgctgatggcacggcgcacgctgctggcagggatgcgcgaacccaatatctccggtgagaaagaggcgcaaaccgcgctgactcagaccaccgcccagctcgaccaggaactgtcacagcttaagctggaactggatatgcgccaggcgctggcagataacgcggcgctcaccatccttgaacgccagacgatgcgcgcgaagaccaaaggccaggctgtcggcgtagaagacgacaccgacaaacggatggacgatctcagcaaacccactggcggggatacgcaatga

SEQ ID NO: 378116 - DNA, 933 bp, Salmonella enterica
atgaatctccaccggacattactttgcttactgataatgatgccgtgcgcaggtaacgtcatcactaccccggaaattgccgcctcagccctgtcgccgacgtgcgtaaaatatcaggtagtcggtgtctgctactggctgttctgcacgccgtttggctgctcggtgcgcacgtcggtgaaggtacgtcatttccgaccggatctggtggtatcagcctacagcgataccgggcaaaacccgtgggctgagatgtcgctactcagttcgccgctgcccggtatcgccgaagccggtggcgatactaatccccgcgccatcggccagcacagcaaaatccggtttaagaacgccgatgcgattggcttccctgccggtgatgcgctggcaaaattcttcgcccagtttggctacgtctgcaccccgtcgtcacagccttttctcccctactttctcagcacgctggatgcgctcgcctggcgcagcggtgtaccggagatgttctacccggaggcgttaacgcctgggctgcgtgaagtcagcaaagatggcgatatgtggggcaatatctacccacgagccggggcgctcagccagacgcatgactataaggccggagcggtcatcgcccaacgcactgccgatctggtaacgcgcagtggtcagccgcatgtttatattccgctgactgccacctcacacgacggatactggccgccggatccggtcacagaaggcgacagcagtaaccaccagtggcagatgctggttcccaaaaaatccgcatcctgcactatcttcccggatggctcttccaccgattcttacgccgataaactggcggaggatggcgcatatgtccggacgctgtggcggccctataaatgctgtccgcgtcgtgggcagacctttcttggcagtagcggaggttaa

SEQ ID NO: 378117 - DNA, 1293 bp, Salmonella enterica
atgttagagattaatccacatgaggcggtacagattttgccccaggatcgggagaaactgtaccacctggtctggcgcgagcctgcggagcgcatagctgcgcaatatggcatcagcactgagttgctggcaagacggtgcagtgaaatgcggataccgaggccgcttgccggttactggaaagcgctggcgaagggagctgcgccagccattcctgcgctgcctgctttgaaaaaggggaaggcggtaaagatacatgagaatgacagcccatcagtacaatctcccgccattacggcatccaaaccagattctccagtaacccggaagcaaactcctgttacggggaatggctatggcctgatcaatgatctcaaaacatatctgccaccctccacggttacagaagatggctattacaagccagcgaaaaagaaattactggatctcaacgtttctgatacgggatttgatagtgcaatagagttcctgagtcggttctttgatgctctgggaaaacagggatatcgggtaacgctggatactccgggagaaaggatgcatcgtgcggatatcgatattaaggaagatccaaaagagggagggtatcgctgggacaatttatggcggccttatacgccaagtcttatttgtgttggcgatatgcattttgcgttcaatcttgccgaaatgacggaatatgtaccggcgaagaaagtcaaaaatcgctatgttcgcgatgaacagatggcgcggtggatccgtggaaaaaacagtgagccttttcttcacgtctcgaagcatacactgcctaccgggcgatttttgctacagctttattcaccttattcttccgcaaaatggctggtgcagttccggcagacaaagcagtgtggattgattagtcagatcccgaaaatgatttcggcattgcagggcgctgttccgctaatttcaaagcagttagaagaggccagaatcaaagcggaggaatggcgcattcagcgggagcgggaacacgccatatatctggaaaaggagcgggttcgtcaggaagaggaggcttacaatgccagtcgcacggaactgaaatccattatggcgcagtgggctgaagacaaacggatggagcagtttttccgggaagcagagtctgatgcagtactgcttgatgagcagcagaaagttcaggttatggaacgtttgctactggcccggcagttcttgtcagaggatacggcggttgagcggttgctgaagtggaaaacgccgcaggagcgattaagcaaataa

SEQ ID NO: 378118 - DNA, 480 bp, Salmonella enterica
atgtcaaatccagcatatctttggctaaccgatgcaaatggctcccctataattggtagttctttagttacagggcgtattggtgccattgaattaaaagcggtaacgcaccacttatccattcctgtggatggaaacaccgggagattaacaggaacccgagtacatacgcctattactgtacagaaagattttgataaaacaacgccccttttgtacaaagcgctgagtgaaaatcagacattaaaatcagcaaccataaaaatgtatcagatccttgatgcaggtgttgaaagcgaatactttaatattattttagagaatgtgaaagtaactggaattacccccaacttattccccggttctggtacaggtacacacagcgaaactatccagttaagatatgaggccattacctggaagcattgcgatgggaatatcatttacaaggactcctggaatcacagagctacagcatga

SEQ ID NO: 378119 - DNA, 366 bp, Salmonella enterica
atgctaaggccgggtgatatgtctaaatttctcatccccattataaatataatactttgtagctatattgtcgctatatgcttaatctgcctggttgagtttgatacctggcaggataaaacaatcgctgttaccattacaatcggcagtgcttatatcatttctcttgtattgaatatgtttctacccaaaaagatacgtatattaggtgggattttcgatttactatcaggcccattattaattataggtgctattgcctgtatagctttgcttgacccatggcccatgaagcttattggaatgatcttgtgggtaatcgtaatgctgtgtataccttcgtttatagatatagataaggaataa

SEQ ID NO: 378120 - DNA, 675 bp, Salmonella enterica
atggcagacatagaagggatagctcggaggatatacgatatcgttgtttctcctgatacagttacaggacttatcaatggtggattatctgttcctttagattatggttatctgatttacggtatctttgatacggatacaagatatgaacgtgaaacagaaagaatccgtataatgaccgctataagacacgatatccttaactatgaaaacatcgttaacgcagttaaattaatctttcaattattcaataaatacttgtctgagccagagcagaataatgtttatagaagtgttggtacttccatagcaggtagaatagggacaaacacaattatttcttctatagctaaagcagttatagaaaagatttcatttacttatgttgtttttaaaggaaaaataaacccaataaccactttaagtaatctgttattatttggtggaatggcagaacgttctatcagagtatcagatagcctcagcaacgaagcaccagagatatacgaagttttaagaccccgcgactacgatctcctttattttctgtttgccgaagcggtgaaaccttttgttgatgccatccatacaggatatactgaaggcaggcccgtattcgaccggattatgaagagagtggaagaacgtttgagtacgaatgctaaggccgggtga

SEQ ID NO: 378121 - DNA, 300 bp, Salmonella enterica
atgccacccgaggaggtggaacaggtcagccgctttaaatctctgacgccagaacagcgccagctcctgctcagagccaccaaagcgccggggaaatataccgaaggcgtagtgctttcgccgcgtgtggaagcgctgttccgcgtggtctcccctgccctatggctggcgctggggatgacggaaaaacatgagaaggcggagcggatgcggattatgcgggagtttggatgtagtgagctggaggcagcgatgaaggtggcaaaagctcatgctattaccagcgacgtcacaacatga

SEQ ID NO: 378122 - DNA, 327 bp, Salmonella enterica
atgaaaaaacgcatcttcagatggctgctatggttcccggccctgcctgcatatgccgatctgccagagatggaagatccttcgcgcggtcagggcgacggcatcatggaaacgttgcagaactacggctatgacattgtgatcctgatgacgctgggcatctgcgccgtgggctttctggtggtcgccaacaactgcatcgccacctactctgaaattcagggcgggagtaagcagtggaaagatttaggcgccatggcgggcgtcggcgcggttctgctggtgatcaccatctggttgctcaaccaggcctcggacatcctgtaa

SEQ ID NO: 378123 - DNA, 210 bp, Salmonella enterica
atgacccccgaacaaatcagcaccctccaggccgccagcctggtgatgctcggcctgttcagcgcctttctgctgttgtgggtggtctgggtactgaatgatgcctatcggggtgtggcgacagcgcgggtgagctggcgggcgctgggcagcatcggcgggcgcaccatcttactgctgctggtcagcttctggctggtactgagctag

SEQ ID NO: 378124 - DNA, 309 bp, Salmonella enterica
atgaagtttttcatactcaccatagcgctattctttaccacagtaactctcgcagcccccctcaccgagcgcgaagagctcaccctgtccctcaaccagctaacccaaatcgaagcctcactccaccgtgcccaacaaagcgccagaactggtatcaacgagcgctactacttcgactaccctcgcatccacagcgatatcaccaccctacgcagcgggattgaaaattacctcacaccagctcgcgctcaaccgcgagatacagcgacgctggtcgggcaataccgtgaggagaaaaccacgccatga

SEQ ID NO: 378125 - DNA, 762 bp, Salmonella enterica
gtgaatgttatagtttacttatttgtcacagtatcaatagtttggtcttatatagcattcccatttaatctaacatcaccaattgccatgcttataagcctctataaatatcaattaccatcggtaacatggatagttgcatttatttatttgttagatttcattatggcaaccctaaagaagagctctccttatatgatagagttctatcgtggtgtaagaatagaatttattagcttggtgtctttgtttattttcacattgatattatacaatttatcctccatgaaatttacaaatacagctattgatattagtatggctggattcggttttttagtattcggaaatataggcacctttcgtttgtttacctataaagttggcagcagatcataccctaaaaaggtagcgttctttttatccctttttagtgtatcaacttctttttattttctttatctaacattcaaagttgcaaatggcgaatataatatagtgcaatcactttgggttcagataacagttctttcttattccattacattatatttctttgcaaagcagttatgcttttttatggataaagggcgtgcagaggcatcacctatcttactaagcatattaaaaaaagtaaggaataacaataacctttatgagcaaatggcatctggtactacactatttaatcaagaattaattaaagaacgggctactcacagccgagaattacgtcgaaaacataaacaaaagagaaaatag

SEQ ID NO: 378126 - DNA, 684 bp, Salmonella enterica
atgcccgagcatgttccgtcaggaccagtacgccgtcccggactactcggctggctcacattgctgcccggcgtgctggttggcttttgcctcggtgcatggatgctggcaatagcgctggagtggctgggcaatgcgttttactggcggaacacctgcgccagccacagtgaacaggtattgcaggcgacatggcagtggtggcggggttccgctggcgcactggtgtggttagtagaagatctggcgattgtcagcgatacgttgcagaaagggagcacagcgcttattgcttcgctcaacgggcagagcggattgttctggacggaggctatcaccactgtaatccgctgcgcgttactgtctgcgggcaatatcaccctcacctttctgctgcgactggctattttgttgcaggccctgccgctgtttgcgctgattatcttcgtcgggcttattgacgggctggtaagacgcgacttacggcgattcggcgcaggccatgagtccgggtttgtttatcaccacgccaggcgtatgatcagctccagccttgcggcaacggggctggtgtggctgacggtgcctttttttctcgtgccgggggttgtattagtgctgggagcgatggtaactggaataggcatatctgtggctattggtacattcaaaaaatatttgtaa

SEQ ID NO: 378127 - DNA, 267 bp, Salmonella enterica
atgataccccggacacaccgccagctcgtgagcgttgaagtgatgtggcctgcgcaaacgctgcctcttcccctgcaacaggcggtggaagcgctgacgcagggagaaacgcccgaccagattatcgcccgcatgaatttacagggctttcaggcatggcgcgaagctacgtcgccgcagggcgaacacgacatttttcaggtacgactggatgaggcgcacgaggcgcgattcctctgccgctacgttacgctgccgctgcactga

SEQ ID NO: 378128 - DNA, 795 bp, Salmonella enterica
ttggatgcgctgtctgacgctgagattgccgccgccgtgggtaactcgatgtttgccgatctggtcagcgtcgccgggcatatctacaagcacggcgtgatggatggcctgccgcagacggaagaaaaagcggccatcaacctgcattgtgatgagttcagcgagctgatgggcgatgaatttattccgctgatcaacaaaggcggcggcgcgggcgtgcaggtcacggcctacacccagacgctctccgacatagaagcccgcatcggcaatcgcgccaaagcgggccaggtggtcggcaacttcaacagcctgatcatgatgcgggtacgggaaaccgccactgccgaactgctgaccagacaactgccgcaggtggatgtgctcagcaacagcgtcagttccggcgttaccgacagcgccgacgctcagggcaatatcggattttccagcaacacccaggatcgggtgagcagcgtacaggtgccgctactggaacccgcctcactggtacagctccccaaaggccaggcgtttgccctgctggaaggcggccagctctggaagctacgcatcccgttaccggacgcagcacacgatccgctgatgccggaaagcatcacgcacatcgcccgctatatggaaaaacagtacgacagcgcgcccgtatggtggaaccgcccggagacagttgtaacggcgaaaaacgaccctattttatggctgaacgacagcgaaaccacggagaaacttaccgatgataccccggacacaccgccagctcgtgagcgttga

SEQ ID NO: 378129 - DNA, 1245 bp, Salmonella enterica
gtgaggctcgattttatcctgcgcccggcggtggagctttacagcgccagcgcggccctgctggcggcagtatggtgcgtggcggcaccacaaacactattgctgacgccttattcaggctggctgctggctctggcattgcttgcgctgtccgccctgcggctaaatcagggattacgcatcctgcgctttcgccgtcgcgtgcgtcatttgccactctggacgctctctgccagccgtatcccactgttacctgacgccttgtttctcgggcgcggctttcgctggctgcccacgcatacccagcggctgtatctgtgtcgcctgccacaatgtgaacactggctacggacggatcgtccttccgccagcggcggcgatccgctgctgcacggcgtggaactgcgcgaagaccgcgtcacgctgcccctgcgcgaccgaccgggacatacgctggtcctcggcaccacccgcgtcggcaaaacgcggctggcggagctgctgattgcccaggatattcgccgtggcgatacggtgattgttttcgatcccaagggcgatgccgacctgttgcgtcgcgtctgggcggaggcgcaccgcgccgggcgggaaagcgtcttctggctgttccatctcggctggcctgagatctctgcccgctacaatgccgtcggacgctttggccgtatctcggaggttgccagccgcatcgccgggcagctctccaccgaaggcaactccgccgccttccgcgagttcgcgtggcgcttcgtcaacatcatcacccgcgccctggtggcgctgggccagcgcccggattatgcccgcatcgcccgtcacgttatcaatatcgacgaactgtttattgactacgcccgcgtcttcctgcccggtcacgaccggcaggcatgggacaacgtggtacgaattgccggtggcatcaccgagaaaaacacgccgcgcaatctccaggggcgggacagctacgtcgtggcgctggagcagtacctttccaccacccggctgcatgatcagatcctcgacggcctgcgttctgccgtgcgctacgacaaaacctggttcgataagatcgttgcctcgctgctgccgctgctggaaaaactgaccaccgggaaaatcgcccaactgctggccccggactacggcgacctcaacgatccacgcccggtgttcgactggcagcaggccattcgccagcgggcgattgttggatgcgctgtctga

SEQ ID NO: 378130 - DNA, 408 bp, Salmonella enterica
atgaaacacctcattccatccatgctactgtttactgtcgccgcgattgccggtccagccgttcccatgcaggcgctggatgaggcccggttattgccggtcgttacccacaatctgcatcccggtcaacaaccccatctggcactcagcctgccggggatgacgccgctgtttttaatcggcgacgatccacagtccacagaatggctgcgccagcaccgggacgcgttaaaaactctgcacgccaccggactggtcgtgaacgtcgttacgctggcgcggttgaatgctctgagagccatcgcaccagcgttaacgctgctgcccgtcagcgccgacgatatggcaaaacacctgcccatcagcgcatatccggtgctgatcaccgacaaggggctggtacagtga

SEQ ID NO: 378131 - DNA, 534 bp, Salmonella enterica
atggcgtcccgtctctgcaccctgacagtcggcctgcttatcagcgctcacgcctgtgccgtgccgccgctgtatgcgcaaatcgcccgccagcagcaggttccggctgaactgctctacgcggtagcccgcgcggaaagcggcacccgtctggcgcagggactacatccgtggccgtggacgctgaatattgccggaaccggctaccgttaccccagccgttcttcagcctgccaggcattactggccttcgcccgcacccgcagcctgaaacgcatcgacgccgggctgggacaaattaacctcggctggaacgggcactggtttccctcgctgtgcgccagcttcgatccagcggacaatctcaccgtcaccgccctgctgctgcgtcagcactacaatgcctcccccggaagctggctggacgctgccgcccgctaccaccatcctgccggaggcaaacccgccgccgtttatcgccagaaaatcgaccagcaaatccggttactctctgtatcaggaacgtcgccatga

SEQ ID NO: 378132 - DNA, 651 bp, Salmonella enterica
atgcgcagatatctgttgctgtgccttctgctactgccgctgtttgccagcccgcagcaaacccgtattgaagaacaggccatcactcacacgcaggcacagcagtggggattaaccgacagcgaatggcagcactaccagcaactgcgtcagggcgagcgcggcatctggtcgccgggactcgatccccttaccacccttggcgtggaagccaacagcgacgccgaacgccagcgctatgctgagctgctggcccgtaaagagcatcagcgggtggagaaagagctggcgttccagcgtgcctacgaccaggcgtggaagcggctttacccgacgctgacgcccatccgcagcatcgtccagcctcgtctggcgctgttcgtcagcgaaaaatgtccggtctgcgagacgctggcgcagaagcttatcaacgacgaccgcccgctggatatctggctggtcaacagccgtaacgacgatgccagcctgcaacgctgggcgcagcgccagcatattgatatgcgcaaagtcgagcgcgggcagataacgcttaatcacgataacgggcgctggcaacgcctcggtggtggaaagttaccgttattgctggaacaacagggggagcaatggcgtcccgtctctgcaccctga

SEQ ID NO: 378133 - DNA, 609 bp, Salmonella enterica
atgcttaaacgtctggcctacctgactaccgccagcgttctcattctgctggcggcggcgatgttctggtgtttcaaccgcctgaatgccctgacgctggcacagcagcagacgcaacgccagataacacagtggcgcgaccagtcacaacacaacaatgattaccacgagttacaggctgccgtaaaagacattaccgggcgcacggaagcccttgccagacagcttaacgatgccgccagcgctcaggccgagcagcttaaccccattaccaaacaaatcaaggcgctggagggacaagtccagaccctgaacgccagttatcaacacctgcaacaacagaccgccacgcgcagccgcgccacggcaaaaagccccgtcccatctccgctttgggccgcaaaggcccctttttcttttattggcagcgagtttcgcgccgggcggcagttcgccgtcatcgccccatccggttatcgctcgctctcacagcttcagcttgctgcccccggcgacagcgtgcagggctggcaattgctgcaactggacggcagtcacgctactttccgtaaaggcaggcagcggctgacgctgaacaccggagagtaa

SEQ ID NO: 378134 - DNA, 465 bp, Salmonella enterica
atggcgcgaataacaggatgggttatcacactgctgatgctgggcggctgcaccgcgccgcaacagcccattgcgcctgcaccaaaacccgcaacaccgcctacacctgaagtggtgcgctatgaccgctacctgctgatcaacacccgccccgacgaagcccagcgcaacccgctgcaccaaatcgtcaacatcaacctgccgctgaacctgaagctcaccgttggcgacgccttcacctggctgctgaaacagagcggctacagcctgtgcatcaatgaccatcccacgcagtttctggcaggcaaaccgctgccgctttcgcaataccggctcggcccgatgcggctggaagaggcgctgaaaacgctggccgggccgggctggctgatgcagaccgatgcactgaaccgagaggtttgttttcacctgaacacgccgggaacgggagaccatcatgcttaa

SEQ ID NO: 378135 - DNA, 417 bp, Salmonella enterica
atgaacgagaaaacttacttcaatctgtacaccagcggtctgggttacgttaaccgtatccgtaccgtcaccccaaaacgcggcgagccctttttatgctgtgatattgccgcattaagcggggctgctgatgacgtggactatgtccactttgactgcaaagtcaccggtagcgaagcgcgtaagctgattgcccgctgcgagcaggcggtcaatgaaaagcgcaaagtgctgatccacttccgcctgggcgacttatacgtcgatatgttcacctacagcaaaggcgagcgtaaaggcgaaacaggcgtcagcctgaaagcccgactgctctatattggccttgttaaaatcgacggcgaagtcgtctggcaggccggaaatcaggaagcagaggcggaagctgatgcagcctga

SEQ ID NO: 378136 - DNA, 519 bp, Salmonella enterica
atgatgaataaccccataaccggctatcagtcgctggctgatgaagactataaaatgctggcttacgtctcctcgctaaaaggccttttaaagccttttaagagtaagggggagctggagctgctggagagcaatgcccgaagcgtgcgcgagatgatggagccattgatgcaacgtctaatccagagcgccagacgctaccctgtgcgccagcttccgctgatattcaccgtcggcccggccccctctggcgcaaacttcttgcgctggcgtaaccagcagaacaacaaacccggcaccccggcattcagcaacctgattagcgatcctaaaatcccgcagcgcgccagagatgccttactggaaatcgagcgggatcgcattgtgttcaatatgcagatgtcggtactgaccttcattatccgccaggcgcgggagtgccaggaaaaagtcgagcaggcggaaagactgcacatgggattgctcaccctgccggaaaataatgaacgcgggagataa

SEQ ID NO: 378137 - DNA, 699 bp, Salmonella enterica
atgtcggactacaccttcaacatgggtcccctgcgtagtgcgatccatattcagcttcatactcacaacgccacccggctgtggaccgggcgacgggcgaccgaaaacggccctgcgccaatcatcgggatgccgcgctttatcgaaatcctcaaccagatgcgcattgccgcagaacataacgatccttacgccgatctgtggatgctgcgtatggaagagaaactggtgcagtcgcgtaagttgatgcaagtgatgctggatcaggcgaaagccatgttcagcgaattgccggaaggcatcgatattgaaaactgcttcaatgttcagcctgcccgctttccgctgtttatcaacgctccactggcctatcagggcgtttatctgctgaccgacttcgaccagctcgcacgccagcttctgctggcctcgcatatcgccgtcatctcccgcagggaaatgcacaaccggttaaataatggcgcaacggttattcgcagcgccttcggtctggcgcagaaatatcacggctccgggctgactcgtcaggactttatcgataatacaccgcaggctagggccgccattgaacgtttaggcccgctaccggaagcgatactgagcggcaagctgcgctcatcgttttcatcaccattgcctggcaaggccgaaaaccccggagttgccgatgatgaataa

SEQ ID NO: 378138 - DNA, 1299 bp, Salmonella enterica
atgccaatcaaaagaccaccgccacttattccgtattcccaactcaccggggcggatctcgaagcccaccagcactacagccgcgtgacggacgataaaggccgctatcttccgtttgacgaattttgccgtcgcacggcccgtggagaaaatgtctctatcgcctggacgcttacacggcgggcgcgtgactcagccatgcaacggatcaattatcgcaacgaagcaggcgagcaagcgggttttgtccttacacctggcatcatgtcagtatgtgagctggtagataaacatgccacaaggctggcgctcaaagaacttaccaccaggctcaggggcgcaggtaaagagttaacggcattaagcctggaagaacccattacctcatcgcaactggaaggggctaacacaaccacgcttgtggcgcggaacatgctggaaagtggccgtgccccccgcaccgaagatgaacacatgatcgcgggtaatgcgcggttgatggccgaaataccggaacttattcaggagccattaacacctgacttgattcgccgcttccatgccgttggcatgggtggaattaacgacgaaaaataccgtcccggcgaattccgtgataccgatgatgtagtgatcgccgactatgacggtaacattattcatcagcctccagccgccgccgacctgccagaacgtctgcaaatagtgtgtgatttcgtgaacgacaccgaacactacgttcacccgctggtaaaggcctgtattcttcacttcatgatcgcccacgaacaccctttcagagacggtaacggacgcacaagtcgtgggctgttttactggtacatgctgaaatcagggtatgacgtatttaaatacgtatctatcagccatctgctgcataccgccccggctaaatacgctcacagttaccagtacacggaaaccgatggtatggatctgacgtactaccttgaatatcagaccagtattattcatcgggctatgacaagactcttacagcacgtagacgatctggtttcccgcgctgcacggattgaccattttttgtatcaatcagggagcttatcgcggctgagcgggcggcaaattacgctactcaacatcattctggcagagccaggtaagaaatattccgcagccagtgttgcggagatgctgggcgtatcggataacactgcgcgtaatgacctgcgaactcttgcgcgcgaaaatctcttaaccgagatatcagaaaacgaccagaaaacggtttatagggtatcccaggatctgagctaa

SEQ ID NO: 378139 - DNA, 2031 bp, Salmonella enterica
gtgaatggttatgctaaaaacacctatgtggatagtggcggacaggtttacgttaacgccggaaataatggcgttgaagatccagaacaaggcggccagattgtgaacgccactattggcgctgacggcctggtcattaatcgctatggcatcgacacaaatacggtcgttgaagctggcggcgaactggataccggctggaattacccttatgaaatccgcaacaccgctatttcccgaaatgccgttatacaaaacggcggcattcagcaggtcagcaacggcgggacaagcgagggtagttgggtagacgatggcggcacattaatcgtcaccagcacatggcactacaatgtcgtcaccgacactcagccttcggcctggtatcgcggcaccgctgatgacacttcggtttacggcgtgatgcaaaaccagggcggactcgataaaaacaccacggtgcagtccggtggacaatacgcattgggcggttatggtctctcccaccagctcaccgtagcacagggtggcagcgcccaaatcaatgatggtgcgctggatagcttctggctctatgggttgatggacgtcaacagccaggcaacactgacaggcacaggttcagtgggtagcagcggcgaactggtacttaacgagggcgcaaaaacttccggcctgaccttggcactgaatggcgtactttccctgcaaaacggcagtgatgctggtccgcataattatcagattactggtctggagatggatggcggtacggtgctatttgacctaacctccttcgccacactgagtatgaaaacactctctggcagcggtaatttctggatgaataccaatatcgccgcacagcagagcgacatgattaacgtcaccggggaagccaacggtgattttgggatctggattaacgacactggcgaatcccccacaaatccgcagtcgctacaggtcgtacagactggcggcggcgatgcgcagtttacgctgttgaatccaaaccagcaggtagacatcggcacctgggaatatggcctcactcccgacggtcagggcaactggtcgctgacaccccaggaaacccccactccatcgactgaagccgtactggcgatggcaaacgtcactccgaccatttttcaggccgaagccagtgcgctgcaaacccgcctggacgttactcgttcccgtccgcatcagggagagctgtgggcgcaggctctgagtaatcgctttgacgttaaccgcacaggcaatgcagcatatcgccagcggctcggtgggttaatgatgggttatgacaaaagcctttcccgtcagacaggtttgctgacgttcggcattgctggcggctatagccgctccgatcttgatctcgccaacgacagcgatggttcagtagacagctacagcgccgccgtatacgccagctattatgatcaaagccgtttctggctggacgggatgctgaaaggcaatctgtttaaccagcatcttaatgtccgcatgagttccggcagccatgctgacggcagttacactatccccggtatgggtggcagcctgattgccgggtatgacgccagatttgccaggaccaccctttctccctttattggtttcactggcttcatctctcaaagcgatgattacaggttgtcgaacggaatgcaggcgcatcctggtacggctaaatccgcgctggggcaagtcgggttccggctgcgccagaatattactactcgcagtggtatgcagttcattccgtggctgaaagtcgcgatggagcatgagcttgtgcataacaacccggtcagggttaatgatgataatttcaataacgatatcgccggaacacgaggaaattatcaggctggcatcagcgccgctcttacgcaacacacgcgtatttacgccagcataaatacgagaaaggtgatgggatggaatcgccgtggaccgggaatgcgggttttagctaccgcttctaataacgccgtaaagcttcagcgataa

SEQ ID NO: 378140 - DNA, 186 bp, Salmonella enterica
atgaaactcgccccttacctgataacactaacgctgccatttatctcgttatctgccagagcggattaccacacccaaatcaacgccggaaataccgtctctggcgatatcgtagatggttcaaaaggtaatcaatatgtctacggcatactgaccgattcaacgattacgggcacgcatgcctga

SEQ ID NO: 378141 - DNA, 2226 bp, Salmonella enterica
atggcgaaaactaatttcctgattgggcgcggtgaattattaaccaatgatattcccggtcccaaaagagccccagggaaagctgaggtttactctctttatgaatcgaaacaacgcctgttgccacaaattgcatctactatcgaaaattttgccaagttacccagtcgggcatgtcctgatgattatgcagtggctaaggtgactataaatccaagctatattgcacgatccttttttcctgcgaaaatgcttaaatctactggattgacgtcaattggcagcaggacggttagagttacgccacaaagctggaagcgcaaagttgctgtgtcagaggttactacgacacagatgtttattgcgggtaaaagaaaatcattcgaagagttacctcattgggtgtccgggcttaaagaattaactgatgaagcgattgattttgcacgcatagaaaagtttgaagcatatttgcctgaagagcgtattgttaccgcaggtgatatggattcgtcgtattttgaggttggtgtacatctgctggctgaagatgggcaagatttgatccagcaacaatttgttcggttcgcgtcaactctgaacatcaaggtacatacctctctagcttttaccgccggtacgttgtggttcgtgccaatccaggcagatcgaattgctatagataagctcgcaaaatttacattcgtacgcgtaattaggcctgtacccaaattgcgtggaattcggcctatacaaagggcttctggcccattagcccaatgtaaattgcctgctgaagggccagtatcttcagaaataaaagtcgctattcttgatggtggtttgccatctgagcatgctatatctccgtggttaaaatcctatagagttttggacgaccatgcagaagatgatcctgacggtttagctcatggtttagctgtatcttcggcttttttatttgggccaattaataacaaatcagaggtacaaagaccatactcttatatcgataacttaagagtattagacaataagacctgccaagaggatccactggagttatatcgaactttgggctttattgaagaagtattgttgtctcgtcagtatcagtttatcaatctaagtttaggcccggatctgccaattgaagatacggaagttcatgcttggacctctgtaatcgatgatttattaagtgatggtgagacgctaatgactgttgctgttgggaacaatggcgaaatggatcgtgagtcaggtaatgcaagaattcaagttccatctgattgcgtgaatgccttggctgttggggcttgcgatactgttaatgaaactgaatggaaacgagctccatatagtgctattggaccgggtagaagtcccggcgtgatgaagcctgatttagttgcgtttggtggcgacatagacgagtacttccatgttttgggaaaaggtaaaaaacctgtaatcacaccacaacggggaacaagttttgcttctccttacgctttacgtgcagccgttggtgttcgggcgattttaggaagtgatttaagtcaattggcgataaaagctttgttgattcatgcttcaaaaccgcttgatcacgcctgtgctgaagtgggttgggggaaactacctgaggacttaaacgacatcattgtcagccctgatggtgttgctcgtatcgtctatcaaggtgaattgaagcccggaaaatacctacgcgcctctcttcccattcctgaaggtggcttgaaaggtaaaataaatttaacggctactttctgttatgccacaacaacagatccgcaagattcggcttcctatacaaaggctggccttgaagttacatttcgcccaaatgattcaagagttaaagatggcaaacagaatgctgaaactaagggattttttgagttagccaaatactcaactgaaagtgagcggcgctctgacatgggaaaatgggaaactgtgttgcatagttcaaagaacatgctgggatcaactttaaaaaatcctgtgtttgatattcactataacgctcgtgaagcaggagccagcatagcgagtcacaaagcggaaaagataaagtacgctcttatcattaccgtgaaggcagcgaaacaccaagacctgtataacgaaattttgcgtgcttataatcaggttctggttccaattcagcctcaaacttccatcccaattcgttcataa

SEQ ID NO: 378142 - DNA, 1134 bp, Salmonella enterica
atgggcgacttaagtggtattcagtcagatttagcccagctagttagactggtaatagctgaacaatatgatgatgttcggttgtatgtcgctcgcttggtgcgcaaatatcgggaaactatgccagctctatctgagcagcttgatctttatttacggaataaaccgcagaagccggtacaaggtctgcgtaaggctacgatgccaaaatctactcagtctcaggtcatgcctgtggacgaggattcaaggttaaccttacttaaagcgccaaatgaaaagataaccagtaagccactgctttctagccagatagaagactcactggatcagattattcttgagcgtaagcatatcgaccgtcttaagacccttggcttacaaccaacacgttccgccatttttgttggtccacctggtgtgggtaaaacgcttacagcaagctggttagcacagaaattaggtgttcctttctacgttctggatttaactgctgtaatgagtagttatcttgggaaaagcggaaataaccttcgagcagctcttgatttcgcaaagaaagggccgtgtgttcttttgttagatgaaattgactcaatagcaaaaaagagaagcgatgattctgatgtgggagaattaaaaaggcttgtcactgtaatacttcaagaagttgatgaatggccttcttcaagtctgttacttgctgcaactaactttgctgagttgattgatccggcattatggagacgttttgatttggtcctcaattttgagaaaccaaatagtgaaagcattaaagaggctattaagcgatttttaggccccgactacgcaatttttgcacgttggatagatttgcttgtcatcatgttcaaagatgaatctttcagtaatattgagcgttctataaataaattccgtcgttcagttgccttaggcatatcttcagatgaagagttgatagaatctttcattaaagatggtttatcagaattagaaagaaatgaacgtattgagatagcagttaacctaaacaggcattctaaattatcccaacatgccatatcagatttgactggggtcagtagggatacaattagaaaatatagccccaaaaaatctaacgcagcatag

SEQ ID NO: 378143 - DNA, 1485 bp, Salmonella enterica
atgaactcgaaactgacgtcgctggagcttcagtcccgcctgctacagggcaattttgatcgagaacgcttacctgacgatcgctttgccgaaccgctgacggaaaccgcaatggtcgtgacgctggagcagcttcgcccctacgatctcaatccccggctgatgcgtaaccccaattacgacgatatcaaagcctcgatccgccagcgtgggctggacacgccgccgccgatcacccgtcggcccgatcaggactactacatcatcgccaacggcggcaatacccgcctgtcgatccttaatgagctgtggcgcgaaacgcacgatgaacggttctggcgcattcattgcctgttcaagccgtggggcgggacatccgagcagcctgtattgggcgaactgcgctgcctgatcggccatctggcggagaacgatctgcacggcaaactcagctttatcgagcgagcgctggggatcaataaagcgcgggagctgtaccagcaggtggaagagtgccaactttcacagcgggaactggcagagcacctgagaaacgacggctacccgatccaccagtcgcatatcagccggatggagcagacgctggagtatctgctgccctgcattcctgaagtgctgtacgccggaatgggccgtccgcaggtggaaaaactgctgtccctgcgggcagcggcgctgcaaatctggcaacgccatgccaccggggatacaggttcctttgagagtctcttttcctctgcgctgtcgctgttcaacgatcagcctgaagacttctttatcgaacgggtacaggatgaactgctggggctgatgagccaggcgctgaatgttgattacaacctgctgttgctggacgtcgatccttcagagcagaagcgccaggccgtactcggccccacgccggagccgccgccttatgtccctcccgatgaacccgaaccgcgccctgctgcgcgcaggcgtaaaccagacgaaggcgaaatgcgtgggggaacggttattccaccgccggagtcaatgccagatgcctcgccgctgtgcgaaggcaatgaacccattacggatatctggcgtatttcaccgctctttgactcaaccgaagccttacagtcgataagcgatcggctggcatgggatctggcagagtgttgcggtatcgaagatcgggttatcgcggataacgatgaagtcggcgttgggtaccgactcaatacgcttgcttctgatcaccctatgtattcccggccacagtcccgcgcctgctgggcgctgctggcggcactcgatgatatcccactgacagaagatctgtccgccgcactgacgcccgccctgtttattcaacgcgatgcgggcggcttcttcttcagcgatctgtttcttattaaagcattccggctgatccgtattgtccgccggatcagagaattacagcaggaggcacaacatgctgccgacgattaa

SEQ ID NO: 378144 - DNA, 1356 bp, Salmonella enterica
atgagtaagcgcaagcggccacaaccgccccactccgtcgaagcggaacaatcggtgctcggcgggctgatgttggataacgatcgctgggatgatgtcgccacgcagatttccgcgcaggacttctttatctccgcgcaccggacgatttattcccatatgcaaaccctggttgaacagggaaatcccatcgacctgatcaccctgagcgaaacgctggaacagcaggagcaactcgaacaggtgggcggtttcgcctatctggcggagctttccaaaaacacgcccagcgccgccaatatcattccctacgcgcaatacattgccagctacggtgaactgcgccagcttctgttattaggcaatgaactgagcgatatggcaggccagccgcgcagcaatgtggccgatgtactgaactttgccgaacaaaagctgtttgccattgcgcagtcacatcaggaaggcggcctgaccgacatcaacgcttgctttgacaacgtgctggcaggcatcgctcagcgctatgaggccgaacgcggtagcctcagcggtacgccatccgggctggaacagctcgacgccctgacctgcggcttccagcctgccgacctgattatcgccgccgcacgcccttccgtaggtaaaaccgctttcgccctgacgctgtgcgtcaacgcgctaatgctcctccccacccagccagtacaaatctacagcatggaaatgtcagcagagcagctactgctgcggctggtttctctgattggccgtgtctcgcagacccggctacgcagcggcgatctgagtgatgacgactggcagcagattggcctcagcgccagtatcctgatgaacgagtggaaagatcgtctgctgctcgacgattccggaatcctcaccccatccctgctacgcagtcgggccagacgatcgctgcgccagtacgggcttccctcgctgatcgtggttgattacctgcaactgatgcgcagcggcggagcggagaatcgcaatcaggagatctcgacgatctcccgatcgctgaaagcgctggcgaaggaactcaactgcccggtactggcgctgtcgcagcttaaccgggcgctggagtcacgccttaacaagcgcccctgcaatgccgatctgcgtgattccggttctatcgaacaggatgccgacgtcatcttattcctctatcgcgatgaactgtacgatcccaacacgctggatcggggcattgctgaagtcatcgtcagtaaacaacgcaacggcccggtcggcacagtgcgcacgcgatttatcagcgatcagactcgctttgaatcgctcgccctgcgaggaggcgcgtcatga

SEQ ID NO: 378145 - DNA, 498 bp, Salmonella enterica
atgctgacggaattaaccgtcgaagcggcactcaatgcggaattgactgaccatctcgggcatgagaaaaatgcgcccaaaacaggctcaaacacccgcaatggctatttatcaaaaacgttgctgtgcgatgacggcgagatagaactgaatacgccgcgcgatcgtgaaaacaccttcgaaccacagctgattaagaagcaccagacgcgtatcacgcagatggatagtcagattttatccctctacgccaaaggcatgactacccgcgaaatcgtcgccaccctcaaagaaatgtacgacgcagatgtatcacctacgctgatatctaaagtcaccgatgccgtaaaagagcaggttactgaatggcaaaatcggcaactggatgcgctgtatctcattgtttatatggactgtattgttgttaaagttcgtcagaatggcagtgtgataaacaaagaaggccggactcgaaccggcacgtatttctacggttga

SEQ ID NO: 378146 - DNA, 909 bp, Salmonella enterica
atgaaaatgctattgctaagcgagctacgtcctgcagacgtattgcttttctcgcctgaaaaaaaaagttttatttcatgggccatcactttcttaaccgatgctcctgtcagccatgctgcactttattttaatgaggcaccccccactattattgaagaaacgccgccgcaggtttctgaaagctcagcacaaaaacgttttcatggccgcaccatctatgtttatcgccataccagcacctcgccgcttaatccggttattaatgccgccagacgacacctgaataatcaggagccttacgatcacgccgggctctatatggttggcctgctgctgatgtataagaaattctccattagcagccagaaacaacaggtgataatccgaattctgaaaaagctcacggcaaccattacccactacattcaacagcatcagacaccgggtaaacacccgatggtgtgctcgcagttcgtcgcccaatgctttgacgacgcgggtagcccattccgcctgcagttccgccagacctctctgacagactccgcgtttggcgaaacgttgttagataaagcaactagttggatgaagcagcatcagccggttttctccgaatacgatacggcaagcgcgccggaaaccgccagcgatgaagcgctgtgcgaagcattgcacgatgcctttttggataatacaaatcaaccagccccttcgatgaccgaggcactggcagaatctatttatcagtttgccgaagcccatgctgcactgataaatattgataccgcagaaaaaaattatcacccgctgactgctctgcaggcgaataataatatgtttgtatctccgggtgatttaatgcgtgcttacagtaacttagtcccggttggaattgtcatcatttaa

SEQ ID NO: 378147 - DNA, 2298 bp, Salmonella enterica
atggatgaaacacatagcgacaaccaacaatcacatattaatgaatcaagccaacaggttacctctaccacaacaactatttcaatgaccgaagctgccccaaggctaagcgcggcactggataatgctggagaagtgccaagttttgccgatcagctttatgaaaaaatcacctcggttatcggcggaaataaccctaatcaatttttctgcatgagccttcccggcatgcaaattgataaaaatctctacagttacgatattgaaaacaaccagccgaaaccgccgttagttgaagccaacgaatcaaagctggttaaccggctatttgatgcctgtacgatgaccggctctgacaatggccgtcacctgcaaacgcagtataaaagtgcgctggatatgttgacgccgcagctgaatggcaagctgtttgatgcaaaatcaaagttgcgtaaagttctgatgaccccctatccgtataattttggcgacgggttaaccaccggcttcacgcttcagcaggtcttctaccgcttgtatagcgaatacgttgatgccaaacaggcctgggccaaagttcagctagagaaaaaagccgagctggatgccaaataccccggcgaaacgaaggaaaccaatcgcagcaaacaaaacgactatctcgactggtatgagaccaccgccgagtctcagttgctgaaggtgcaagagaagctggggaaagtgctcaacgttttctcaccgggcgatatggagattattaccgggatcctcgacagcggcgcagggcgtgaaattgccgaggcccggcaaacgctggctaacgtacaaaagctcaaccccgatggtggatacgtctacccggtaacgctgtatccggaaaactggttcaacctactggatacgtcgttcacccctatcgacctgttagaaagccctgcggcgctggcgcagcagctctccgtgctgttggtgcagcgcagcaatttatccatgacgatcgactcgttcctgaatattcttcctgacccggcgatgctgaaagatctcaaggataagcaggacgctgcgaagaaggagcttacaacggctcaagaggcagtcactaaggtctatagcgccatcacaaacgataccctaaagctggttgtcgatattgttgggcgctccaatgataaggacaaaagcaaagcgcttgcgggtaccacgtccaggatcctcaatgttgatccagaggtggcaggaaaagtcattaccgcattaacagacaacgccagcaagtgcatgcaggcacaggacgaattaattctggctgcccaaaacgccaccgaaagcgcaatgaagtatttcgaggcaaaaaacctgactcagtacaagtcaatgctcttaccactgcagacacagcttaaaagaacggaggacgatattgccgcagtacggcaacaaattagcctggcgtcggtgatgcagcaggccagcaagccaatagatggcagcgatgtcacgccgaacgctgtgcctaacggtttcactcaggtattgattgagtcaacgatggcgtcggtcagccagaaatctagtagcgccagctcggcctctgagtcctcgtatcgctcatctttcttcttcggcggatacagcagcagccgttcgcaccgggagtccatagacagccgcgagtccgagaccagaaatgtcaaaattcagattgggatgtcaattgcgaaggtaagcattggccgggaatggtttaaccccggcgtattcctgctcaccaaagatatgtacaacacgtccagcaaaaaaatcgccccgaatcaaaaaggcaaaccgttccaggaaacgcgttttaatgcaatgaacgactgcgttttcccgtgcttcccggttgcatttatcattgcccgcgacgttaccattaaattttcctccgaccaggcaatgtcgagcagctttgcccagagtgtggaagatcactcttcgagcggcggcggcttctttatctttggcggcagttcgtcctcatcgtccagctccgctagtagcaactcgcgcgcaacctcttcggcaaacagcgtcaccgtacgctttaccagcccgcaaattcttggctattacctggaggctacgccggcggacgaaagtatgaccctcagcgaagtgcgcaacgctaacggcgactacatatcaatcctggatttcattaaaaacttccagtccatgctcgacgactacaacaaaacctataaccgggagaccctgcaaatgtacatcccaaggaacgaatccattgagtaa

SEQ ID NO: 378148 - DNA, 642 bp, Salmonella enterica
atggtaataggtgaacagtctgcccctctaaaccagaagtctgttcgggataaaattagctgggaggagatcgtcactgctgccagacggctacaaattgagccctgtgcgctacaggcagtttgtaccgtggagtcgtcagggcagggctttctcccttccgggaggccaaagatcttatttgaggggcatattttctggcgtgagctggcaaaacgccgctatcaacccgagattcttgctgccagctttccctccattatttatcggcaatggacggcgcagcactatctgggaggagagaaagagcatgcgcgtctggagacggcaatgagcctccaccgtgaagccgcgctctgctctacgtcatggggtgcattccagatcatgggatttaattttgccttatgtggatttcactcggttgaagattttgtcgcggcgcaaagccgcggcaatcatgagcagttggaggctttttgccaattcatggcgacgaataatctcaatttttatttgcaaaataaagactgggtcagcttcgccaagcgctacaacggcccgggatatgcacaaaatcgctatgatttaaaaataacagacgcctatcagagatgcttgcaaactcagttaacgagctga

SEQ ID NO: 378149 - DNA, 1131 bp, Salmonella enterica
ttgaataaaaaaatgctgttcatatacctgatactgttcatttcaacatcccgggctgcattgccacttcctctgatgctgatcggaagtggtgacagtattcatgtccgggcctggccagtaatgccaccgttaccggaacccgccggtctgcgtccctgttgcgcgtttggctataacctgcatgtggaggtgcttaaaattccggtgccattctggaaactggataatatcgtggcggcaggtaacctaggcagacaccactataatgacacttttctgttcggtctgagttcgcttgttgggttcggcagcgagcgtaacggcataatttacacgtcgcatgggggatttatagataccgcgcatgtacgggacagtgccgatatgacggtctggctcttcactcacctgttaccggaacttgggcaggcattcatgttgcgcccggaggatgaactggtacagcgccggattgtattcaggtcttttacacccccttcatcccctggtgaacgttatgcgctggctgcatggatggcagcatatatagccttccagctggcagtatggcacgagatagcccagtggtatggatttgaatctgtaccgggttttccggaatccatttccgcattctcaccggaggatctctattcaaatctgctgggaacgaggcttgccgtatcactgattctggacgggcagacagcaacgctggatatgtataatgcagcaatgcagaccgcactgaaccaggcattaaatcaactcggtgccagacctgagaacatcacccgttttcattttgacatgctggatggtcgctggtgggacagccaccgacggataccggaaaaatttctggtactgcgacgaaattatgatgtcagtgacagtcgtacacccacaaaagttccgggagaacaggcatcaccacagcgtctgactttgccacatgaccggaaaacatatcggtttgatatgctggagcagttacagctctggccggggcatgaaatggctcgtttgccggcaccatatatatattatacagcaactgattttcccgtcctagcagggttttcttttgaacaggatcaggctcgtcatgacaagaaaacgtggtga

SEQ ID NO: 378150 - DNA, 1125 bp, Salmonella enterica
atgctgaagtcttatctggctttgttcctgattctggtacaagagtctgtatgccaggcatggtcactgccatcatatgaacaactggataactggctggcccgggcaggaggtagtactggctccggtacccgctggaatatccttcccggaccgttttacacgcctgaactggggccggggatagggggcgctgtagccggtcattatcgtccctcctctgatgatacggtgagccagaactccacgttgtcgttcagcggctatgtgagtgccacaggagccgccggaattaatctcagcaattatgcttttttcgcacaggatagctggcgtttttttcttgatggctcggtgagcgatacccctacatattattatggccaggggttttatgccgaagaacgtggcagtcataaacagaagtacacctcacaggcgttaactcttcgtcctgtgatatacaggcaactgactggtcatacgtatatggggctgggctgggttctggatctgcagcatgccgcaaagtctgataacagtggaccattgcttattgaaaatacaccgcagggacagtcggtattcagctctggtgtcagcctggtactgaccctagatgaccgtgattttgtgccaaatccccgtaccggaaaactggcagatatccgtttaacccggtatacaccggaaactggaagtgacacgcgttttgatgaatacacgctgcactacagtcgatatcattctctaagtaataaagacgtgctggcctgggagctgaatggcgattttacccggggaaatgtaccctggaatatgttgccgttactcggggacaaccaccggatgcggggttactacgaagggcgttatcgcgacagaaatgtcgtcagcgggcaggcggagcttcgtcacagactgacctggcggcacggtattgtagggtggctgggagccggaaccatggcgccttcgcttcatgaaacaggtcacagacactggctaccttcagtcgggattggttaccgttttgagttcagtccgcgtatgaacgttcgtcttgattatggtgtgggcagaggcagcagcggtttttattttcagacaggagaggcattttga

SEQ ID NO: 378151 - DNA, 1008 bp, Salmonella enterica
atgaaaaaagtacagcttctcctgatttgtctgtccgtttcaggtaccccggcagcatacgcaaaagctttgtcggaaataaataccgaaaccattaatcctgtacctgttgagtccgttgctcctttggcttccgatgacaattcattccttccattgctgggagatatggcaagagctcatggctacgacctgcctgaaccttttggcattaatgttaattatatgaatatgcgtcagaatattgatgttgacagcattcgcttttctggacttggctggccgggctacgcatttccttcagatctgtttaatattcaggccagtcatacacgagagcgcagcatcacaaaaacgatcaaactggatacctggctgtttccctttatgaatatttacgctctcgtggggaaaacccgggggagttcgcattccaccgtttctgttgatgccagccctgctaatggattcattggacctcttatacatgcaatgaacgaatcaggcgaactgaaaaatctggatttcagtctccgttttcacggtaccacttatggcgtgggaactgtgctggccgggggatatggtaactggtatggcctgatggatatcaactatacccgtacagattttaacattcttgacgggcacaccgatgcatttacgctcactccgcgagtggggtaccgtttcaccacgccgggcgtcgacagtctgtcactaccttccggtaaactgggggtgtgggtggggactatgtaccaggatgttcagcagacttttcgcggaaaactgagtgacctgaatataccggcaagtttcgggggactgatggcgcttgcagaccagaatggcaacgggcgttttgaggttaaacaacatctgcattctccctggaatctccttgtgggggctaattatgaaattacccgcaacgttaatattacaacggaagtgggatttgcggaacgtaacagcgttcttgtctccgctgaataccggttctga

SEQ ID NO: 378152 - DNA, 312 bp, Salmonella enterica
atgacaagactgaataacatatatttctcacttctggatatacaagaaacgccacctggcgaaagtaaaaaagaaaaaatactttcacttattaattatgtggagcaagtaaacaaggatataaaaattctgcacagtaatcttaaatatccatatctgaatgaaaataagattattcatacgttgcttgaaattcagatacagaccaggctaatgcaggttggttgggagaagagatttcaggaaattgccgtgcatctatttaatattcgagtgctggcagagaatgcattatcttctatgaacttttaa

SEQ ID NO: 378153 - DNA, 543 bp, Salmonella enterica
atggcaaggaatagtctggtaatgaataaggcggaacagcagaagagaataaagaagatactgctctacgcagctaatgaagcggtaaaggttggtgtgattcccttaatgttcaaatatctaagaatgacatctgaaggatacgcacaaataaccgtatgcgataaacccacaatcatcaactgggtatataacggacataatgagtttagggttagcgtctggtgggattaccagccggaatatattcccaaactcataaaaggcaggcctgaaaatcttaagttactattgcctgatgtagatcgcactcgttttcgttttatcgttggtgcatgtgtaagtttttattttgattatctacacaagggcatattgtcagacaaaggtaaagatttttttgcgatttatgttcgcgaatcttcagtcaactatatagataagttagaggacgttaagccgttcggctataccgtatctgagttaccccgaccactttatagaatgaaggtatctgccactcaaaatagcaagagaaactga

SEQ ID NO: 378154 - DNA, 360 bp, Salmonella enterica
atgacaagactgacagagatatacaaccgccttgacgtcatagacgatcttatagaactacaaaaaccatatttttttcatggtcaaattatcatcgatcaggttacggaactgattggctatgtggagcatctaaccgccgttatatgggagcggcagcggcggcacaggttaacggattttgaagtacgttatattcttccggcacttgatgagatttatatccttatgggtgaaaaactgagcaagggggaaaaacccagtgatcggttaagtaacaatataactgatttcatcggacttgttggctggtggatgcttcatatagagaatagcagcacggggagagttagccattga

SEQ ID NO: 378155 - DNA, 207 bp, Salmonella enterica
atgaaactatcggaacaatggccgctctatgttaaatgggttgttgtatggctggtgatcctgccaatgattcttcaccatgtagggtgtttcggtacgttcaattattcattgttttgctctatatcgcttggcatcggctttggtttatgtgtaccactggtggatcgcatgtttttcttcgtctgtcagcactggagacactag

SEQ ID NO: 378156 - DNA, 369 bp, Salmonella enterica
atgataaggcttattgaaatctattcccgacttgaagctgttgatggttttttagcgcttatgttgcaacagtctgacaattacagcgagcggataataaaagatcgcattgccgggtttgttgagtacattgatcacatttactatgtgatatgggggctgcaggggcagggcaagctttgtgatttcgacacccgttatatattacccgccatttctgaaatatggttgcaggtaaagcgggaactcacatggaatgacaggtcatactatgagctggccaggagcattacggagctaattagcctggtgagtttttacctttcccgcattgagggtaacaacgataaaaacagggtactgcattga

SEQ ID NO: 378157 - DNA, 243 bp, Salmonella enterica
atgaaaataaattacttcagctttatcccgctgtgtatggctgcagcttctccggcttacgcatttaaatcaacggtacagcaaaccactacagacctgcgccagcatgaagaccagctgttgagcaaattttacagcgccacgcacgaagatatgcaaaatctacctgtcggaacctgtggtgtcacacccgttcccggctgtcagtgcgcatggtgtagtgctttacgaaacgcgagatga

SEQ ID NO: 378158 - DNA, 585 bp, Salmonella enterica
atgtatagcagtaatccccttaccttgttgttttctatactcattgttttcggcatcattgctctggttttgcttcagaatcccattctttcatgcgctgttatttccagcttgattatttcctgctgcaagccatacgctcacttatcttttactaaattccacgaacagcgtatacccactatgaagccacaatatctcagagtcaccattctggccattttactttatatcttcacgtcccccggcgcgatggctgattatgaaggatgcgaatacaagcgtcagcaactggagcatcaactggaatatgcgctgtcatataataacgctcaccgggtggccggtctacagagcgcacttcgtcggattaatgaatactgtactgataagcggttactgacgcgaaaagaaaataaagtcgctgaaaaacaacgaaaggtcacggagcgtctgcgggaactggaacaggtccgggcatcaggaaaacaggaaaaaatcatgaataagcaggcaaaactggatgaagcccgtgaagaactggcagaagctcgccgtgaacttcccagtcgtccagtacagtaa

SEQ ID NO: 378159 - DNA, 771 bp, Salmonella enterica
atggaatatgtggcgtttggtgatgagagcggtacaacggggagtgaccgttgttacggtattggcttattgtgtatacgaaaaaacacacttgttgttttcaatgagcgtattcagaaactgaaagataagtacggtatagttggcgaattgaaatggtctaagattaaaaacagcgccgggcaagcaaacatatgtcttgaattactgtctctggtgctaagaaattcatgctgttttcactctatcattgtagtgaaaaatggttataacaattggcaaacaaacagggagatggcgttctacaagacttacacactgcttgtaaaaaatgtggcgcgtcagcttaaaagtccacttgaggtgattattgatcaaaaaattgataaatataagaaaaatgatgaggttactggcatcatcgccaacaatatgttggctaatgctggtataggtaagctggttacgtcagtaactatgcatgattccaaacattatttgggtttacaggtggtagatatcttaacaggggctgttaactccggttatcttaaatttctcaatcctcagttgcagttatcggtagcaaaggaaatagcattcaaacgaatggccgccatgcttgggtgggacgcttttcactatgacacctaccctaacaaagattttaacatctggcattttcctcctgagatgcgaggtgttccgggatcgatgcgtatcagaccaaattacggcgtgccgttagttatgagggatgagctggcttaa

SEQ ID NO: 378160 - DNA, 726 bp, Salmonella enterica
atgaaaaaaataatgatggttgcacttgttagctccacactggttctttcagggtgcggtgcaatgagcacggcaataaagaaacgtaatctggaagtgaaaactcagatgagtcagaccatctggcttgatccttccagtgagcgaactgtctatctgcaggtgaaaaacacctccgataaggatatgaacgagttacaaagcctgatagcaagagatattcaggcaaaaggttataccgtagtgacgtcaccggataaggcttactactggattcaggctaacgtgctgaaggccgacaagatggatctgcgcgagtctcagggctggctaaaccgcggctatgaaggcgctctttccggggcggcgctcggggcaggtataacagcttataactcgaactccgcaggagctactttaggtgttggactggcggccggactggttggtatggctgctgatgctatggtggaggacattaactatacaatgatcaccgacgtacagattgctgagcggacgaaagcgaccgtcacaacggataatgtcgcagcgcttcgacagggaacatctggtgctaaaattcagaccagtaccgaatccggtaaccagcataaataccagacccgtgtggtatcaaatgcgaataaggtcaatctgaagtttgaagaagctaagcctgtactggaagatcaactggccaaatcaatcgcgaacatcctctga

SEQ ID NO: 378161 - DNA, 213 bp, Salmonella enterica
atgtcgggtctggctggctcatttcccattataagggggatgaataaagtaacgggggcgggaaaatatattcacaatggtggtaacggcaattgtatcagtagacatgagcattcactcgcgttgatgtgtcatgccatcagtaagattttgctggacgaacaatatctgctgtttatagagtcaggattttgtatgtgcatacacttttag

SEQ ID NO: 378162 - DNA, 816 bp, Salmonella enterica
atgacggcgtataatatgacagcggcccggcaggtcattattcacggtgactgctggccggtggtgagtgcagtgcaggcagtggtcagggcgatgcaccctgaatgtcgttgtgacattgcagagtccctgccatgcctgcttcagcgtctgacaggcgcaccggaggcggtattaatcctgtgcctgcggccacgggagcatatctaccttttctatgccctgaaaagtctgcttctggaccatccggtactggtcatcagtgatgagctgttgttcagtgaccggctggttctgcgctgctggggagacattctctgcgccccgtactgtgaaattcagaccatcatatcgggtctgcagaagtacggtcactgtccttaccctttaaaaggcacgctcgctaagtttttatcagtccctgaatgtgcgacggggttttttgaagttccggtgatttttaataacccgaaacgtctgatgagatatatggcattactgatgcaccgggccatctcgaacagtggcgtgacatcttcacagcaaaaactactgtgggcgctctataaaggtcattattccttgtcagggctgacaaagatactgagcaaaaacgagaagcaaatctggcaggacaaaaacagactactgataaaactgggcatgaaaaaccggctgtatgaacttctctacggtacgcgtttctgcccggatatgcagcggacggcgtttatttctccggctgaggccagaaagctttgtggtacagaagcgtctgcagaatatgaaaagatgagggatccgttgaggatttga

SEQ ID NO: 378163 - DNA, 507 bp, Salmonella enterica
atgtgtcctgataatacacacgcaaagaagcaatttatcttcccggctgacgatatacattatcccagccagacaaaccatgatgcctgttttattccggaatgtgttcgccagtacaacggagaacctctttatattcttgttgcgcactggtgtctgctgcaacaaaactgggttcagcgaagccagatatctgaggccttccacattaccgccagacgggccagctatctgatgtcctatctgaggaataaagcctcgcgggtggtctgtgtctgccgccgccagacgttgtccaataaagcgcagcgctgtgagatttttgtcgtgcgtgttcttgaaaacccggaacctgcccggcgtgaacggacggtaacgccaccggtctcacggcgacgggtggggaacggagacagggcacaggcgaatgaactgtggaacaggctgcgcagtaagcgacatgcagggaaaatcctgaaaaaggaggatgatgatgacggcgtataa

SEQ ID NO: 378164 - DNA, 1155 bp, Salmonella enterica
atgaaaacacgggatgaccggccatcgtttgcgctgagctgcagactgaacctgccggtactgttgcgctggctgctgatgatgtctgtcctggccgggccggggcatgcgtatgctgctgatataaagtgcactggtctgaacggcagtatgggaactataaagctgcagttgcctacatcagtcagtttcgatccggaaggtgacttaaaaccctatctcagcccgcctgctaagtttgactacacatgtagtgcatctgacggcgcttctcataccgtgggtataatacgacttggcgacatgtggcctttaattgatgcgctcaataaggcaggactgaaactcgagattcttgtttctgattcgagcggggggggagaaagcgtctgggatttcagtgttaaaactcctgctgaatatgtgaacgttggttcttcctatatcggtacaacagaaaacagaaccatgacagtcaggaccagacttacccgggaccagacaaaacctaagcccaaccccggattttatgttgtgccggggctgacgtctttcaaactgatacctgactatcacagcacgaaaatcggcccgttcctggagactccgcctataaggttacagtatgtccctgcctgtttcgtacggaccagtctgggaacaaataacgtcaacttcgggcccatattgacatccgatgtggacagtaatttttcccgacgtattgatttcaatgtcattgcagatgtgaataaaagctgcaataacggaaccttaggaaatctccagggctcctatacagtcagtgtgacgggaggaacaacaaattattatcttgaacttcccctgaaagtctcatttattctgaataatggtggggaggcttcttcagatagaaaatccatcctgctgtataaggagagcacatcagataaaaatggactacagctggaaatcaaagcacctgatggtaatccggttacctttaatgaggccagtttacctgtcaatgaatttggtatttttcagggggctgaaggtagaggtacctggaatatcattaatacttatcaggctgtcctgtcctccacaggagaacaggtcaaaaccggaaagtacagtgctcaggttaccgtgaaagtagattactactga

SEQ ID NO: 378165 - DNA, 753 bp, Salmonella enterica
gtgaataacagacagaaagcgggactcatcgccgccctggtgataacccttgccgggcccggcgccagtcaggcggccattaatgttgaccggacccgcattatcatgagcagcgatgcgaaggcggtctccgtcgggctgaataatgagagtcgggaccagccctatctggcgcagtcatgggtggaggacaaccaggggaaagcgacgaatgtactgattgcgctgccaccgctgcagcgaattgatgcggggaaaaaatcccggatcagaatcatgcgggtggaaaatgcaggtgctgctgtactgccgacggaccgtgagagtctgttttatttcaacgtcagggaaattccgcccgcaccggaggacaaaagcaaaaatattctgcagcttgccacgcagagccagctgaagctgttcctgcgcccggcctcgctggctgcggaagggagtgccgcgcccgagcagaaactggaggtactgcagtcaggcagaacgctgacgctgaaaaatccgacgccgtattacatcacgcttgtctggctgggacaaagcccgaagcagaaactggcgggctttaaggaagggacgatggtggcaccgttttcatcgcagatgctgaataccgtcctgcctgccggtacggacaggatactggtgggcaatgtggatgattacggggcaatgagaatgaaccgttttacctgtacggcgggggaatgcacattccgggagcgtattcatgattaa

SEQ ID NO: 378166 - DNA, 2490 bp, Salmonella enterica
atgaaaatgaaacgtctggccctgctggttaccctgaacatactgtcgctgccggcactggcgacggagttcagcgccggttttctgaaaaacagtgaccacagcagcgtggatttatctgccttcaaccgggacggctatgtcgcgccgggcgattacctgctggatatatatctcaatgacagactcatccgcagtcagtatacggtcaccgcggtggacgccggcgacggacgttctttgttctgtatcactccggcgctgacagatatgctgggcctgaaagaggagagccaccgtcagcttgctcctgtggaagggacagacggccggtgcctgaacctgaccacggcggacagccgggtgcagtactcgccggataatcagtccctgaccgtcacactgccccaggcctggatggaatatcaggaccctgactgggtgccgcctgcccgctgggatgatggagtcagtgcagcgctgctcgactataacctgatggcgaaccggtacatgccacatcagggggacgcctccaccagttacagcctgtacggcactgccggatttaacctcggtgcctggcgcctgcgcagcgattaccagtacaaccgttatgacagcggtaacgggaacgtgcagtctgatttctggctgccgcagacgtatctgttccgcccgctgccgtcgctgcgttcaaagctgacgcttggccagacgtatctcagctccgccatttttgactcttttcgcttcgccggtatcaccctggccagtgatgaaaggatgctgccgtcctccctgcagggctacgccccgcaaatcagcggcattgcgaatagtaacgcgcaggtcaccgtcatccagaacggccgcgttctgtaccagacccgggtttcccccggtccctttatcctgccggacctgagccagaacatcagcggtaacctggatgtcagcgtccgggaaagcgacgggacggttcacacctggcaggtcaacactgccagcgtgccctttatggcccgtcagggacaggtccgctatcaggtggcggccggccgcccgctgtacggcggacggcataataacaacacggtcagccccgattttctgatgggggaagccacctggggggcattcaacaacacctccctgtacggcggggtcattgcctccagcgaggattaccaggcgctggccttgggcgcggcgcaaaacatgggcattctgggggcgatatcggctgacgtcacccgctcacaggcgcagctgccgtctgcacacacgccacgccagacgggctacagctaccggattaactacaccaaaaccttcgacagcaccggcagcacgctggcgtttgtcgggtaccgcttttccgaccggcatttcatctcccttcaggaatacctggcacgctccgggtatgacggggattaccagcaggatgaaaagcagagctattccttgagctggagccagtacctggaagcgctcagcatgagtgcttccctgtccctgagccgtatcagctactggaatacggatggcagtaataactggacgctgtcggtcagtaagtcggcagatatcggggccgttcacggcgttaacctgtcgctgtccctgtcccgcaaccagacagcatacagcctgacgcagaaccaggtctggctgtcagtcagcgtcccgtggggcgacagccgccaggtgagctacagcatgcagaaggataaccggggcagtatgcagcagaccctgaactacagcgatttccacagttccgacaccacatggaatatcagtgccggtcacagtcagtatgacagcggcagtagtaacagcttcagcggcaacgttcagagccgtctgccttatggccaggctggggcggacttcaccctgcagcccggccagtaccgcagtatggggctgaactggtacggctcgctgaccgccacgacccacggcgccgccttcagccagtcaatggccgggaatgagccccgcatgatgattgacaccgggggcgtggccggggtgccggttaacagtggcaatggcgtgaccaatcgtttcggcattgctgtggtaagtgccggtagcagctatcgtccgggtgacagctccgtggatgtgtccgccctgccggcgggggtggatgtgactgacccggtggtcagtcaggtgctgacggaaggggcggtcggctactggcctgttcaggccagccgcggggaacaggtcctcgggcatatccggctggctgacgggaaaagtccgcctttcggggcgcaggtggtctcggagaaaaccggtaaaacagcgggaatggcaggggatgacggtctggtctacctgaccggtattgatgcctcagagcgcaatgcgctggccgtgacctggggcggaaggacgcagtgccggttgtccctgccggagaacgcgggcctcagccagggcgcgctgctgctaccctgccggtaa

SEQ ID NO: 378167 - DNA, 603 bp, Salmonella enterica
atgcgtaataaaataacactcgctatggcggttgtcggtatgatgagtaccgtaactgcttttgcagcatctatccccacaactgatgcaggacagggaacaatacaatttaccggctctgttattgacgcgccatgcagtattgtcccggaaagccagaatattcaggtaaatctgggccaggtgaatttaaaaaggcttgaccaggcagaaaaaacctccgatgcagtatcgttcaccatcaatctgactggatgctcatttgaaaccccagcaacggagacggcgccagttaaatattcaaaagtggctgtgaccttccccggtaccaatagcccggcagcgggggcggataaaggggaaatagtcaatagcgccactgatgcggcagaaaacgtcgtgattcaactccttaagggggatggcactagtcctgtggatttgtcaaaagttaatcctgctgcagacgacgctgacaacattcagctcgacagcacttcggcaagcagtaagttgcaattctatgcccgtatgatggccactggtgctgccactgccggtaatgtaggcgcaaccgtcacctacaaactgcactatttctga

SEQ ID NO: 378168 - DNA, 501 bp, Salmonella enterica
atgaaaaaaatggttctcttactggtgctatgtaccaccagcgtggcctgtctggcagcagggagcgactggaatgattttatcaaaagagtcgagagagccgacccgcagaccattcagtcattgccagagtcagtgaataaaatcggtgattctcttaacggtgatcgcgccactgaactggctaccgcagccagctttgcgttgctaaaagacccggtaagtgtcctcaacgccacggcagagatcggcaaaagtcaggatgagctgatacagcgttttgattcgatgatgatctgcagcctgccgatgatgaatggctacaccagagccgctatcgaaaaatattacgcacaggccgtaactgtactccaaaatgccgggaagccggcaattgagtgtctgaacaatatgcgcgatacaatggatgaactacgggcggatggcccggatggtaaaggtgatgatgagaagctcaacacattaccggatgtgggatag

SEQ ID NO: 378169 - DNA, 423 bp, Salmonella enterica
atggtaacgttatccattctgatagctggaatgaccgccagacggcgtaagggggaaagcatggcatggatttaccaccaaagcacgggtgagctgtggcataacggcgttcttaaaggcaaaggatattccggcgtactgaccaacaaaaacaatcccgatcgccagcaggtgaaagggatggggccattaccgcgagggacatatcacatcgcagggcataacaactcaatcagcccaatgaccgtcatactggtacaaacatctggtgagagttatgggcgttcattattccgaattcatggtgaaaagcgaccgccagccattcctgggtttgcgtcagaaggttgcattatcatggggccggggggtcgttcgcaggtgattatgtctcacgacagaacgcttgaggtggtgcgatga

SEQ ID NO: 378170 - DNA, 492 bp, Salmonella enterica
atggctattccagtttatttatggctgaaagatgacggcggcgcagatattaaaggttcggttgacgtaagagatcgcgaaggcagtatcgaggtcaccgggttggcgcatcgtgtcgcgcttcctaccgactcagcgacaggtaaacctacaggcacacgcgagcattcaacgtatgttttccagaaagaaatcgactcatcaagcccatatctctacaaagctgtaaccacgggtcaaaaattgaaatctgccgaatttaaattttacaaaatcaatgacgccggacaggaagcagaatattttaataccagcatggagaacgtgcgaattacgtcagtagtgccggtaatggcggatactaaatccgaagaaggcgaaaaacataaccatatggaaatcgtcgaacttcactatgagaaggtcacatggaaatatctggatggtaacgttatccattctgatagctggaatgaccgccagacggcgtaa

SEQ ID NO: 378171 - DNA, 996 bp, Salmonella enterica
atggaaaattatacatttgacaatctgttgagcgattatctcttttataaacccctgcgttcagcaacctgctggagttatgaaaaggttctgaaaacattcagaagttatgtcgggaatgacaaaattccggaggagatcactacgggggatattctttcctggcggcactctattctgaatgaacgtggtctgtccgcaaaaacctggaataataaagtggcccatatgagggcgctgtatgcctttggcatcaacaagaggtacatccccctgaaagaaaatccatttcatgaaatggtggtgcgcgcggatacaaaactcaagaaaacgctggacgatcagcagatggagaaagtgtacagcgtgatggggcgctttgaagaaatggaaaaacagggcagggctccgggacgctgtgcgcttttgccgacacatttctggttaacagtacttgatacgttgcagtataccgggatgcgacagaatcagttgatccacctgcggcagggagatatctccctgaaaggcgggtggatcatgcttcaggcggaaacagcgaaaaatcaccgtgactaccgtattcctgttgccgggctgctgaagccacggttatcacgcctgctggctgagatgaaactgaggggaatgaaaccgactgcccagttatttaacgttgatttctgtaaggggaattccaggattgaagcaatgcctttgcagactatacgtggttttttcagaaggctttcgaaggaatgcggatttaaggtcagtccccaccggttcaggcatacgatcgcgacaaagctgatgagatcaccgaaccgtaacctgcatgcggccaaaaatctgctgggtcattccagtgcgaatactacgcttgaatatgtggagaacgatgtggactcgctgcgtgaaattcttgattcagaactgccggcagtgaaaaagaaggggaggaaaaaggatccgtcttcaggatctggttcctga

SEQ ID NO: 378172 - DNA, 1470 bp, Salmonella enterica
atgttgcataagttgttcctgtgggtaaccgacagcagcgctgcgacgaaaaaaacgggaaaacaggagctggcgccggaagcccgcggatatctgctaccgcagacggtggacgtcctgcttggtacggaaaaccggcagaagatgctgaagcagatgcgagaaaacagcctgctgacgaaagaggccacggagaaatactacatgcagccgctgcggcactgtgtgagtctgatgcaagggttgccggccacggaaagggagcaccatgcggtggtgggaggcctggtggacttgacgctgaaaacggtggtctgcgccctccggttgtcacgcggatacatgctgccacaggggggcagcgcggaagagcagtcggcgcaggcggtggcctggaatgcggtagtattttatgcggcactgtgccattctctgccggtttttggccagctccagggggaactggccgacggtacgctgtggtatccggggctgacggtaccctccaggccttaccgggtccgtttttgtcaggaccggagtaataacgttcatgcgatggccacgttactgagtatgcggctgttgccggatgaagttgtggtctggttggggagaacgccagcaacactggatacgctgctgaatcagattcagggtgaaaacagacctgcctgtgtggtgtcacaaatcatcagcgaagcagtcagatttgcaggtggagtgccccaggagccgcaacgtcggacctcttcagatatacagttcgccccaggtacggcagttgtggatgtggtggcaggatccgcatctggagatgcaggaaatgtcttgacatccctgggatctgccctggacgagtctccggcagttgatactgtagtttctcccacggtaacacctgttgtggcggtgcccgataaccaggaagcgaaggctgttggtgatgctatggcactgatggagtttaatacatctgagagtcaggtaacggaggcagaaaacatcccgcagccgggagatctggttgtggtaaaagccggagaagaaacagcgcgcatatctgataaaaaagacaaacagaagaactgtggtgaacaattctggcggtggctcagtgacggaatcagatccggcagtctttctgttaatgctccggactcgctggttcatataacaggggggatgatttttattccgacgccagaaatattttttgcctttcttaaaaaaacaccatgcagttcccctgatatcaacagagacgacattcagcgggaattcgagaaactgggacgtaatttctgcaaaagggataagtcactatttcagtgcatgaaatatgaagaagaaagaagacagggacgtcataaaagatggtccggatatctgattatggccaggaaaatttacaccgacagagatatccctgatgatagtatgtatctttttgtttcaataggtgggtaa

SEQ ID NO: 378173 - DNA, 1653 bp, Salmonella enterica
atgaaatcagtcactggttcagacagttattttcggcaggacattcggctggttaatttttatgtccggataaataaattacgctggcagcgcgtacgtattgttttcactatggccgggaaacctcagtctgtggagaacccggatatgtcctattctgatacgcctgaacaggcagccgttattgcctggcagggaaaacgtctggtggtgggcgcgtttgccggtacaggcaaaaccactaccctgcgacgttttgctgaacagaatcccgacgagcggatgctgtatatcgcctacaaccgtgcgatacgtgacgaggcggagcagaagttcccgtatcatgtcatctgtaaaaccagccatcagctggcgtatgcggcgacagggcgttttttcgctccccgtctggtcagtaccctgaaggtcacggacgttgcgcgggcgctgaacagtaagaactggcggatggcccgtgctgtgctgtacacgctgaatcattttatctgcagcgcggatgtgcagattacagcgatacatgcgccggatgaggaggaactgcctgatacggagcgggtacaggcggtgacggcctcgcagcggctgtggctgatgatgactgcccggcagggagacttcccggtcactcatgacacctacctgaagctttaccagttaagccggccggacctctcctcccgttattccaccctcctttttgatgaggcccaggatgcgaatccggtaaccagcgctattgtcttcagccagcgctgccgggtggtgctggtcggtgaccggcatcagcagatttaccgtttccgtggagcggacaatgcgatggatgcgccacagctggaacatgctgaccggctgtggctgacaaacagtttccgtttcggtcctgaggtggcgaatgtggctaaccggttgctggcactgaaaggtgagacgcataaggtcacaggaaaaggcccgcaggaccgggttgtggatatgcttccccggacgtgtggtcatcgtgccgtgttgcaccggacggtgtgcggggtcatcagtacggcgctgcatcactcgctggccggaaaaaaggtgtactgggtcgggggaatggaaagctacagagtggaggacctgctggacctgtactggctttcggtggatttaccggaacggatggagaaaaacaccctgacgcaggactaccgtgactatgcggaatattgccaggtggcggaggagacgggagacccggaaatgaaacaggcggtgtatatcctcgaccagttcttcccgctgccggaacggcttaagacgctgcgccggcaacgggtggaaaacgaacgggacgctgacgtgacggtctgcacggcgcaccgcagcaagggactggagtgggatgtggtgacgctgtatgacgactttgcaaacattcttgacccggacatgccggtggacaggcggaatgatgaactcaacctgctgtatgttgccaccacgcgtgcccggcggctgctggttccggacccggtgatacgggagatactggcgcagcctccggcggaagatattctggtccggccgactgacggagacataaatggcaccggtgatgacacggatgaaaacggggaggcgagtgatgttgcataa

SEQ ID NO: 378174 - DNA, 339 bp, Salmonella enterica
atgagactaatgttaactacattattacttctttcttttttatcagttgcacgggctgatgaaagacctgtatttaatttagagcttactgaaaaaggctttattcccgaaatactaaatgttccggcaaataccagaataaaaataaaaatgctcaacagcactacaaaagttgccgaacttgaaagttttgatatgaaatttgagaaaattgccacaccgggaaactcgattacagttcttaccggcccattgcatccgggagagtatactttttttgacgattatagtgtcaataatcttcgtgggaaggttgtggcaaaggaaatctcaaaatga

SEQ ID NO: 378175 - DNA, 807 bp, Salmonella enterica
atgatagctgtcatcctcattgtattcagagaggtgcttgaagccgggttaattatctctgttattttggccgcctgcaaaggctataaaataagccatctggtcattgcaggaataacatctggtgtgattttttcagggttattagctttattcacaaacagcattgaaaatgctttatctggtacaggtcaggaagttttcaattcggccttactgttgactgcaacgttgatgctttcatggcagattgtatggatgtcaacaaaaggaaaagaaatggctgataccagccggaatgaagtgagaaatattttatcagagggcaataaaaactatgcaattgctgttgttgtagcgattgcagtaatgcgcgaaggttctgaagtagtacttttcatgtacagtattattatctcgactgggacttcaattacagcaatgtttacgggaggtattattggtgtaattgctggtatagtttttaccttcttattgtacaggggattaattcttataccactaaagtttatatttttactcagcaatatagttttaacatttatcgctgcaggacttgcaagccagggtatcgggattctatccagcatagatataatacccgccataaaggatactgtgtgggattcatcatggttattatctgataatagctgggaaggaggtcttgcaagagcaatatttgggtatacatctacgccatcaggcgttcagataataacatggattttagttgcagcattgattctaagcatatccagttttttaaaaaggaaaaaatcatga

SEQ ID NO: 378176 - DNA, 516 bp, Salmonella enterica
atgaaactatcaaaatctttacttatagtaccggcaattttattcacatcaatggcatttgcaaaagaatatcctgttggtgggccggtagttcatgaaggtatggagatagcgtcatcatatcttctcggtattaaaatgtcccctcatataacgtccatgattatgggggatgatgtaatccacctggaaacagatgtgcatgcaacacaggataataaatggggtttttcacaggatgaatggattccatacctttcaataaactatgttatgacaaagcagggagataaagacttccttgagtttggccagttgcttcccatggtggcaaaagacggagctcattatgcacagtcagtaaaaatgcaaggaccgggtacttatacagtgaagctaaaatactccgcacctgatgagaaaggttttttgcatcatacagatgaagagacaggcacccctgactggttcaaaccatttgttgaaacatttacatttacctatcctcaaaaataa

SEQ ID NO: 378177 - DNA, 321 bp, Salmonella enterica
atgattgcaggaatcttaggcgcttatttagcatgggtaatgttgtccgagaaatataaccctaaactatttgatttctttgatgattacatcctgatgggtagccttatatttggctgtctgtttatgacgcatgatatgtttacctctgggctagatgaaagagaacattatatttattatttaagtgttggtttcttatgcattttaatcagattgctctctccttttcctgaaggtacgcttttatctattatttctacacagcttttatttcttatcttttacacctgcgcatatttcaaaggaaaaaaaacatga

SEQ ID NO: 378178 - DNA, 2082 bp, Salmonella enterica
atgaaaattagattttttacctatccattatcaattttttttggtggggtattatgttcacacgcagaaacggtgaaaaatcaaaatattgcaaaagacactgatgctgatgtcattacggtaacggcaccagtaacctcacctcttgaaattatcacatcgcctaaagaaccacgccagccagtgcctgccagtgatggttctgattatttaaaaacaatccccggtttttcacaaatacgtaatggtggtacaaacggggaccctgtttttagagggatgtttggttctcgtctgaagatactgactgatggtgcagaaatgttaggagcatgccccagcaggatggatgctcctacatcctatattgctccggaggattttgatcttctttcactgataaaaggaccggagactgttctctggggcccgggtaactcagccggaacaatacgttttgaccgggaaaccccgtctttcgaaactaatgcagtcaaagggactgcatctgttttggctggctcaagagatcgttatgatagtaacgctgatatttcattaggcggtaaaaaaggctatttacgtctcacgggtaacaagtctcgctcttcggattataaagatggaaacgggaaaaatgttcattcaggatgggataaatggaattcagatatcactgtcgggataacacctgaagccgatcgtttgatagagttttctgctggtacaggtaatgctcaggcggcttatgccgggcgtgctatggatggtacagagtttaaacgacaaagcctcggtatgcgctttgtgttcagtgacctgggacccgttttcgacaaactcgaggggcaaataaattacaattacgcccgtcatgttatggataactattcattacgccgattaccccaaaataccggaggccatggcatgcatatgatgcatgcagattcaggacctatgcaccacatgcaaggcatgaagatggggggcaaaatgatcatgccttatgacagaaggactgtttcaggacgattaatgggaacctgggactgggaagatgtcaaacttgaagccggtacggacacccagatgtacacacaccgttcagtcaaaatgtataacccagatacatcgggtgctggtccctggaacaaagacgctcggtttcacgactacggtatttttgctcagacaacatggaatgttaacaatgattatgacctcataacaggtgcgcgtatagatcatgcacagatgaaaagtttcaaaaatgcggaacgtaagagagatgcttatctaccagcaggctttgtcagaacagaacataccttctctgacaagaaaggaatgatgtatgccgggctgggctatgttaaaagatttccggattactgggagttattttcctcaacaaattctaaatatggtcttgaggacgcattcacatatgtccgcccggaagaaacaacacagttagacataggtactcagtataatatagatgatattacgacatgggtttcattctatacagcttatataaataactacatcatatttcagtatgatccatcagacaaaaaaggcaaaaccagcaaagcctataatgtaagggcaagaactcttggggctgaaagcggattgagctggcagtttattccggactggaagttcgatacctcactggcatggtcatggggacaaaacattactgaagaccagccgcttcctcagatgcccccccttgaagggcgttttgctttgacatgggacaaaaacgactggagtaccacagttctctggcgtgtagttagtcaacagaatcgaattgctcttaatgaaggtaatgttgtaggaaaagacattatcaaaagccccggtttcactgtactgtctgctaatgcagcttataaatttacgaaggatattaaattaagcattggagctgacaatctacttaacaagagttatgcagaacatttaaatctggcaggtaactccggatttggatattcaacagacactatatttaatgagcctggcagaacatactgggctaaattgaacgtggtcttttag

SEQ ID NO: 378179 - DNA, 1758 bp, Salmonella enterica
atgctaccaataaataatcccggaggtattccgacattggtgccagaaacaccgccagctacggacaaggactatcctgctctctggcaggcctgggcaaaagaagcgcccgcaggaggccatgaattgagagagatggcagtcgaaagattactggcctgtctggcaaaacaggaaagtacgttagatctcagcgagcttaacttaagttcgctgccagacttaccgccattgattaagacactgcacgtgaatgataatcatctttcgtcgttgccggatctgcctgaatcgttacagatactcatctgttcatttaatccactggagcaactgcctcccttgccctactcgttgaaagagcttacctgttcagcctgccatctgaaaaacttgccttcattgccagacgctctggaagaactctgttgctcagggaattctctggaagaacttcccgtactccctgtatcgatgaggtatcttacctgcacaaacaatggccttagatcgcttcctgctctaccagaatcgctacgcatgttgatttgctcagacaatccactatcagcattacccggtttaccgggatcactgtgttcactttactgctcagggtgcaaattagaaacactgccagacttaccagagtcgctaaactctctcatctgcccacgtaatcagctccgggaaatgccaacattacctcttgacctggacgaacttaactacctggaaaatcccctactgcaatttcctgttttgccaccgtcactcattacacttaataatagcccctatgaaggcggcgcgaccaacactgcgcgtccgctgacggatagcgtcgccgactggtttcctctcgtccaacaacgagatattcgtgagcgctttcgggagatcacgcatgaagcaaacgccggaatttttagcgagtttttagaccggctgcgcaaccgttacgccgatccgcagtatgagactttcaggtatcaggttatgggctgcctgctccgcttagccgcgtcccctgggttacgggaaaaattatttatgtgcgcgctgggcgcaacggctcgctgtgacgaccgcgtctctctgagttggaacaacatgcgcatcgcggaaatggcctacaccgttgaacaacacggcgctgaacataatctgcctaaaatggtcgacctcgcccgcgaggtattccgtatggaaaggcttactcagatcgccagtcagaagctcgcccaaattcaacgcgcgcacgaacactttaatgaagatttagaggtcctgctgggttaccaaaccgctctacaatatacgcttcgtttgacgcaagtcgtaccggatatgtatttcttcacctgttcgtatctgacaacagaagatgtggaagcggcaaggattcaggttcagacagcagaaaatcaacattttctggaatggctgagcctgtgggagccatggcaggcaatgctcaaacggcttaatcctgccgcctgggacgctgcggaaagcgaaaaaaacgcctttacggttagcgaagaatttcagcgccgaattaatgcgaagctggaaacgcccggctcgtctgaatccgttcccaataagacgatgcaggaggctggcgtcgaagtgatgaaagagaaactacgagaattatttatgccctgtacgctcagcacgctggaagccaaatcgcagttatcgctgctggaaccggtctgggacttatcagggaaccaggcaggcgtataa

SEQ ID NO: 378180 - DNA, 1338 bp, Salmonella enterica
atgaaaattattgcatacatacggctgatgcaggggaatccatcagctatgacctttattttattgattcttttttcctcctccgtaccagcaaaacaaaaaaaccagggaatcgtacatactgattttattaactatttagtgaataatgatcctgtaggtgtgaaaaacactctgcaatattgtgataaatgcctgcagaatatcgaccctctttttctcgactgggctaacgctattcttgagtatcacaagaaaaattatgctgaatcaatacaatattacagaaaaataatttcagccaggcctgactggtacagtgcaaggttacaactggccacagtcttatatctgaacaaagacattctttcggctgaagagcaactgagaaagttacgcagtgaacatctgacagaagaggcggctggtctcattgacagatttattgccagggtacaaaaaacagatcactggtcattccgtggtggttttacatatctgaatgaaaaaaacattaataatgttccaccgtcaggacgttccatcagaggatggaagcccgaaaaaccgcagtcgggtaaaggggtgatgttctggggagaggcggaaaaaaggttttctcttccggataatttttttgttattacccgcctggctacttcagggaaaacatactggaataaccattcttatgatgagctggatggcagtgttggcgtgggagcaggttatcggaatgtaaataccatggtccagtttatcccattttacgaaaaaagttattatagcggaggtcaaacatcagatggtggtttgcagtcttactctgatacaactggtatcaaggtggaaacagaattccagctcgcatcacgttggcgtttatattcagatgctaagttggataaaaatgagtataagaaaaagacttaccttaacggatatcgctactcgcttaatgaaactctgatttatttccctgattcacgccagtatatttctgcgggtctgggatacagtatgctcagaactgaagaaaaagatagctctttcaataagtcagcattccgggccgggtggatgtacgaatgggatggaggtatatcaacgctcttacaagctgcttatggttataaaaaatacctggacggagacttctggggaataaaacaaatgaaccatgaatatagtacgtctgtaacagtatggcatcgcgatatttatttttttggagtaacaccaaaaataacatggaattatcagagaactgacagtaatcatcctttctacgacacagagaggaatcgtcttttcctgagtttcagcaaatacttctga

SEQ ID NO: 378181 - DNA, 2547 bp, Salmonella enterica
gtggaaaacaaatgccggttacaaaggacaacaacaggcaggccatcggtattattgcttttcattatattgccgtgtctggtaaacagggatgtactggcgggagccgatgtcgaatttaatccggtatttttacaacatatacccggagaaaacattattgatgtgaagcgtttcagtcatggacaacctgttccgccgggtgaatattactccgatatctggcttaatggagaatggaaaggaagagcggtactgcgttttaatctttcatccggtatggacagaactctcctctgcctgacacccgagctgttatcattactggatttaaacgaagaagcgctgagtgacaggataataaaaaatagcagcggttgtacggatatttcttctgtcataccggtatccagaatacggtttgaaccatcagagttgcgtctgaatatcgatattccccaggcgctgcttatccatcgtccccgcggttatatctctccggcacagtggcagacgggggtacctgccgcgtttgttaactataacctgaataattaccgttaccgggttgccggtacacaggaagacaggacgtatctggggatcagagcaggattcaattttgccggatttgctttacgacacagaggaaactggtccggagggcgtaccggggggtaccgtagcacagaaaccaacctccggcatgatgttgcagccctgcgtggtcagttgacggtgggggatttcagtacgggaggagaattgatggaaaatgtcagcctccggggagtgagactggcatccgatgaccggatgttaccgggctccctgagaggctatgcgccggtggtacatggtatcgccagcagcaatgcaaaagtaaccatcagacagaacgggaatatcatttatgaaacaaccgttccggctggaccgtttaccgtcaatgacctctatccttccggatatggtggtgacctgacggtcagcgtgacagaagcaaacggacagacacgcctgtttactgttccgtttgcttcagtggcgcaacttgtccgtcccgggtatacccgataccaggtatcaacaggccgctaccggtatgcagacaataatctggatgaaattgtttttcagggaactctgcagtacggattagtgaatgatgtgacggtaaactccggggtgatggcaacaccacattatattgcagctcttgccggcgcggcatttaacaccccatttggtgccattgcatctgatatcacgttctcggagacgaaactgagccgtaatgaccgtacgcaaaaagggtacagtttgcacgccagctacaatgtgagtatgccattaacaaacaccagcctgacactggccgcctatcggtatatgtcaaaagacttttacaacctgcgggatgccatgtgggctaaccgggtggattatttcgaaaacagccaggccagaaatagcatgttctttcgcccgagaaaccagtttcagttatcagtaaaccaggaactgggagcaggaaggggcaacctttatctgacgggttcaacatacagctactggagccgtaaaggaacccgcagcgaatatcaggcagggtacagtaacgtatatcggcggctgaactaccaggtgggttattcccggtcatttgacactgacaatttgcgtgatgatcgtcgtatttatgtgaatttctccattcctctgggggaaagtcagcagagtccgctcttatccaccacgctgaatggcagcaaaggtgccggaaacagcctgcagacctcggtcagcggggttgccggagaggacaatcagttttcatatggcctttctgccagcgcgatggaaaaaggcggttccggatattcagccagtaccggttaccgttcgccttacgcttatttaaccgcgacagccggtaacgacagtcttaatcaccgccagacctcgcttggcgtttccggtgccgtcgtggctcatccatttggtatcaccctgagtaacgatctgagtgacacattcgctattatccatgcggaaggcgccggtggtgcaaccattaataattctccgggcaatcgtctcgatccatggggaaacggtatcgtcccttctgtcacaccttatgaaaaaaatgcggtcagtatcgatcccgaagcgttgccgatgaatgttgagctgtcagcgacagaacaggaaattattccgcgggcaaacagtgcgacgctggtgaatttcaccacgcagtcaggtgaagcaatgttgtttgatatacgaatgtcagacggaagcatccctcctatggcatccgaggcctttgatgctcagggtaaatctgttgggtatgttgttcagggaggacgactttttgcccggggtctgaaggataaaggaaccataaaggtgatatggggacggtatgctgctgatcactgcatcttttcttatcactctgttgtaaaacgccagacggataaacccgtagtcaccatactgccagtccgctgtatgaaaccgcaaaaacaataa

SEQ ID NO: 378182 - DNA, 1257 bp, Salmonella enterica
atgtcgccaaaactgactgatgcgcagatccgcgcatggattaaatcgggtgaaaggttcgaggggcgggctgatgggaacggcctgtatctacgattccgtgaagccgataaagcaccgagctggaggtttcgctaccggatagccggaaagtctcgcgccatgcttattggctcatatgctgagttatctctcgccaaagcgagggagaaagcaagagagctatcagcgcgtgttgtgctgggttatgacgttgccggagagaagcaggaaaggaagattgaggccattgctaagattgaggccgaaaaaaacgcgaaccttgtttcagatcttgccgctgaatattacttacgcaagatagaaactacatataagcatccagagctgttccgcagtagcctgcaaaaaaacatcgtcgcgctgattggaaagatgaaggttgaggatgtgcgcccacgccatgttgatattgttctccaggacgttttagagcgtggttcgcctacggtggcaaatgatgtgctcaggatgctaaagcgcttatttgattatgccgtggtgcgaggaatgatagaggttaaccctgcaatctcttttggctcgaaggatgctggtggtaaagaagaggggcgtaagcgagcgctcaccagagaagaactaatcctgttcttcaaagcactgcgaagaggccggggaatcagtcgagagaacgagctgacattcaaaataatactggcgctgggtgttcgcaaaatggagttgtgcgccgctgaatggtcggagttcgatcttgaaaatgaagtgtggcatttaccaggtagtcgagcgaagaacggggatgatattgatattccactagcgaagccggtgaccgagtggataaaagaaattcggctgtttgctggggatagccgttggtttatacctgcaagacgagccagaacgactgcacatgtaagccgcagcacgctaaacatggttatgccttcggttctgaaagaaatgccggatgttgagccgttcagcattcatgatttgcgccgcactatgcgtacccagatggcggcgattggtattgacccggtgatagccgaacgctgccttaatcacaaaataccgggtgtcgaggggatttataaccgtcatcagtattttgatgagcgcaaggctgcactggcaaagtgggccgatttgctggtggcgctggagcatggcgaagattataacgtgacacctattaggaaagcgaaataa

SEQ ID NO: 378183 - DNA, 801 bp, Salmonella enterica
atggctacagttaataaaacgcctaatattatcaatgaaaccgtttgggaaaggaacaatatccctcccttagaatattgttcattaagtagggcaagccgattgcttgggtgtgaagttgaggatttatggcattggcaagatattggtgcaataagattttctgttaatttaggtgaagggattttaatgaagtgtggtgttttttctcctgatgacagagaatgttcattacttagtgaagatgaacaacaaacccttagagttaaggctcaaatgattttggggcaaaatcagcgaggattccgtttttcacctatagataaacctgcatacatctcgcaagcaattaattttgatgtgacttgctccggtgtgttttgttttgaaaagccaataaataaatcggaacctaataattggtataagtcttctttcataagaattgaagagtgcaaatatgcaacagtattcattcatggagagataaacgcccgtgaatttcacgagagtgaacttctcattactagaggcataattgaagatatatattcagcaataaaaaatggtttttatttcacgagtgaaaatgctatgactccgtctgtaagagttacggtctatcaatccgatatgatagcttctcttctacaaatgacgggattttctaaggatgaaatatttaacctttctgcggatatgcttaataaaaaattagggcagatagctgcgagaaaaggggtttatgtcccacaaccagataaagccacatggtctaaatggcgggagagatttcgatag

SEQ ID NO: 378184 - DNA, 216 bp, Salmonella enterica
atgaaaaaccaaccttccacacaatctgcaatcccaacaacaggctatatccgccgatttcgcctggctgaaatgctgggcataagcctttccactcttgatcgcaaggttcgcaatggctccttaccgaagccaacaaagctgggtgagaaaatcacggcctttgacgctgtggagatcaaccgctggcttgccgaacgtcacaatgccgcctaa

SEQ ID NO: 378185 - DNA, 849 bp, Salmonella enterica
gtgaaaactaaaaatagtggcctttccggtcagggcttcgctcaccctgaaaacagcatgggcgcaatgacgaataaagactttgccaataaagactttgccaatattgtgccggttgttcccggtcagatcggagtgcgggaaactggcgttgtgagtgctaaggcactgcatatagcgctgggcgtcggcaatgacttttcaacttgggccaaactccgcattgatgagtttggcttcgtcatgggtacagattatgcagtttttgattcctcagatttcaggaatcaaagtacaaatattgacctgcatagtgagaatttgaaaacaaaacgcggcggggatcgtcgtagcaaagattacctgctttctctgggtatggctaaagagctggcaatggtcgagcgcaacgaacagggtcgcgccgttcgtcggtacttcattaagtgcgaggaagcgttacacctcagcgcgccggaagtggctgcgagttttcgcaaacaactaaaagctcgtatcaccgccgccagctacttcaaaccaatgtgcgaagcgctggaagctgcccgtacagagcatggtaagaagacgctgccacggcactacagcaacgagagcaatatgatcgcccgtattgtactgggtgggttaacggcgaagcagtgggcgcaggcaaacggcattgatggtgaaccacgcgacgggatgagcggtgatcagttggagcacttcgcctatctggagcaaaccaacatcacgttgattgagctggggaaggactacggggagcgcaaagcagagttaatccgcttgtctcaacgtcgtttggctaagaatctggtggcttga

SEQ ID NO: 378186 - DNA, 498 bp, Salmonella enterica
atggctgaatcgaccttccaaagcgagatacctaaagctcgtgttaacatccagcttgacctgcatacagggtctgctcagaagaaagtagaactcccactgaaaatactggccctgggtgatttcagtaatggaaaagaaaaccgcccagtatcagagagaagcccaatcaatataaataagaataatttcgatagcgtcctttcagagcttaacccaaatgtcacttacgctgttcagaacacgctattacaagatggttcagaagagaatgtgaaacttaatttctctggtattaaagatttcgagcctgaagccgtagcaaggcagattcctcaattacgtgcaatgttggcaatgcgtaatttattacgagatttaaaatccaacctgttagacaacgctgacttccgcaaatctcttgaatctattctaaaagatcccgcactgtctcaggaactgagagatgaattgaacgccctcgcaccagcggaataa

SEQ ID NO: 378187 - DNA, 1545 bp, Salmonella enterica
atgtctgtaaatactgaaactcaatcagtacagggtaagacaactgtactgaaggatgcacccgcaggtggtgtttatgcttcactgtttgaaaaaattaatttgaatccggtatctcgcctgggtgacataactgaatatcaggatgacagtatcatggccgatgcctcggcagatgagcgagtaaccgctgccattcaggttttcatgcaggtcatttctaaatcaggtcagaaggttgagaagctggataaatccttacttgaccagcatattgcagaacttgaccaccaaattagccgccagttggatgaggtcatgcatcacccggaatttcagcgtgtagaatcactctggcggggactaaagcatacagtagatcgcactgatttccgccaaaatgtgaaaatcgagatccttgacgtttctaaggacgatctcagacaagattttgaagatgcgccagaaattatccagacaggcttgtaccatcacacgtattcgatggagtacgaccagcctggtggcgaacccattgctgcagtcatctcgtcgtatgaatttgactcttccgctcaggatgtagcgctgctgcgcaatatatcaaaagtttctgccgccgcacatatgccgtttatcggttctgtcggccctaaatttttccataaaaacagtatggaagaagtagcagcaatcaaagacatcggaaactattttgatcgcgccgagtatattaaatggaaggccttccgtgagtctgaggactcccgctatatagggcttactatgccgcgtgtgttgggacgtttgccttacggtccggacaccgtgccagtcagaagcttcaactatgttgaagaagtgaaggggccagaccacgagaagtatttgtggaccaatgcgtcatttgcgtttgcggctaacatggtgaagagcttcattaataatggctggtgtgtgcaaattcgtgggcctcaggcgggcggggcggttcaggacttacccatccacctgtatgaccttggcaccggtaatcaggtgaaaatcccttcagaggtcatgatcccggaaacccgtgagtttgaatttgctaatctgggattcattccccttagctactacaaaaaccgcgactacgcctgtttcttcagtgccaactcaacccagaaaccagcgctgtacgacacggcggacgccaccgccaacagccgcatcaatgctcgtctgccgtatatcttcctgctgtcacgtatcgcgcactacctgaagctcatccagcgtgaaaatattggtaccactaaggaccgtcgcctgctggagttggagctcaatacctgggttaaagggctggtgactgaaatgaccgacccgagcgatgacctccaggcctctcatccgctacgcgatgccaaagtcatcgttgaagacatcgaggataacccgggtttcttccgcgtgaaactctttgccgtcccacacttccaggtcgaaggcatggacgtcaatctttctcttgtatctcagatgccgaaagcaaaagcataa

SEQ ID NO: 378188 - DNA, 1350 bp, Salmonella enterica
atgaaaatttatcgtccactgtggaacgagggggctttactgtctcctcagcagttccagcagcaggctgagtgggagtcttttcgcaatgctggtgtttcagcactggcatctcctttcccatggggagtggaaaaaatcgggtttaatgagagccttctttcatcgggtctgatccagatatcccaactgcgtctctggctggaagatggttcgctgattgatgcgcaaagaagcgacttgcctccacctcctcgtgagttagatccggttctgctggctggcatggatgcagtaacggtcgttatcgcactccctcatatgcagcctggtgttgttaatgttgaacaggaaggcattgccgctgaccgtccgcttcgttaccgggaggaatggataaccataccggatgcctttggttctgaagaagagtccatggccgtggctcgtttcaattacaccatccggtttgcccatgaaagtaatgacgcctggaacgtctgcccggtagcaagactgatccgggatggacaaaatgcgtggcgactggatccgtcttttattcctcctgttgcgtcatttgcgacaagcccggttcttcgcgaacgtctggtgctgctcaatcgccagttacgttcccgacgccagcgtctgatggcgatgcgccgtgaaagtaacgaaagacttgccgattttgccgtcgccgatgtttcccttttctggttgctgaatgcgctgaattctcacgccagagtcctggcggaatacgaacgtttcccggcacgaccacctgaacaggtatgggttgaactcgctcgtctggcaggtagcatgctgaccttctcactggattacgatctggacgctatccctggttatgaccatgctgaaccagtcaacgcttttcctccgctctttgacctggttacagaactactggaaacaagtctgccatcccgcgttattgcactggagatgtcccgaccggacagacagagctggagggcaaatcttcacgatatccgtttgcgtgaagaggccgacctttatctctctgtacgctcagatatcccggcctggcagattgccgaccaattcccttcactctgtcaggccgggtcccctgatgacgtcaataccatttatggtgcggcgctcaggggtattccgctgatcccggtaagcaggatacctgcagcattgccggtacgtatggaaaaccagtatttcgcccttgatatggaaagcgctgctgcgcatgaaatgcaggagcagggggtgtgtatgttctatgtccccgagttacttggtgccctggagcttgaactgtttgcggtgttgcgctcatga

SEQ ID NO: 378189 - DNA, 690 bp, Salmonella enterica
atgaaacaggaagtcgatatcgaccagttgatggcggagacgtggctcatcgtcaccatgctgaagaaaggcgccgttacccataatggcagcgcactttacgacaaatgtgttaagcaggttgaacgtgtgcgtgaggcactggcttgcgctggatacgacgatgctagtgtggagcatatctcctacgcacagtgtgcattactggacgagacggtaatgagccgcaagcctgaaaaaaccgaagacggtggagaaattatcgttgatgaaggacaggtggcatggcgcaaggcaccgttacaggcccgcttctttggttcacttcaggcaggcgaggcgctctgggatctcattgcagaagtcctgtgtcagcctgcacctaatatggccgttctgacctgctatcaccgcgtgattgccctgggttttcaggggcttttcagccttaacgctgtcagccagacgcagcgggatgaggtggtcaaagcgctttccgagcgagttgcgccccctgatgcaaatctgtctctggttgttcaccgcctgggtaaacaccgctggagtctgatgcgttctgtctggttctgggttgcactggcagtgatcaccacgggcgtgctctggtggggaggccacctgtggcttcagtcgctgctgtcagcgcaaatactggagctgcatggttaa

SEQ ID NO: 378190 - DNA, 1278 bp, Salmonella enterica
atgcgtaaatctgccattttcccggttgccctgcatacgcttgtgggggggggcacattgctgtggttgctctggtttttcatccaggccggaaatgtgtttaagagcctggccacactactgattgcgaccctggcgtgctggtatgttttgaaaagctgccgacgcgggaagactgaacccgacgctaccgctgcaacggttgatctgccattactggacaacctgggtcccgtggtccttgtgtgcggtgatcatctggatgcgctgtttcaagaatacccgctgcgtaaaacagcgcagggctggtggctgaatgcaggtgacgtcagtcagttgaccgaggttgtccacagtatccaggctcagttcccacggcaggtcggtcagctctcggtgatgttcatctgtcggcctgacagtcatcaggatgaagcggtcctgcgctctacgctaaaaatgctgcgtcagcagagtaaacagctaaattcgctggtgggttttgcgttgccggttgtggtgagtacagcattttccgggccggaaacgccatgggtgatcgttcgcggtgacaaaccgatagtgtgtccggaaaatggctcgccgcaggcaggcatcgactggcagcaggaaagtcagaatatcatggcgcttccggcactcagccaggcattttcatttatccgcacgaccctgctcgatgagctggagaaaaccgaccggctaacgcctcctgtgagcgtttttgccgtggcattgcgtcttggtaccgttaatcctgaagcgcactccgtctgggccaattggctatgttcccgcacctgtttgcagttttcccggcagaacgtacagtctgctcctgccagccattttccggatgctgttttgccgctactggcaccttttgccttccccgtacagggggggcagcgaacccgtcgtcttgttctgctgatgtggctttgtgccctggcggcactgggcatgtctgtactcaacaaccgggatctgatccgtcaggtgggtgccgatttacagcgctggaacgcgatcccaatgaaccattacgggcctaaaagcatcccagcgactggtacttcaaaaagggcgatgctatctggcaaccgttccttaatgctctcaagaaagatgcccctgaatggaagaagtacagcgaagattttctcgataaaatggcctggatgcaggatgtcaccacggagaagatgggcccctcgttatggcatatgcacccgattatgtttcttggcgctctaa

SEQ ID NO: 378191 - DNA, 549 bp, Salmonella enterica
atgggcccctcgttatggcatatgcacccgattatgtttcttggcgctctaaaactacagcatgatatagactggagcaagctgaccaaacaacagtttactgatgctgtttacgaagccgctctaaaagaacaagaaaaatcaggtattccagcggcaataacaactgctcaggccattgatgaatcggggtatgggcgtaaggttccagttgatttaaacaataagacatatagtttcaatctctttggaataaaggctaaaagtggtcagaaatttgttgagatatggaccactgaacatatcaatggaggtaacattaaaatcaaggataaatttgcggcatatgactcttttgaagaaagtatagccgacagaactagattcttaactgaaaacaagagatacacctcactatttgaaagtgatgatcctgaaaaatggtctcatggccttcagaataaagggtatgccacagaccctaattatgcttcgaagttgatttctataatgaaaggtagttatatgaaaagcagaggtttgaaatga

SEQ ID NO: 378192 - DNA, 606 bp, Salmonella enterica
atgattaaaatcattctatccatcttattatatagtttttgttgctattcctttgctaacgatttttgttcggatctgtccaaaaaagctgagaaggagcaagcatatatagatcattctatgaatatatttaaggttgtatcgaaaacaagactttacttcaatagcgcaccaagtgaacaatgtaagattaataatttatttttagttaatggtgatgttgtttcaggatacacaacacttaatggatatttgtttgcatcatatttcaagaaaaatggcgattcagtcgatgggtggctcaaattatcagatttaaaaaatactggatatacaagtggcccatcaagtgacgaacaaacggtttttgatattattccagatatcattaagaagaataaactgactacagcgcctgaagaatgtatcaacatcagcggagatgacactgacaataaatattataaattcgctataagcaaaaaaattcttgaaaaatgtaaagacgttcagttcacaccttttagcatcttggtaaaaaagggaaatcaagaaatttacacaaaccaaggggatgaaatcgataaatttcaccctattgaatag

SEQ ID NO: 378193 - DNA, 165 bp, Salmonella enterica
atgaagcctctcaatttaagtctgtgtttatcattgttgttatttgcaggcaattcactcgctgcaaatacctgtacatattcggatgatggtgtaaataaagctcatgtcaagcctgatgatatggttagagtacttgatgaatcaaaaaatgaaggctgctaa

SEQ ID NO: 378194 - DNA, 270 bp, Salmonella enterica
atgaatcaaaaaatgaaggctgctaaatttatttctaatcttattattgctgtatgtttttctactatagctaacgaaggggatgtccctgagtttaaagattataatatatctttaagtgatggaccatttgcaaaaaagataaatttaaccaatgagcagctcaaaaaatccgaagaatggaaaagaataatacaaaagcagctcaatgagcaaataaattccgcagggcattatcgtctttacatcagtgagaaaggtcaactgtaa

SEQ ID NO: 378195 - DNA, 264 bp, Salmonella enterica
atgcttcagataatccgcaaaggtgataaaaccacccacggtggttcggtaatgaccgcttccgaaacgatgaaattcggtgggatcggcgtcgcccgtaaaggcgacaaagtgtcctgtccggttccggggcatggccctacaactatcgtagaaggcaatcctgattatcttgatcatggtatcccggttgcatttcatggtcacaaatgcgcctgtggttgcatgttgatcagttcatttgccgctgcaaaggttgcctga

SEQ ID NO: 378196 - DNA, 1209 bp, Salmonella enterica
atgcccgtctggctggatgccatccctgaaaaggctcctaaggtagcgcgtcccggcaccggccgttggctgctattcctcgcgtttgtcatgctggggggcatagcgctcacgctatggtgctgggcgtcagagcgaaccggatttgtcttctggttcaccgctctgggtcttccattttgtacctgggggcttatttttggcttacgccgttttgtctacaaagccgaacaggtggcgaccgagtcccgaaatgtcgagcgagaagcgctcattgacagtgaaattctgcgcggtcagcgctgcgcctggatcctcggtacttatattaagagtccggccggaaacaaagccgatgacctactgaaggcaatgaaagtcgcggctcccgctatcgacttctctcgcccaagaggatgtgacaaaccggtcagatacgcggcattaccagaatatcagacagatttaacgaaggccctgaaagctgcggttaataaactgaccacgcgtgtagaggggatagttaagccgcttccgcccgcgctgccatgctggctggtgctggattgtgataacgatctgtatcccctgattgaagagcagcttaaagccgatctatcactcaagacgggcaggatttttcgcctgatgcccggaaaagggctgggggcgtttgatgcctggctggacaagcgatgggacaacccgggcattctggttgccatcacgctgtcgttaccggcgtctccccgggaagaagatgctgatgctgtctcaatggtggtattaagcaaccgcaaaacccatgcctggccggatgcacttcgccttcatcgccccgaaaggggaacagaaacaacgctcacaaagacgctcaaccgggcgctgatctgggcgaagaccaggcctaatgaactcaaaggaagctggatctccggtcccacattgacgtcgggcagcggctggaataatgcctgcgaagagagcggagtggaatttagcctttcagaagacaattccagtatcgatcccgtgctgggctataccgaccatgctgctccatggctggccatcacgcttgccaatactgacgttgaacaacgaggcccgcaggttatcgccgcacaacctgccgctgacaaagacgacgtctgggtcaccgtcatcaccaaagaagaagtttgcaagggaacgtccaggaatgtctaa

SEQ ID NO: 378197 - DNA, 3372 bp, Salmonella enterica
atgtctaaggtaaaaatcaaaacactcatcggctccgttgtgactgtcgcgttttttctgacggtcatcgtggcatttctgttttatgcctttccggaaaacgtggccttggccaccggatttggaccgtatgacgaccagcgcatactcacattctgcgccatactggttgccgcgctgtttttactcggctggctgatagagaagtctttcgacttcgcgggtaaatcgggattgtatttacactgggggcagaaaaaggctctgattgttgcgccggtgacggataccattgccagtgaagaagaggacgatgaacccgtcttcagtgaagaggccgtgtccgaacgcctgtgctttcgctatggacgccgctggcagagtaaggtgcgactccttttggtgatgggtaaccaggacgacgtccataaagcggccccgggcctgtgtcatgatctatggcaggaaggcgacggcaacgtgctgatttatggcggtgacgcccagtcacttccggatgagatcttccttgcaaaactgaaacgcctgcgttccggtcaaccggttgatggcatcattcaggtgatgcgtacctcagccctcccgacggatatcgaacgggatgcctttttgcggtgtcgccagaaagcagaccaccagttgggcttgcaggcgcctgtctggctgtggctgactgacaaagccacgggtgctcagcaggaagcggaaacagctgcaataggggttattttcggaccgggaggcacagtaaaagaggtggatgaggcgtttaccatactgacgcaacgcctgcaaaaagccggtatgacacagatactgaataatccggtacatgacggcctgcttcagttgtcctcccgtctgcgacacgaactgagagctagcctgaccgttttgctcagcggactgatgcagggatctgcggtctttcgtttacggggggtcatgttcagtcctgaactggccgttgccggtttggtcccaaacacacgcctcgacacaccgacctggaaagccgtcattgatgactgtgatgccgtcaacggcaggaagctgggtttcgactggctgaagatgctgcggttaattctgctttccctgattgtcctgtggggggccggtacactgctgtccctgatcgttaaccgtacccagatttatcaggcgcaggaaacggcgaggcaggcagcagatactgcaaaaccactggcagaacgcctgcacaaccagctcgtcctccagcaagcgattgcccatctgcaacatcgtgaggcgaccggtgctccgtggtacacccgctttggtcttaatcaggacagcgacatgctatccgcgttctggtccctgtatgcccgtaacaatgccatgctgatgagagatgccaccgcagaccatctcaggcagcaactgaacgcctttgtgcagttgcccccggccagtgacgctcgcacacagggtacacaacatacctacgatgtgcttaaaagttatctgatgctggcccgtccggacaaagcagacgcagattggctggcaaaaaacgtcctgaaagccttaccgaaacgccagaatgtgccggatggcacgtggcaggaaatggcaccaaaactactgggattttatgcgcagaacctcccggcacacccggaatggaaaattaaacccgatgcagaattaatcagcacggtacgccagatcctgctcaagcagataggccagcgtaacgctgaatcagggttgtaccagaacatgcttaagcgcgttgccagcaactggcctgatttaacgcttgccgatatgaccggtgataccgatgcctcaacggtattcagcactgacgaagtcgtccccggaatgtttacgcgccaggcctgggaagagcaggtacaggatgcgattaacaaggtcgtcaaaacccgccgtgacgaaatcgactgggtcctgacggataaaacccatcagtcagggagcgatatatccccggaagcgctgaaggcccgtctgacagaacgttattttaccgattttggcaatgcctggctgaacatggtcaacagcattcagtggcatgaagcctcgtcactgtctgaaacaattgcccagctcagtctgatcggtgatgtccgccagtcaccgctggtggcgttgatgaacacactggcctggcagggaaaaacagggcagaagggtgaggcactggctgactcgatagtggattcagcgaaaaagctgattggtcagaaaaaaaatgccagacagtttattgaacaggcacagggtcctaaaggcccgctcgatggggtgtttggtccgctaatagggctgatggaagggaaagagagcaccggtatcaacggtaaccttagcttccagtcctggctggcccgcgttacccaggtgcggctgaagcttcagcaggtcaccagcgcaccggatccgcaggccatgtcgcagatgctggcccaggccgtattccagggtaaagccatcgacctgactgacactcgcgattatggcagtctggttgcggcgagcctggggcaggagtggaacggatttggtcagtcgttgtttgtgcaaccactggacctggcctggcggcaggttcttgccccggctgcagatagcctcaatgaccgttggcagtcgaccattgtcgaacagtggaataaggcctttgcggggcggtatccgtttaaagccaccggcagcgatgcctccctgccgctgctggctcagttcctgcgtagcgactcgggccgaatcaccaccttcctgaaaactaaccttggcgggatacttcatcaggaggggaatcgctgggtcgttaatccttccgcaagtcaggggagggttgtcagcccggatttcctccgggccattaaccaactggcggaactgtcagatatcgtcttcgctcagggcgatgcgggtgttcacttcgagcttatggctcgtccatcccgtgatgttgcccgtatacagctctcacttgatgagcaaaaacttgattactttaatcagatggaaagctggcagagctttagctggccggggaacacatggtacccgggtgtaaatttaagctggcgtagcgtcaacagtggcatgcaactctacgccagtaaccagggtaactggggtttcattcgcctgctggacaaagccctgattacacctctcgatgcgagccgtacgcaactggtgtggagcacccccgatggcaatcctctgaagtttgtgatgcgcagcgagctcggcaacggtcctcttgcgttactgaagttacatggattcacgctgcccgacgctatctttaacgtcgcccctggtgcagaagagctccagtaa

SEQ ID NO: 378198 - DNA, 1608 bp, Salmonella enterica
atgagttcaccggaagatttgttaaccgcttgcgccaccagccaggaggaaaggcagcgcctcatctctcgggcaaatgatgccctgtcgttctgggataactggctgcaccctttcaccatcgggcctgaaactggagacgatcccgcatacgacgataattttcagctgatgcgcgaagagattaataagctttcgggtaccgattcagcgctgctgtgcgaactggcccagaagtgtctttgcgaatgtgctaaagatattcgtgtggtgacctggtacattcaggcccgactcagccgcgacggtgaaaaaggactgtctgaaggcttactgcttcttgtcgcgatgttgacccgcttcgggcaggcatgtcatccgcaacgcccaattgcccgtaaagctgcactggaatggctgaacagcgcaaaagtcatcgatacgttgctgttatggcctgaggtggacagcaataatgccggaatgactaccggtgtcattaacctgcttgcctcagttgtttcggactggtctgaagaggaaaggccttcgtttgcaggcctctgtactgcactggaaaaccgtctcgcacgctcaggtggcatggaagcactagtcccccagaacagcagcgcacaggagcacgggcgtgaacctgcccatccggattcaccgcaactgtcagcagtgaaatcgggccgcgatttactcgaccaggcaaagctactttcccgctggctgagcgagcaaccgcagggctggcttgcctctcaccggctgataaagaccgtgcggtgggatacggtcgatcagatccccccactcgacagtagcggtcgcacccgcctggtaccgccgaaacccgagtatcgtgctcaacttaaacggctatatctacagaaaaactggactgagctggttgagcaggccagccagatgtattgcgaaggggtcaaccatttctggatcgatcttcagtggtacctctggcaggggctcagccatgccggtcatccctgggatacctggacagactccgtccttctcgatctgcggctgctgcttaaacgcctcccgggccttgaagggctggcatggaatgacggaaccccctttgccgacgaagtcaccgctgcctggattgctgaaaaagtgaatgaggaaggcctgatgtacggtgacaaatcggctaccgtcgttaatggtcagactgacgatgtactgctccttgagtctgaagccatggagaagggagacatggaagggcccgaagcggcgcttgcctggctccagtccctaccggggatggacacaccacgccaccgctggttgatacgcctgctgatggctcgggtggcagagcagtatggccgaaacgatatggcgcttcatctgcttggcgaattgactacccgtgcgccacaactgacgctgggagactgggaacccggtctgttgtttgaagtccaggcccgccgcctgaagctgctacgcatgaaagctggtcgcagcgaatccgataaagcccgtctgatgcctgagatggagtctttacttgcaggcctgattgccatcgaccctgcccgcgccatggtgctctgtggctaa

SEQ ID NO: 378199 - DNA, 1770 bp, Salmonella enterica
atggatgatttaaccctgcgctattacgaagcagagatgcgctacctgcgagaagccggtaaagagttttcccgggctcatccggaccgggcagcgatgcttaatttggataaaaccggcgcacgcgatccttacgtggaacgcctgtttgaaggttttgccttcctgatgggccgtctgcgtgaaaagctggatgatgacctgccggaactgactgaagggctggtgagtctgctgtggccgcactatatgcggactatcccgtcgctggccatcgttgagttctcgcctgactggcgtagtctgcgtcaggccgaaatgctggctgaaggcttttccgttctgtctcgtcctgtcgggccgcataaaaccgcctgtcagtaccggacgacccgcgatgtgccgctacaacctctgcaccttgcagatgctcgcctccatactgaaaccgatggccgctctgctatccgtctgcgcttcgaatgccctgaaaaagtggactggagtaaagtcgggatcgacaaggtcgccatttatcttaacgcggagagtcctgtcagttcagcgttgcatctggcaatgacccgtcgtgtacacgcaatgtatgcccgtcatgccggaacgcatactgaacgtcatcagtttgatggctggtgcaaacccatgggctttgatgacaatgacggcctgtggaagaaagcggatacagccttcagtggttaccagttgctgctggagtatttcagcttccgtccaaagtttatgttcgttgaactgcgcggtctcgacaccatcgggctcactgcggccagtacctggtttgaaatcgacattgtactcagtgaagcctggtcatccgatctgccttttgagacggaaaactttcgcctgcactgtgcgccggttatcaacctctttaccctggaagccgacccgctgacgcttaacccgctggataacgaatacctgctcaggccgttgcggctccaggatggtcacaccgagatttacagcgtcgataatatccatggcgcgataaagaatggcaaacacccttatgtgccgttcaccagcttccggcaccggggcggtatgatgcgccacgatgcgcctgagcgttatttccacacccgagtgaaacggggcccctctggcctgtatgacacctggctaattctcggtggccgctcattcgaactggaacagttgtccgaaaaaccagagtcgctctcgatgcgaataaccggtaccaacggccaacttccgcgtaaggcactggaaagtactttgcttgacagggttgtcaaggcaggcaaagtgcccgtcatggtccggaacctctccgcgccgacgatgccgctgtatcccccggcaaacgaccgttttcactggcgggtgatgagtcacctcggctcaaacttcctcagcatgatggacaatccggaggtcctgcggggaacgctggcgctctatgactggaccgatgatgagatgaaccgacgccgtcttgaagcgatagtcgccgtgaagcacaccctaatccgccggtttgagaaggggtttatgctccggggcgtggatattgaggtcacgctgaatatggataattttgcaggcgagggcgatgtgaatctcttcggcgagatgctgcaccggttcttcgcgctgtatgccgatattcacctctttaaccagctcacgctggtactgcaaccgacagggaaacgactgagatggcgcgagaatcacagccagcacgtaccgggctga

SEQ ID NO: 378200 - DNA, 177 bp, Salmonella enterica
atgcctaacagtttgaatacacatgtagatacagacagaatttgtgacaatgacgagagtatcggtccagctaaagatgaatctgacccattaacagcggaatatttatcgtcggttttcgacctggcggagattacgaaagcaaatcaagtcgtctgtaaatcatttagcgactga

SEQ ID NO: 378201 - DNA, 2232 bp, Salmonella enterica
gtgtctgtgttacccaaaattgtctggccgatcccctccaacaatcggggaagtgaattcaaaaatcagaaagagatcctctctcatctgggaggagaatccaccgggctgtatatgataggccgcagcgggatgtggcatggcgggatccatatcaccgaagccacgaccccgtggtgtgcacttagtggtaacgctcctcttgaagcgatggatttcccggttccctttaaaggtgagcaggcggtgcaatgcatggctgacggcgaagtagttgcttatcgtgtctgcaaggattatctgacgcttgcatgggaatccggtccgctgagtttttcgggttcgttcgtcctagtaaaacactatatccagcttggtgagaagaaagaaagcgggctgcatttctataccctgtatatgcacctggctccgtattctgcttatgagtcagaatcggaaaatcagtggattgctcaggatacgcttaaagcgttttccgaaatggactggctcacggcaaaactgacttctgaacaacttcagcctcagattgcagggtatatgcctgcgggggcaaacgttgaatgggattcctctgatgccagtcttaacgcggtggggtataaccagcgccagtatggtcttgtgacgttgaaaagtttacctgatgccgatggtaatacagatgataagaaaaagggcagtacctcactgatccccggcaaccgctactgggtggtagtggataataataatattaaacccgcccccggcgctggtccatcatggtggcgcaagcttatgcctcccgccaaagaggctatgaaatttgaccagattgtgtgtccgtctccgttcgccatcactgccggtgatcctgttggtcatatggggtactatcaggcaccgaaggacggagaatatgaggcgtgttatcaggtacatatcgaatgtacgagcatggatgacaatctggaaaagtttctgaccaatcctgaacgggtgggtgaaaagaattcactctggctgaagtacactccgggccttacattgtacaaaaaagatgttgcaaccggaacattcacaaaggataccagagtgaccaccacgaccaggatcctgccactgaatcaggtgcaaacagaagccgataagtcgaccaaacaggaatactggcaactgcggccagaaaacgcctacgtgcctagagggcaggcggagcctcaactgctgtcacagtatgatctggcaaaactgggattcagaactgaaaccgcagaaccgaccagctttgattatctggatggaaagaatcagcctgttggattcttccgcagccttatcaactcactttacgaggctgcaactgatgatacacgaaccagtcatgcgctggtgaagcataattatcagcgtctgctggataaaattgacagtggaagcgaccgttattctccaatggaatactggagagcgctgcataatcccgactatagagacgttattcagaaaacaatcgcaaaacatcccagcgactggtacttcaaaaagagcgatgctatctggcaaccgttccttaatgcactgaagaaagaagcaccggaatggaagaagtacagcgaggattttctcgataaaatggcatggatgcaggatgtgacaactgagaaacttgggcctacattgtggcatatgcacccaataatgtttttgggagcgatgattaacataaaaaaacaacatacgggacttttcactgtacaagacgggaaagatgctttacgtaaaatatatgataaatatggtaaagacatgtctgtaatagttgaaagaatatttcgtattgagacgacacattttacttctggtcaataccagcattgtggtgctccaggaatggaagtacatggctcaccgccagcatatggatggagttctgatttttttgcgcagcacccaggatatcaaccaacggggatttggagtaaaaaagagggtaaagggttaagtggacagggaggtaatactcaagtcactgataaatcaaagcaatttgtagtattttattccgttgaaagctctatggaatatattgtgcattacatcaataaacattccggaaactattcttggtggtattcaactcaagaatcagcgcaaaaattatatagaaaagaatgcggtgctattatacctaaatttactaacgaattttcagatgctaaacaatga

SEQ ID NO: 378202 - DNA, 618 bp, Salmonella enterica
atgattacttttaaaatatttcctctcttgttactgatatactctatctcagcattttcaggtgtcactgatgatgattttgataggtgctcgcaatttttagataaaatagtggcttccagcaatgcaaatcttataaatgaattgaaagtggataggaatctgattacagcagacgttgaccgcattagtaataatgatatatatgctaatgttcaattcaataacaagcaatccgtcgatactccgggcgaaggttttcttttatggatgaagtatgattacctcaaattcagtctggaagacattactatcgacccagataaaccagaaaaattaacatttgatgaaagatattcttcaatatatcttaactgtttaaacaaaaaaacagtctataaagttattggtacttctcgattgcaattttataaagatgataagctatctattccaactccaggtgtgttcattttgccaggggagtatgtggaagttgaagacagttcagggagtacttcatatgttaaatatcaagcaaggaacgggacggtttattcttcatggatagactccagtcgcatacaggaaataactcttggcaaaattaaaaactaa

SEQ ID NO: 378203 - DNA, 195 bp, Salmonella enterica
atgactattaatatcacaattaacattgacaactttgcaggcgagggcgatgtgaatctcttcggcgagatgctgcaccggttcttcgcactctatgccgatattcacctctttaaccagctcacgctggtactgcaaccgacagggaaacgactgagatggcgcgagaatcacagccagcacgtcctgggctga

SEQ ID NO: 378204 - DNA, 1083 bp, Salmonella enterica
atggcgcgagaatcacagccagcacgtcctgggctgacgttaacactcaataaagatatctggcgggccaatttttatcgtttctgccagttgctggaacaggaaaatccggacgcgcctaaactgggcaccaccagccatccgggcgacgatccggtacgattcagaccctggcctggtatgggtttcccggtcagtaccctgaaagcggtggagactgacgaagaccatccgacattacccccaacggtccgcacgacatttctcgggatgtatggcgtggactcccctctgccgacatcctggctggatgacattgcgcagcgccgcgaaggccatgaggtagtcaccgcgtttctggatattttcagccaccgcatcaccacgcaatattaccggatctggcgaaaatatgcctatccggcaacgttcgaggccggtggtcgtgatgccacatcacagtgtctgctggggctggtgggactcggtataccaggcacggcggagcaggtggccacgccagtttcccgtttcctggcattgctgagcaccatgcgtttgcccacccgcaatgccgaaggcatccgggccctggtgagcctgctggcaccgactacccgcgcaattatcaccgaccccgatccggttaaggtccatatcgataatcgcagtgggctgggggccggaaaccgcatccttctttcgcagcgggccacgctgggtaaaacggcaaaggaagcatgcagccgggtactggtgacgctggagactgaggatccggatgaggcggaaggctggttacccggtggagtcctccataccgatttgctggtcctgctgcgcgtctatctcggctaccgcagtgacgcccgactgcgcctcaccgtacccgtgcggttgttgcctgagccccgccttggcaaaggcaggcgtatccaactgggccgtaccggtttgctgggtctgaaagcgggcaaactcagcaatagccgggagagtctcaccgtcagtctgggctgctatgaagggctgcaatggtctgtgttaccacccgctgaagacggacattaccgcttcgactaa

SEQ ID NO: 378205 - DNA, 525 bp, Salmonella enterica
atggcaacaataacccgctggtgggcgctgacgcttattgcctgtggtctgctcgcaggctgtggtctgacgcagactgtcacggacggtacggtcagcatcacgaaatctatcttctacaagaaaattaaaacgctgcatctggattttactccgcgcacggccattaacgccgatggcgcacagacgccactggcgatgatggtgcgggtttatcagctcagggagcgtaaagcggttgatgccgccgattaccaggcactgctgcgcaatgccgatacggtacttaaggacgaggtactggcgtcaaaagagctgctggtaatgcccaacggcagcgtgacgctcaatgtgcctatggatgaagacgctcagttcgtggctgtggtggggctgtttaatcgaccggatcagaaaggcaaccgctggcgcctggtgctgacccgcgacgacctcgacccggacaaaccccgcacgattgagctgggtgatggctggctcagcctcgttccggtaaaggagtga

SEQ ID NO: 378206 - DNA, 3597 bp, Salmonella enterica
atggataactggtcagcgctttttgacggacagacccgctatgttctggatatcaatgacagcaccgtgaaagctgatgtcctgcgttttcgcggcagggaagccctgagcgaaccgttcagatgggacatcgagttcacctccctgcatgcgaacatacctccggaacaggtgctgatgaaatatgcctcgttgcggatgcgtggcggcaaaaatgtccacggcgtggtaacccgcctggaatggctttccacctcccgtgaccagtcacactaccggctcacgctcagttcccgcctgacgctcctgggatacacccggcagtgcgccgtatttcagaacctgtccgtcccggaggtggtggagcaggtcctgcgtaaacacggtctggaaggacctgattttgaattcagactggagcgaacatacccggcacgtgaacttatcacccagtggcgggaaacggatttgcagtttatccagcgcattctgtctgaggtggggatttactggcgtacggagatggacgacgtgcacggtctggatacctgcatactggccgacagccagcttaactaccggtttgatgtgcagttgccctacagcgagccatcgggtctgttcgacggcgcggcagactcggtctgggatgtgcgaacctggcacaacattgccaccggcaccgtcgccacgcgggattacaactaccggacagccaccacgccgatggatgcgacggtcagcgtgcgaagcgatgccgtgacgaccggcgtacactaccgctacaccgccccttatcgtgacgcgggtgatgacaccagtccggagccggaaaccgaatccggcgcgttttatgcgcgtatccatcacgagcgggagctcagcaggtcggcccgtattcacctgttcagcaatacggcccacctcacgcccgggcaggtgctggagccgcagggggatgtcattactgccctgaaagagggcgttatcctcaccctggtgaccttccggggggcccgggattcccgtctgcatgtgtcggtgtggggggtgccttacaccgaacgttactgtttccgcccggcggaaatcccgcgtccgctcatcccggggacgcttccggcccggattgagagccgggaaaagaacgatatatcccctcacctggacgagcagggtcgctaccgggtcaggctggacttcgaccgggatgcgacggaccccggttacggctacctgtggctgcggatggcgaaaccgactgccggtgaaacgtcgggctggcacacgcccctcaccgacgggacggaagtggcgattgcgtacagcaacggcgatattgacctgccgtacattgcctgtgcgctgcatgactctgagcacccggaccacgtcacccgcgataatcacacccgtaacgtgctgcgcacgcctgcgaacaacaagctgcggatggaagacaggcgtggtgaagagcacatcaaactcgccacggaatacggtaagtcgcagctcaacagcgggcatctggtggacagcaagggacagcgtcgtggcacgggggcagagttgcgcaccgacgaacatggcgttatccgcgccggaaaggggctgtttgtcagcgcggacgcgcagccgaaggcgcagggcgaggcgctggacagggatgccgcgctgaaggaaatcgacaggcttaatcagcaactgcaacaactggagatagccgcagaaaaggcgcaggcgctgaaggcggatgtcgacagtcagatacagatgtttgcgcagcggctgaaaccgctcaacgaggcgctgctgatgaccgccccggaagggatggcgctgaccagcggtgaagatatgcaactggccgccacgaaaaatgtcgccgtcaacgccgggggggatatcagcgccggagtgacgggcaatctgaccgcactggccggggagaaactggggctctttgcccggagcggccaactgagcctgaaatccggagaaggggcaatagatgtccaggcgcaaaacgccagcctgcggttgtttgcagagaagaagctgacgctgagctcagcgagtgatatctcctttgccgggaaaaaacgtatcacgctgattggcggcggaagctatctgcggcttgaggccgggaaggtcgagtatggtacgacggcgtcgtatatgcgcaaagtgaagcggactatggctgcatcagccagtgctaaacctgcggaggccgtatccttgccgcctccggcgaccatgcgtgaattcaatcccgaaacgctcaccccctgggtgacgccggtgtatgcaaaatcctgtctgaaagagaaaggctgtactgatgccggtacagctgaagagcccgttgataactttggacagatgacaatttttgcccagcctgttgaggacgactgctgcggttacggtcatcagcatgagcatgcagatgatgaagtcgttcagcacgcccagtcagctaaaaaacgtaagcctgacgccgggggcgcaaatgcacctgcgcctgctcaggcaacggctgcaccgcttgctctgggagctgctactggcgtgatgactcaggtctggggtgaatggtccctgaccggcgtattgggcgcggcccggggaattccgtatgtaggagcgatgatgtccgcgctttacgttccatctgcgggcgaggggagtgacagggttcctggccgggatgagttctggtacgaggaagagctgcggcagaaagccctcaccggggcaaaagcgacaacccgggtaaggttcttctggcgtcaggatgagcagggcaacatgcgggtctatggcgtccatacgggggagggaacgccgtatgaaggtgtccgtacggcaaacatggtgtggaatagtgaaaataatcgctatgaattcactcctgctcacggtgccgatggcccactgattacctggacacctgagagaccagaaggcagtgaccttccctcacataccggcagtgacatcaggccaatagaccaggctacaatactcgtcacgccaattcctgacggcaaagatgaatacacgaccccacctttcccggtgccggaagaacgcgatcttaacgattacattctggtcttccctgcggattcagggattaagccgatttatgtttatttgaaagatgatgctcgcaacgtacctggagaagcaactgggaatggtgtaaaactatcaggagataaaccttggcttgatatgtctgtaacaaactcaggtgaaggagctcctataccttctcagattgcagacaaacttcgaggtcaaaaattcaactcatttgatgatttccgtgaaacaatttggaacgaaataggaagacatcctgagttaacaaaagattttacaacagtgaacaaagatcgaattgaagatggacttgctccatgggtacctaaagaaggccagtacataggccccaactctattgtcaagaaatttgcaatacatcatgttgtacccataaaagatgggggaggagtttatgacatggataatttacgtatagttactcctaaattacatgacgagatacattacagacgttag

SEQ ID NO: 378207 - DNA, 294 bp, Salmonella enterica
atgagctcaatagttttaaagaacaaaattgaagagtatacagagcaagaatttttagccattcttaaagaatttaggaaaagcacaaggcaggctaaagatttaaagggaagtaagctggatgattatcttgataaattaatggataactttattcaagtgacagcacaccctaaaggcagcgacttaattgtttaccctgaaaaagacgaagacggggaacctcatagggtaattgaaatcgtcaaagaatggaggaagtctcaaggacttgctttatttaaagactcatag

SEQ ID NO: 378208 - DNA, 474 bp, Salmonella enterica
atgccattgccagttagattaacccccactgaaattcatcatgataaaatgcaatctatgacatcaattgcagaagaattaaagaatctcatagatactgggtccgacgaaacatctagcaaagtgtatgcattaatagagaaatggaatatctttgctgttactaggtttgaatttagcgattttcgtgactaccactcatggatttctacagaaaactttgttaagacggccctttatcaagctaaatatcaagcggacttgtctttccatgaggcgaaacaaataatagaatttataagtacagctgaaggtaatgaggccttacaaggttatgctcttagcctgatagagttaaatttctcagagccatgtgtctcagatctattctactatcctgaatactggtttaaaaatttaacgaagaagaccaggtcattttatctgtattggataacatccagcgtattttga

SEQ ID NO: 378209 - DNA, 270 bp, Salmonella enterica
atgaccaaaattctgcaaggtatgccgggtaccgcccacgagctgatcgagacgctggccggtgtcctgctcaagtatgaaccccgtttgcagtccctcaacgtaactttactcgaacagcaagtgcctggagagttacgctacgccatcgatgcggaactgagaggtatcggacttgtacggtatggcaccgagtttatgcctgaaggtaaggtgctgatcaggcatttgaaacagcaacagtatctggaaaaccaccagtttatctaa

SEQ ID NO: 378210 - DNA, 1344 bp, Salmonella enterica
atgccccacacaactgaacgtcaccttaagatcgggagcgatccccgtacattgcccgattactcagcattgcgagatgaattcgcaaaactgtcccatcctgcccgtccggatgtgaactgggggcatgttgaaaaactggcgctaaatcttttcgatacccatggtgttgagcttcagactgcggcatggtataccctggcaagggcacaactggagggaatacagggtttcaatgaaggtatggcgattctggatgctctgatacgctatcaatggtcagcaatgtggcccgcttctgcacatgcccgaattgaaatactcagcagcctgagtaaacgacttcaacagctattccggaccctttcactacagaggtcggatttaccaggactgaatcagggcataaggcttttgagctcaacgggggaggccttgcagcggcttgagcttcacaatgcaagcgggattgatactctccgtcaaatgctgcataacgccaccgtcaggctggaaaatagtgatgccccctcaagccataaagagaccgttctaacagacgtagtgctgcctgcgagggccgacaagcagaatagtcagcgctgggtatacgtggttaattctgaaccaacggtagacgttaaagtaatcagaaaatcagccaccagaatcactccattagtggcttacttcggcggcgttttaagcgctgccgtactgagcatagccgcctttaattacatgccgacgttattcagtcaccccggagaagatgtgttgaacaactctctcgcagctttaccgaccattatgcctctcccggtcgtcgatcaactgcgtcaggatgccccgtcgtggctcgaatccagcgatacctacgtgaaaaaagtaaattctcgtttgaacgaattaagcatgcttcctccatactggccgttgcaatacggaactcagttggtggagcaaacccgtcatctctatcccaactccgaactggcagagaatttgtctgcaggttggctgtcaaagctgcaagctaactctttacctgatgcaaacataaacggatggaaccaggggatcactgagctaaagagacttcagaaccgacttaatcagctcgataaaaagaagggggaatacatgacggtgagcgagcttaaaacggcggtattctcgatatcacagtcattgaatgacagcgttcctgttgaggagctgattcgacaattgaagacatctccccaaaaccaacctctgtcccgggacttactaaaccgcgcagacctacagctcaaccagttgaacaactcctatatgttggtaatatcagagagcaagtaa

SEQ ID NO: 378211 - DNA, 993 bp, Salmonella enterica
atgtctctttcatcagccaacagcaaagatgttgcgagactggctaatgtttcacagtccactgtctcgttagtattcaacggaaaaactaaagggcgcgtttcagaagatacaagggcgcgggttctggctgttgcgaagactctgggttatcagccaaacgtaagcgctcaaatattacggaatggttcgccaaaaaatattgcgttcgtcgtcccagatctccagcaaccctattttggaaaactggtttatgcggctgaactgactgctgctgaaaagggacattctgtcattcttcttgacagcatatccagtgagcaatggtgtgatcggcttatcactctttttcagagtaaagttatatatggatgtattatttactcatgcgatgaaattgtttcaaataaacttcaaagctatcgcaatcagattatttatatcgaaccagatgatgaagcagtttatgatatagatctaaatttcagaactgcaaccgaagatatttataactatttggtcaaaacgggtaaacgtagagttggttattttcggtcggatcttccaagaaaacatttcattcgcaggcatcgggctttcgagagcaagctcaacttactaccctacccggataaagcatttttcgttgaatattcctcattctccctagaaaatgcttcattaattgctgaaaagttgctgagtaaccaactggatgtcattatttgtgacgatgaccttcttgccggggccgtttatcgggctgcaaaaaaaatgaatatatccatacccgcggacacagctgttattggttttaacgataccgttctttgccagtatttagatcctgagttatccaccatcaggataccagctgacatgattgggaatcttgcggtaagcatgttgatcaataaaacacaagattcgccatccgtggttaacagttttcttattgatcttatgtacatcgagcgtgaatcaacaatttag

SEQ ID NO: 378212 - DNA, 1254 bp, Salmonella enterica
atgctgaatctcagccagaaaaaacgcaatttaataggtaatattatgtcgaaaaccaacgaatacaatatcaaggatatggtacttgcagaccaagggctcaagcgcatcaactgggccaaaagtcacatgcctattatgcgcaacttaatctccagactcgaaaaagaaaaaccgtttgaaggccttaccataggcatttgtctgcatgtcgaggccaagaccggcgtctgggttgaagctttgacgagaggaggcgcgaagattgcggtcaccggctctccgggttctacgcaggatgaaacggcagctgctctggtaaaattcttcggcgctcatgtctattcacagcgtgaggaaagttttgaggagcatatccgttattgtaaagatgtgcttcgtatggggcctgatctgattgctgataacggtgcagacctacatgagttgattcttcgtgatccagagttcaaacatcttcaggaaaaactactcggcgcaacggaagaaaccacaaccggagcaaacaggctccgggaagatttctcatcggagcaatggcccacactgataatcaacgataccctgtcaaaaagaatcattgaaaaccgttttggtgtcggttcttcggtagtggaaagcattgctcatgcaaccaacgttatgctgcatggaaaaaaagtggttgtgattgggtacggttactgcggctccggtgtggcacagcgattccgtggcatgggggctcacgttaccgttgtggatacgaatccgttaacacgacttgaagcccacctggaaggtttttatacggcagatctcgtgaagacactgacggacgcggatttcgtagtcagtgtcgttggtcgtgataacgtattgactggcgaacatttcagcctgatgaaagatcaggtcattattgcaaatgcaggccacttccagcgtgaggtagatgtaccggctctgctggcactcagcgattcccgggaagaaattgtccccaaaattacctcatatcgcctgaaatcaggaaagcagcttttccttatctctgatgcaaatctcgttaacctctccgccggaaacgggaatccaattgaagtgatggatttaggtcttgcactgcagacactgagcctggaacgtattgcgctcgacagtaaatcactgcgagccatccctcagccagttccttttgatattgaaatgaacgtcgctgaactagcttgcaaacactggattaatcattga

SEQ ID NO: 378213 - DNA, 285 bp, Salmonella enterica
atgaattctatttcttcacctacttctcatgcaagctgttcaacttctcaggcttcatatcctgatgacctaatcaatagcactcttgtttcattattctacctgacaagtgatggtggatttatgagtaagaatggatatatgccatgtcatcgggagaaagatggaaagcttcagattgaagtaatcaccaatgactattctttctggatgaatgcgaaagagatttcccttcgtcttaatgaaatgattccagtaagcacgccaatcttgtttacaatttga

SEQ ID NO: 378214 - DNA, 882 bp, Salmonella enterica
atggagcttttgttcgtcaaatctgaatccacgttttcttactttgaagccacacgtcattatattgataagcatggtaaaccgctggcgctgtacagcgataaagccggtgtttttcgcgtgaacaataagcacgccaccggtggcgaaggacatacccagtttgggcgggccatgcacgagctgaacatccagactatctgcgcggaaaccagtgaagctaaaggccgtgttgagcgggcgcatctgactttgcaggatcgcctggtcaaagagctgcggttacagagtatcaactcaatggaggctgcaaatgcctttgctgaagcctatatagctgactataaccgtcgttttggtaaagcgccccgacatgactttgacgtgcatcgtgcggttgaacatgacgaagatctggatcttattttcacggtacgggaacatcgcaaagtctcaaaatcgctgacgatacagtatgataaaatgctgtacctgattgaagacagcgagctgagccgtcgtgctattggtaaatacatcgacgtgtatcactaccctgatggtcgtaaagagctacgcctgaatggtgcagcacttccctactctacctatgaccggctgtcagaagtcgatcagggcgagattgtggataataaacgacttggtcgtactctggagtttatcaatctggtgcagagtaaacgggataacactcgctctaagtccgttccttctggtgatggcccttcccggcgacggcccagagaggaagggaaaaaatctcagcgttcattgaataacgacgacatgctcgaagcgcttaaacagctccagtcgcagtcagaggagatttttggcaaaagagccagaaccggacgataa

SEQ ID NO: 378215 - DNA, 378 bp, Salmonella enterica
ttgtcttctggtaattggtgtgatgctgttggcgataaacatccctacgtttacataacgaatggaaatgcgcgttgtagccctgcagaaatcgtaacagggccagacaatattacttatttcgatttatacacaataacagatgacgatcctcatcatccaaaagccgaaaaaatccgtattttaatgaatgttaccgactatgacacatttgatgtaacagttgctggttatcgcgttgaaacttttcgagcggtagatacagatgaaaaaattgctgagatttctgaatttattaaaaatgatatcataatgtcattgaataactcatcacttgttggttacaaaataaaagatcctatctatctgtgggattga

SEQ ID NO: 378216 - DNA, 438 bp, Salmonella enterica
atgacaacgactgtctccgataagctctacaagagccaactacttgattattactaccagcggcgagctgaatcctctatcaatattggtgagcgctttctcattagcaaagctgtattcggtacaagcgcgctggtaacaaaaaacgatggaggtgattacgacattgctgatttaccgactgtgttctcaatgtctgatatgaccagtcaattctgtacgatccccctggaaccgacctattccgatggcgtgattacgattcgcatggatctcgaccagaagcagttaacggatggaaccagctacccgttcaacaccctggcgattctggataacttaaataacccgatcgcaatcatgtgtgtacaggaagattcgttatacgtagggaagacgtatacggctgttatgggtatcaatacaaccattgcataa

SEQ ID NO: 378217 - DNA, 1116 bp, Salmonella enterica
atggaaaagtcatggttcagtaagcggctaacgtcggcaaagcaaaaatctgttttgtattcgtcgctggccgaaatcgtccaggcgttagtcagttcgtccgtagaaccctggctgcgccggattacaaaccggaagtcgattttttcgatgggtgaggatgatctggccatacggacaaatgagctgggccagttctttactattcgcacagagaactcgtcatccattccaatgctgctacagcaacgtttagacgagattcactttaaaggcactgaccggccaatcaaccagacgatttaccgtgagtttgacggtattcaagttacgtgggagccattatatgcacctgctgacctggaaaagtacccttacgggaccgttctgattacgcaaaacagcttgcaaagcacaggcggtatttacggtgagatgttcctgacgtcacggggcatgataagcgtctcgattaatgaattgacagaaaaaatggccggggatgatgtggttgagtccggcggcttagatcaggccgcgatcaccgaagctgttctcactaaatttaatcagtttgtgcgcccactgcttcctaagcacatagttttcgatggcctttcgatatatctgtctgtaattgtctatgaacgcccggagaacctgatacttttcagcgtttccgatacggacaaagcattcttctggcatgaagctgctgacgaaattatctctatcgacaacattacaaaattgcctccagttaacgttacgccgggccaggtgagagacgttacatccataacgtttgatcgtgagaaagccgatggcggcattctggacgtcatcgagaaggggttattcgacgaccggatcgatgtatgggctatgcggctggagaacagcgaagaaatgactctgggaggtgttacaagtggtggactgattattcaaatggcagagaataacgacacctggaaatgctcgctgtttgtagagcacatgtttacgcccgccggcggacaaatttcccctgattgggaagaaagaacgctcctttttgacgatacaggccttgatagagagttgctggatatatcaaatacaaaggatagttga

SEQ ID NO: 378218 - DNA, 1443 bp, Salmonella enterica
atgagtaaatcaactcccactaaggccagcgtgcaagcagagtttgaggcgttggtagaaaacgactctttctggtcccggttcgttggttcgcagtttgtatcgatgttggtgctttttatcacgcaactggtctatcgctgctaccagtatgcagatgctgcgctggcggaaggttttatttcaactgcgacccggcgttcatcaattttggccgccgccgagacgaacggttatgttggttctaaaccgtccccttccactggccctgtggagatctctataacgggcactggcgcgccgttgagcattccacaatacaccccgtttatttcagatgatcaatatccatacctgacaatgagcgagtgtaaatttggcgcaaatggtaaagcgcaggtggacgtagcccagatggaaatccaggaggtaacttacaccgttacggcagcgaagccttttctggagttggtactgtcaaaagcgctgacggctgtttgttataagttggaggtttttgttaacacggacggcgctacaacgcagtggcagcaaagcataatgttccggctggcaaacagtaccagtcaggtctacgtagagttttataagccgtccgaacaacttggcgttcgttttggggatgggcttataggcaaaatccccccagagggatctacaatcacgttgcgtgtctggtgtactaacggtgatgttacattggttgccgggcaaacattgacgccagttgacaaggcggctgatctggctggttctatttccgtaaaaactttggcgcctattactaatggcaccaatgctgaaaccaccgagatcacccgtaaccgtgctcaatattatctcgcctatgataaccaggtagtatggggtggggattactcctatttcctgatccgcaatattcccggaatgacctgggttactgcatggggggaaggggagcaagagaaactcgatggcgcttataacgtaaaaaacatcaacaatattttcatttcaggctggcaccctaaaaagacccaggatgagctaaagcaaatggtcctggccgctttcgctaaggttccaaacgagctaaataaaaaattcacttatacgccggttcgcgagctgccgttccgggtcgatttaaccggtacgatatcacccagtcagacaactgcaacggtattgagtgaattacgtaaggagctggaaacacgtttcggaaaggattcgggctatttcgatccggaaagtgttggtaaatacattcttattaaaaagaaagatttatgggcgtttatagaacatcttaaatttttccatgacttcagccttgagtttgtcgattggcatgagtcaaacggcttcttcgattttgtctatctcgatgtggaaaactccacttttgatattgattacgaggacacgggcgaataa

SEQ ID NO: 378219 - DNA, 357 bp, Salmonella enterica
atggcgaattacaacgaaatagacccgttgctggcgctggagttgtccggcgtaaagacttattcctcccaggaagaggcttgggcagctcgactgtacgagtggttcaataccttgcagggagaggtatatggcgatccatcatggggaaacattttgccgcagttcaaacatgagcccacaaacttgtcacatatacaggtcgctattgaggcgcgtcttctggctaagctggccgtagatctgccagacgtgccggtaagaggtttatcagtaaaagaaggggaggctatggacatgctgaaaatttctatccagatccatagcacggtaatcacacaggaagtgagaatttaa

SEQ ID NO: 378220 - DNA, 3246 bp, Salmonella enterica
atggaaagaaaaaacgccgggattggcgatgtaattaaagcggtagatgtggccagcgcgaaggagctacaagaactggcccgcatccgtaagtcggtagatagcttaaaagggcatgtcgtggttcaggatgagaaaatccccagaaccgtagccgcaagagaaaaaaacgctaaagagtcagttagcgaaaccgtctctcctgaaaaagaagctgccaatgagattgtggcagcaatgaaaaaacttaatctgggtggtgcgccacgtgatgaatctccggctgcggcgagtaaaccagataactccgggataacaactccagtaggtgagcgccggcagcagtcacaaaaaaataacttaacacctgcacagatgactgatgcagcgaaccaggccaggaaggtttttagccgggcggctggtggcggtgagaacaaatcaaaggcagtcactcgcgatgcgcgggggcgctttagcggaagcaaggccgccagcgatgaggttaaggccgagcatatcgagaaagcgcggcattttaatgaggaaaaagagcaggaggaacgagagtcctttctgaaaaagctcactaaagcggctggcgaactcgaaaacccatctgaaacccgtgccgttgatgccgtgggctacgccgtgggcggcccattatgggccattggcaaagagttgggcggtattactaaagaggtaggtggaaccgtcaacaatgccagaaaatcaatggcagaagtttttaaaggtgatgacgacggaaagcgccgggggttttttggcagacgtaaatcacaaaatagtgccgatgtggtccagcttaacacccagaagcgaactgttcaggagttagaagatcagaccgatgcgataaaagagggcgatcagaaaattattgatcgcctggataaaatcgaaggcaacacaggtaagaagggcggggggatattctcaaagcttttcaatatgtttggtaaaggcgggaaaggagtggtgacattacttggcggcctgttgggtgggcgcctgctgggtaaaatcattggcgggaaattaggtggtcgtgcggtaggtaaagtcggcgctatggcgctgggcgggcttgggctgaagaaaatggcccgctctttgtttgggggtggggccggttccggcgctgcgcttgctgaaggcggtggcgcgctggctgctaaaggtgtcggtcgtttaggagtaaaagcgcttggcaaaggtatgcttcgtgctattcctatcgtaggaactattgctggtggcatttatgatggtgtcactggatggaacagtgccgatgctcagcgaaaagcatttggcctttctgatggtgaagatccgacgacacagcaaaaaacagcgtatatgctggcaaatattctggatatgggcggattaatttccggtctttccggagccatcggcagcgctttaaaatcaatgggcttcgacgctatcggtgatatgttgcagtccttttcaaccgatagtatcgcccaggcaattgatggcagtctgacaagtgtcgggaattatatttcaggcctcggcgacactattacatcaacatttgacaattatactgcgaaagtaggagaaacaatttcaggatggttcggcactattaaaaccgaactcactaataaattagactcagttgttaaattttttacggttgagaacttaaaaaaagtatttgaaggtgcaattaacagcatcattgactttatcaaacatcctgttgatcacattactaatggtgcaaaacaggcttataaaaaagtcgaagaaaaagtaagtgggctttgggatgctgccggagatgcagtcgcagatttaaaaaacggaactattaaggcttttgaaagcgctggtgaagctattcaaggggggcgcaaggctatcgttcgcggcacggaaaccctactgacgaaagcagttgatacagctaaagccgcaccacaaaaggccggggaagcaatcaagtctgttattgattctgatgtagttgaaacggctaaatctggagctagatatcttgaagatactgttggtgaaggggcagtcgctgctgcaaatactgcgagattagcaggtggtaatattactggttctgatagaagcgatgttcagaaggccgcagacacctataatgatgggaaattgaatgtcaaagagagtaatccagatgctttaggtgcaaaaaacctgaagagaatggaaccattatttaaatcacttgaaaaacagtacaatttgcctgaaggtgctttgtattctattgcggcaacagaatcaaaaggacatgctgatgcggtatcccccacgggggcacggggaatgtttcaatttacgggcatagctcgcgaagaagttggaatgtctgacagtgatgcctgggacccagaaaagtcagcggtaggcgctgcaaaattacttagcaaatatctaaaacaagcgaatggcgactggaatgaagctgttactgcatataatgcaggttttggcacgattaataaatggaagaagggagagagagaattaaccaaagaaaataaagaatatgctattaaagttaatactcatcgcgctcgttatttaggtggagagacctacactccaggggcggggtctaatgcatccaatatcccatcaacaaatgttacggctggtacacaaattgatgaagggaccgggttagcctttacgcccggagaaaacccattcgagaaaggtggtctgatcgataaaatcggcgagaagcttggcgttaatgatatggccgataagtttcttagcgcccctggaatgcgacatcaagtagtacagggcactctcgccgaacgcgcttatggaaggggtacgacgactacaatggggaatgtagtccctaaaaacatccctatgccagcatctatcgcagatatccaacaaccaaccgctcgtattcctatggatggacgcactatcagcgatcttggtggttcaggtgctaaaccgacaatgcagttagctgataataccgtcacattggatagtgaaacaaaacggattttcgcacggatgacggcgattttggacaggatcgaagggcatacgaaggacgcggccaagaatcagggagcgactatcaaggtcagcactccgcaacctggcgttacgaagactgttcctttatcaatcgacgatccgctgatgaatgaatacgcgagggtagattga

SEQ ID NO: 378221 - DNA, 894 bp, Salmonella enterica
atgcttttaccagatttcccattaccatcgcgtccatcagaggttgtccagttccgacaaccaaatattgcggatgcgatgcgttttaacaaaatttctccttcagaagaagagcagcagacatctgcatatcttagagctcttctggtgacgccagaaaagcacgatgtcagcaaatggacagcacaggatcgtcgaaccgcgttgtggtggatatataccggttcgcacgatacacccgtcgagacatttgcttatacatgccgccattgtggtcagcaacactattacgattgcaatatgaacgatctggccggtgatattcaggttctcgatgttcctccgtatatcgacaatgtagagatcagcgtggagggcgtcccgcatcagtggcgcattgttccattggatggctgggctatggaaatgctggaactgcgccgcgctgcattaccgccggaagacgcccccgaatatgaggatgagcttatcgatcttcgtttatgggagttcgcttatcagtgcgagatataccatgacgttgccgggacgcgggatgaacaagcggaacgtcgcttcgaaataattaagcgtatggctattgatactgaattcatgaagctggccgctgaaattcgtatggcccaggagacgttagatcatgggctgccatgccatatagataaagggcaggcgctcttacacctgccagcgcataaatgcccgaacgatgaaaacaaggagcccacaagcggtttatctacccgtttgtgggtccagtttcggcctacatactttatcccacaggtgggccttgagcgactatcagacattagtatccagcctggttttgtatgggggtatgccggttcaggacgcggaaaaactaactga

SEQ ID NO: 378222 - DNA, 603 bp, Salmonella enterica
atgcttgcaagcgtatcgtcttacctgtcttcagcagtaaccacagcactatttggttctggaatcggtgatcgggaagtcggaaaactgaccgccaccataatgaacaaaatgctattcgcacaggggtggcaattttccgttgaggttgacgggctggtgggcgccgactttttcgcgaaagacatcacgtatcacgattatagcgtggagtatgagcccactaaaattggtggcggcacaattcagcaacctgtagggcgggagccggggcaaataacgatgatggtccgcgataccgttgacggaattgttatggactggtttaaggaagccaagaacagggtagttaacaaagatggcacaggcaatctgccagcgaactatctacttaatatccggatataccggctgctcgctgcgggcataacgaagctggataacgagatgactgttttcccggtgactgtcggcgatgtgacgttagcgcgcgatcaggtaacagaattcaaatcgtttcccatgacgtttgcgctccatagcaccttcaatcaatcatcagggtctttggcgtcactgctgggatacagtttttcactttaa

SEQ ID NO: 378223 - DNA, 567 bp, Salmonella enterica
atgactccacaacaattactcgaaagcgttaaaaagcgtttcgtaccactattggcagatgagccagcgttgctggaaacgttgttacgccaggtgctagggacatatcaggaccgcgccgggcatatcaaacgcctgcgcattactgatacccgtatcgccagcattactcccccaaatgactttttagctttagtttcggtaacagatcacactggcgatcttgtgtattcagacgtctacgatggtctgattgagttggacgggctatcgaatgcggtttatccattaactatttcctatctggtaaatctgcgagagatagatctggaagaaggggaggtgccagcagatattgtcgggctggtgcaggactatctcgaagcgttgatcgccattcccaataccgaccgactgcgccgtgtatctatcgctggcaaactcgatatgaacaacctgaccgatgaaaatactcttcaccagcgcaagctggacctggaagcgcagatgagcgcaacgagagcgattattcccggctacgtactgttctcatcctggatgaagtga

SEQ ID NO: 378224 - DNA, 474 bp, Salmonella enterica
atgaagaataaatatatattttttattatttctatacttttttgctcatctgccgtggctaatgtaagcaaatggtctacaggagaagaaaaaggtattcgagtctactcggtagatagcaataataaatttacacttcggtttagttgtgatgttggattcaataatacatcatctgattcggtaggcactcgaatgatcgaactttctcaggggttccctggtggtaaatcatatagtgatgcgaacgggattatgctaaaggtcggagaagatgaatatcctatggggctgataggctcatctgtaggcgatagctggtggtatgctttttggagtgacattcctgattcgctatctaaaacggtcgatgcttatgttgatggtaaaaaagttgcatcatttactttgcgtaaagctgctgaactgtacaagtcagcaccagaagatggctgcttgaagcgcgctaaataa

SEQ ID NO: 378225 - DNA, 741 bp, Salmonella enterica
atgaaaaaattagcactagctttgtgctttgtggcagggactgctaatgcagcatcgagtctcaagcaaatttgtaccgactacacaaaatatcttggtcatgtgtatggtttcgctgtgagcgaagatgagtccatgcgtaaacttctactggccgatatgaagcggttaaatctctccgaagctatggtccaaaaggaaatgtataaagccacaacggacgatgctgcgaagatgtattattctatgtttcttaaccctgacctgaatgaaactaataaaggtgcttttgctcaaatggtttcatattgcgaagctgggccggacgtgatgattccaagctggcccgttttagttgcaaatggtaaggttcggaaagaagacgctggctcctctttcatggaaacaataaatagcgataaattcaaaaatgctccagggatgagacatcaaccatcaagaaatacccctgaatttaaatcttgtgtagcccaaaaacttgcagaggaaaaacgtgctaacccaagcgtatctaaaagtgcgcttgaggtggccgctgaagctcaatgtcttaatggaaatagttctgtaaatacatcatctacctcgacagacgctcagtcattaaaaattaagcgctgcacttatgataaattttatgctatgaaaaaagatagtccaaatgtaccagaagctaatttaatggctacagcaaaaagtctttgtgaagatgggtattaa

SEQ ID NO: 378226 - DNA, 219 bp, Salmonella enterica
atggttaatgccaatccctactcacgcccggagtttatctggcgcttctattcctgccaaaaacataactatcacctcgtcatagcttcgactgaagcagaagctcgttcacagcttccggacgccccttgtattttctctgcccgattttcaactgaagcacatcaatactttaactgctggaatgcccagattattggctggcaaggggggcagtga

SEQ ID NO: 378227 - DNA, 1002 bp, Salmonella enterica
atgaaaacctccctgattacccgtgaagaaatgatcgaagctattgagcaacacaccagttgcatagcaacgaaagaaattcccagcgttgtcgtcaactatctgatggttacaaaacgcctttatacccgcaaagacaaaaatgctttaaagcgcattctcttaactgatgtgcgtgaatatttggtccagcagggccgcatcccttatgcggaggtggcagcggagaaacgaaaggaggcaaaaatgcattcacagatagagttgctaccgccggcaccgatagcatctgagatacctcaagacggtattgatagtcagcagttgctaaagatggttaacgaggctcgtaaactatttggtgagaaccctgttcgcaataatgatttcatagcccgcattaaggatgaacttgaaggagagacctacgaaaatttcgtaggtcgcaaaaatggtgcaaatattgatattgttaccatgtcctacaaacaagctctacgtgtcgcagcgcgcgaatcaaaggctgtgcgccgatcgctcatagataaactggaagcactacagcaggcacaatccccctcccctgtcccggcaattccacaatcgctacccgaagcgttacgtctggccgccgaactggcagaacaaaagcagcaactcgaagagcagctacagaccgccgcgccaaaagttgacttcgccgaccgtgtagccaatgccggaggtatactgatcgggaattacgccaaagttgtaggcctggggcaaaactttcttttcacctggttaagagatcatggaatattgtgcgcttccgggtcacggcgcaatgtaccgaagcaaaattttatcgagcaggggttcttcacggttcgtgaggtcgtcatcgacaacgacgataactaccggatagcactaacaactcatataacaggaaaagggcagcagtggctaaccaggaagttgcttgatgcgggcatattgaaacctgtcgccctctag

SEQ ID NO: 378228 - DNA, 297 bp, Salmonella enterica
atggaacagaaattatttgagcagttagttaccagcatgaatgaaatggtgtccatcgaaaacggcgaaatgaagccattaccagagcatgtgcatcgccattccatccctgatgttaaatctctacgtggcaatgcaggtatgagccaagccgagttcgcagaaatgattggtgccagcactgcaactgtccaaagctgggagctggcgcgaagggttccaagcggcatggctttaagattgctatgcttaattgaaaggaatccgaatgttgtagacaccctgcgtactatttga

SEQ ID NO: 378229 - DNA, 324 bp, Salmonella enterica
atggaatatttagagtttatcgaaacgcctacgttcagctgtttgagaaaagatctaatgaaagatgatgattttcaaaaatttcaaagttatttgctcgaacaccatgagaaaggcgacacaatcagccatacaggtggatgcaagaagattcgctgggggcgtgaggggatgggaaaacgtggcggagttaggattatctacttcgtcagaaatctaagcggaagaatatacttgctgttgatatatccaaagaattgtatggaggatctcacgcaagaacaaaaagcagaaatgaagaacatagttcaaaagctgaaatag

SEQ ID NO: 378230 - DNA, 267 bp, Salmonella enterica
atgggattttacactttttgtgtaaaactccccttcaagctcatccagtatcttttctttgacatcctcccaaccctaaaggacggggaggatttcaaaaacctctgcaacaatgttgcgtcgtcctcaaaattctgtcctttgcaatactttctgcttttaattgataccatagtgaaaatagtacacgtactgagtatgtgtaatttacttgcaatgcatactcagtacgtgtattatctgttcatgggcttagcggagcggtaa

SEQ ID NO: 378231 - DNA, 336 bp, Salmonella enterica
atgtacgcttacggtcatctcaatactgccctcactgtcgattctaaggttactagccgtagccagacgacaataccggcccctgtgcgtgaagcattgaaaattaaaccaggaacagatcatcttaaatatgaaatcttgcccggcggtaaggtactgcttagccgtcaggaagcgacacaagaggatgatgttatgaacgcatttctacaatttttagctgctgacataaagaactcaccgcagaatgtacagccatttgatatgtcgcgaggtcgcgaattagttgctggcatggatgttaacattgatgatgatatctgcgacgaggaatga

SEQ ID NO: 378232 - DNA, 462 bp, Salmonella enterica
atgaataacggattgccagaagaaattaatggctggaaaatttacgttcacccctgttttgcagatgtctacgaagccctggtagacgaggttgaggctttaaaggaaaaagaccccgacggctataagaagaaggcgccaacaaagcttttagccgtcgttcataaagttattgaaacagggattgcagcagacccttcctcgcctgcatacaggcaaggaacaacacttggaaacgaaaataaggattggtcaagggctaagtttggtaacggaagatatcgtttgttttttcgttacagctcggataaaaaagtcataatcctcgcctggatgaacgacagcaatacgcttcgaacatatggcagtaaaagtgattcttacaaagtcttcgagaaaatgctcaaaaaaggaaaaccaccccgtgattgggcaacgctgttgaaagagtcaaaaaaatga

SEQ ID NO: 378233 - DNA, 222 bp, Salmonella enterica
atgacagcaacgaaaaaagctgattatccggcagcagttgatcataacaccgctttgattgaggaactacgcgctaaccctgactatgcagatgcttaccttgctaacgccctgatagaaattaatgagccaggtggtttaggcggctttctcgttgccttacgccaggttgtcgaggcgcgggaagaatcgatgaaactaccattgtcagattgcagttaa

SEQ ID NO: 378234 - DNA, 510 bp, Salmonella enterica
atgggacacagcaacacaaaagggaacaaaaaattcctgaaggggcgctacaccgcacacgtagcgaaaggggaacgactggtttcagcagaattccagttaacatttcgtggacatgagcatttaagcgttcttgtgcgaacagctcagatcccggaaatgactcgcgaggatgttgaagactacggcccaaatggtattaaatttaaccagcatggtccgattcgtaattctggtgaattgcaggttcagtgtgtagaaacgattgaaggcgatatcctgaaattcatcaaggaacgtatagctgctaaggattacgtcgatattgagatggcggccacaccggaatcgaaagctaccagtgtcgatgttcctacaaatccgctcacgactatcgaaatgctggattgtaaaatctacagtgatgctatcgatatgagtacagaagacgttaccgctgcggttcgtccgcctttacgtatcgtttataactggatcgattgggattaa

SEQ ID NO: 378235 - DNA, 594 bp, Salmonella enterica
atggctattgaatattacggggcgatttatccgcaggatggcgtttcggagtacctgaaagtgtcgctgacaaatagctcgtactctgttactggctatatcagtcaaggggcggccatgaacatagctcaaagttgggaagctccattttcaggcatgaatatgggttcaatttccggggttattggtaatgcaggacaggttgccacaggacttacatctgttgctcgatggaattcaataatggtgtgggaaggtggaacgccaccaaccataacattgccgttaacttttcttgctcagtacaatccgtttatcgaggtttccggcgctattgctgcattaagtgcaatgattagtcctcagttaaaagatgtaaacaagccacttaagccggaaggacgcattcctgaaaaagtaatattgaatatagggcgtcggataaatttagtagacattattattcaggatttgagctttgatttagatgctccgcgcgacagttctgggttatttcttcgtaatacagttaatcttcagttaagtggggccagcgtttataacagttcagattttacaggttcattccaatag

SEQ ID NO: 378236 - DNA, 819 bp, Salmonella enterica
atgagcaaaaattactttgaatctggcacattcctgggaaatggccttgcccgattcgcaatgagtcaagatccggttcagttgctggagtctgcccgtacaagcgatacgccagaatctaaaccgacaccagaatctaaaccagctcctgcggctgctcctgttcagaaaccggcgccgacgccggaacctgctacccctgatccgctgcttgaaagccgtggcgcaaacatgacgattgaacaggttcatcagttaattctggaagcagcaaatcgtagcgctgcgcagaatgctttgagcaatgccgccgaagctgtgtttgcatgggcagatggcggcgatcactcatacgatgcgcttgacggctttgttcaggccattgccggtatttctgacgatgatgatgacgtcactgatgaacaggaggatgcctataacgatgcctggggcgatgttgcgaacttcctggccgcttgtggtgtaagtgatgacctgattgaggccctggctgatgatgaagatgatgatgccgctgacactgtgggttcggcagtgtcctctcttgacgatgaagatcgtgacgaactggaagccgcgttcgttgtggcgggttctgctgatgacatgctgactgaagcgtttaagaaggtcgttcgtaacggtgagattaagctcatcaaaaaacgtcttcgtaagaaacgtttaaccgcagctcaaaaatcagcgttgaagaaagcgcgccgcaaagcgcataccggcgccgctaaactggcacgtaaaaagtccatgaagttacgccgtaagcgtcttggctaa

SEQ ID NO: 378237 - DNA, 1599 bp, Salmonella enterica
atgtctcaatattctattcaacagacgctggggaatgcctccgctgtcgcggtaagcccgattaacgctgatgccactcttactgccggaattactcttaactccagcttgtgggcgggtgttggtgtatttaatcgcggtaagccgtttaccgttctgactattaacaagtccaatttgctcgacgttctcggcgaaccattaaaaccgtctgctggcccgcaatttgaaccgttgcgccacgtttatgaggcggtggagcaaacgtctggttatgttgtgcgcgtggtcccggatgatgccaaatttccggttatcacctttgatgacaaaatgacgccagcttataacgcgttaccgttcggttcggaggttgagctggatagtggcgagttattcggtatttatgttgacgatggcgacccgtgcgcgtcaccgacccgcgaactttctttcgcacttactgaaccggacggcgccggtaatcagcgtttcattctgaagctcacgcaaaccagctctcttggcgttgttaatacgctggaaacacataccgtttcgcttgctgaagaagcgaaggacgatatgggccgcgtttgctaccttcctaccgcgctggaggcgcgctcgcgttacctgcgcgcggttgtgaataatgagctggccgcttccgttacgctgaaggaaaagaaagacctcaagggcttacgttttgcgggtgggactaatggagatcagtccaaaatctcaactcaggcatatttgcgggcagttaaagcgctggataacgcccctgtgatgtataccgccgttctggggttgggatgttatgacaacgccgcaattaccgctctcggtgatatttgctccgatcgcctgatcgacggcttctttgatgtcaaaccgacgcttacttatgcggaggctttaaaagctgttgaagatactggtctgctgggcgccgatcacgtcagttgctgtgtctatcatttcccgttcacctgcaaagataaatggacgcaatctcgcatcgccttcggcctgtctggatctgcttatgcggctaaagctcgcggggttaagaaaaatacggatgtcggcggatggcattattcaccggcaggtgaagagcgcgccgtaatctctcgcgcgtccgttcagccgctgtatccggaagatgcgccggatgaagaaaaaatggttactggccgtttgaataaggtggcggtaagcactactggccagatgattattgatgatgcactgacgtgctgtacgcagaataactatcttcgttttcagcatgtaccgtctttgatgaatgcaatcagccgcttcttcgtgcagctggcccgtcagttgaaacataaccctgatggcatcactgaaaaaggtttgcagaaaggtatgacgaagctgctggatcgctttgtcgctgccggcgcgttagtaacgcctcgcgatcctgattctgatggcaccgaaccgtatgttttaaaagtgacgcaggccgactttgatgagtggcaaatcgaatgggcttgttgcccgactggcgtggctcgccgtatccagggtgtgccggtactgattaagtaa

SEQ ID NO: 378238 - DNA, 1704 bp, Salmonella enterica
ttgaacaatctgcatgactatcaggcacgtctggccgatattgcaaaacgctccaaagctgttttgagttggacgagtgccgcacagtttaaagacggcgcattcatcgctgatgataccgcccgtgccgccagtatttttgaagcggcgacaaaagacccgatctttgaaggcgtcaacgaaagcattaccggccagattgctacagcatgggccagcgccctggcggactattctgcgaagtataaaaccctgccgcgtcctgaagtgctggcatcctgccaccagacactggaaaactgtctgctggaatctgcccgtaaagacatgggcaataccaacaaggccatgttggaatccgtctctaaagacatgatgagtgtttccgatggggttatgcgccttccgttgttcctggcaatgattctgccgtcacagctcggtgcggctacttctgatgcgtgtacctatatcccggtaactcgcgatcagtctgatatctatgaaatcatcaacgttgcaggctcctcttttggttcctacgcggctggtgatccgctcgatatgcaatccgttggtgtttatagccagttgcgtcgtcgctatgtgctggtggccagtgccgatggttctgctaagaccttcacttttaaaatggctgaccatgaaggccaggcggtcccaatccgtaaaggccgttcaaacatctacgtgaaccgtattaagtctgctgtagataatggttctggcactctgttacataccttcactaataaagcgaagaagcagattaccgtaacctgctctctgaactacaacaccggacagattgatctgtcattctctgaagctcctgatgccggtactgaaatcgctatcgaagctgaaattaatatcgaagcagcgccggagcttatcccgctcattaaccatgagatggcgaaatataccctgttcccaagtcagtatgtcattgccgcagaacataccgttcaggctgcatatgaagcacagcgtgaatttggtatcgatatgggctctctgcaattccgtacgctgaaagattatctggctcacgaacaggatatgctgcgcctgcgcattatggtatggcgtacccttcataaagagcacttcgatatcgctctaccgcagacccagactttcgatgtatgggcgaccatcatcaagggtaaattccagacggtatatcgcaacatcattgagcgagttaaatcgtccggctctcagggtatgtttgcgggtgccgatgctgcgtccttcttcaagcagttaccgccttcttacttccagcctgcggaagattatacccagactccgtatgtccattttattggcacattgttcggtaacgtgaaggtgtttgaagttccggttggcgtctgtgaaaacctttctaccgaagggatggagttcaactctatggacgttctgtgctacgtgcgtgatgaaaatccgggtaaagccggtttcgttacgggggatgctgttccggcagttccgttccagcatccgaccagcacctctctggttaaccgtaccactctgtggggttctgctgttaacgacatgcatccgcgtaacggcgaggaatacttcacgaaggtttcgctgactatggcgaaagatggcggtattaacttcctgaccggtgaaactatcgacgctggcaagtctgcgtaa

SEQ ID NO: 378239 - DNA, 999 bp, Salmonella enterica
atgagcaataaaaaattacggcctgttgttggccgtgttttgggccaaacgatgttgtctgatagcgggcctgcatccgctgataatacccagccaacgcaggttttcaccttgtccaccgggcgacaagccacgtttgtcgagattactgtcccacctgagcgcgtagagggtgaaacctttgttgtgcaggaaaacaacgggcgcgatcagtcggcattaacgccagaatcgctaaaaaacatcacccggacgatgagattccagcagttctaccccaccattggggtcaggagagaaggcaaaattgaaatactcgatggctcccgccgtcgcgcatcagctattttgtgtaaggttggacttcgcattctggttactgagcaggatataactgtggctgaggcgcaaaggctggccaaagatttacagacatctcttgagcacaatatccgtgagattggtttgcgtctgatgaacctcaaaaacaacggaatgaaccagaaagaaatcgccgccagcgaagggatgtcccaggcgaaagtaacgcgtgctcttcaggccgccagcgcgccggaggaattgattaccctcttccctgttcagtcagaactaacctattcagactataggcaactgtgtgttgtcgctgatgagatgggtaataaaagtctgccacttgatgagttggtgagcaatatttctaatgaggtcgataaggtccaggccgacgaggaactggctgaagatgaggttaaaaaccaaatcatgaagctgattaccaaagaggcgcaaatccttacggttaaaggaccgaaagataaggctattgtgtctgaattatggaaattcgatgaaaggcatcgctatgcgcgcaagcgggttaaagaccgggtagtatcctatgagttcagtcgaatccctcgcgaattacaggatgaattggatcgtatgattaatcacttactcaaaaaaaatctttccaagcctgaaaactga

SEQ ID NO: 378240 - DNA, 1197 bp, Salmonella enterica
atgattgacgtaagccaacttcagaaggttgctcaaagagcaaacagaatgcttcatttactgacagatcaggttcagcagcaaaaggatgagtatcacactaatgagtttcatcaggtgtatgcaaaagctgcattgtcaaaattacctaagttaactcgcgcaaacgttgattacgctgttagtgaaatggaagagaagggctacgtgttcgataagcgtccagccggcagttccatgaagtatgcgatgtctatccagaatattatcgatatctaccaacaccggggggtgccgaagtatagagatcgctatgacagcgcttacgttatttttgtcgctaaccttaaaggcggggtgtcaaaaacggtgtcaaccgtttcactggcacatgctatgcgggcgcaccctcaccttctgtttgaagatctgcgcattctggtcattgaccttgacccgcaatcatctgcgacgatgttccttaaccataagagcgctgtcggaattgtaaacaccacgtctgcacaggcaatgttgcaaaacgtcactcgcgaagagttactggaggagtttattgttccttcagttgtgcctggtgttgacgtcatgccagcatctattgatgacgcatttatcgcttccgactggaaggatctatgcgctactcacctgtctgggcaaaacgttcatgcggtgttacgagaaaacgtgattgataagctgcgtggagattatgacttcatcctcgttgacagtgggccacacctcgacgcattcctgaaaaatgcgctggcatcggcggatattttatttaccccgctgcccccggccacagtcgatttccattcctcattgaagtatgtggcgcgcctgcctgagctggtcaagctcattgcctccgaaggatgtgaatgcaagctggcaaccaacatcgggttcatgtcgaaattaagtaataagcccgatcacaaatattgtcacagcctggcaaaagaggtctttggcggggatatgctggatgtggttcttccacgacttgatggctttgagcgctgcggcgaatcgtttgataccgttatttccgccaatccgtcaacttatgtcggtagcgctgacgcgctaaaaaacgcgcgcatcgcagcagaagactttgctaaagcggttttcgaccgcattgaatttatcagatctaattaa

SEQ ID NO: 378241 - DNA, 861 bp, Salmonella enterica
atgagccagtcatttatttcagatatcctttacgctgacattgaaagcaaggcaaaagagttaacagtcaattccaacaataccgttcagccggtagctcttatgcgcctgggggtttttgtccctaagccgacaaaaaaccaggctgacaacaatgagattgacgcctctaaagtgttctcacagttggagatcgcacaggctgaaggctatgacaatatcaaaataactggcccccggcttgatatggatactgattttaaggtgtggatcggcgttatttactcattcagtaagtacggattgtcatccaacaccatccagctctcgttccaggaattcgcgaaggcctgcggctttccctcaaagcggctggatggcaaattgcggaacgtcatccatgactcactaggccgcctgcgcaataaagggatctcctttaagcgcggtaaaagcgcgagaggaagttacaataccggtttgcttaaaaccggttacttcgatgccgagcgtgatattgttgaactggaagctgactcgaagttgtgggagattttccagcttgattaccgtgtgctgttgcagcagcatgcgctccgggcgctaccaaagaaagaagccgcacaggctatctacacgtttattgaaagtttgcctgcccgcccgatccctatttcatttgcgcgcatacgtgaacgactggctttgatgtcgtctgtcagcgagcagaacagaacgattaaaaaagctattgagcaattaaaatcaataggttatctggactgtacgatagaaaaacaagggcgagaaaacttcatcattgtccactcccggaaccctaaattgaagttaaccgattaa

SEQ ID NO: 378242 - DNA, 363 bp, Salmonella enterica
atgactgatattgagatcgaaaaagaaattcaggccaaaggtaagtcagcgtcgcgtctgacgccggatcatattgaatcggttattgttagtgaacactacttcaccgcaagtgacggttacgctggcgcagcagcattgaatgctcaggaaggagagctaattgttccgccggagccactggatctgcttactatctgcgtcctcattcttcgaaatggcttcacagttactggcgaaagcgcgtgtgttagccctaagaactttgatgctgagatcgggcgtaaagcggcgcgtcagaaggctatcgataaaatctggacgctcgaaggttatttgcttaaagagaagttggcgcagtaa

SEQ ID NO: 378243 - DNA, 141 bp, Salmonella enterica
atgtgccgtatgccggagtttcgtagtgagtattttgatgatctgccagcatacatcctgaatacggaaactatgctgtcatccatcaaccgtaaaaaccgtaatgtgaacaactacaaccgcgcgattggcggtaattaa

SEQ ID NO: 378244 - DNA, 423 bp, Salmonella enterica
atgtcgatattttccacgctgaaagaggcgctgtcgttgaaagaaaaactggtggtcggtgctggtgctgcgctggttatcggaattgtgattgctggcgtggtatgggagcaccgtcaactaatacaggccactgaaaatttaggtcgtctggatcaggttatacgcgaacgagacgccactatccagattcagaatacggcgattaacgcgctaaacgacgcacagaaggcttttcaggttcaggaggcaaaagacgatgaagaacaggcgaaatacgctgataagcaggaggaacggaaagaagaggtccgtaaacaactgcatgcggcaggtactgctcgccagcgtattcctgctgacactcaacggctgctcaggcaatcaatcagtgaatttaacgtcgacgccggcagaggttaa

SEQ ID NO: 378245 - DNA, 783 bp, Salmonella enterica
atgctggagaaggattaccagttagcggcatacaaaaatcttgtggccgccggcggcctgaaaacaccagatgcgatcgcgacatcaatcagctgcgcagcggaagcgaaaaatctatctgaccagttggcggggcttgtgctggaaacagtgacttatcccgacacgatcgccagcaatgttattacgatcactgatacagccgatactatgaattccaccagccagatggcaaaagagcattcagatttgctggctgctaatgcggatctttcggtgctgttacagcttaacattggttgggatgtctactgccgggcaaatacgctggaagccactgaactaccgatttctgtcgccatcgacgataacgtaacccctaaaaccctgctggacagcattaatgcccttgatattgatgctgtcgtgactgccatgaccgaaataaatcaggtactaaatacgggcgcaggaggcgatacaggcagcggagcgacacaaccagccccttccctgaccagcgaccagatcgatgcgctggcagccgcctgcgaaagcctggcggcttctgtaagtaatcttgctgctccacgcgatgcactgaaggcattgtttgataaagccgggcagagtgtcagcaccagtatgcaggcctatagcaatgccataaatactgcgctggcggaggcatctgcaaataacacaagtacagcaagcgcggtcgtagccctggtgccgaagagtgtgatggatgagctgaaaaaataccggactgacatatga

SEQ ID NO: 378246 - DNA, 285 bp, Salmonella enterica
atgtcggcgatagctacaaaaaacagtatctgttcaggccacggagggtttccatctcgcccgcccgtggaaagtgagtcattgttgaaaattaacggtatagacgtgctggtggatgcaaatcagtatgcgcagcacagcgatggaaacagcacgcacggcgggcaggccatatccacccgcccgtggttcacagtaaatggcaaagcggttgtctgtgtgggagatccagtctcatgtgggtctaccgtcgcagccggtgacgcattagtacaaatcagttag

SEQ ID NO: 378247 - DNA, 285 bp, Salmonella enterica
atgaagctgattagtcgaaaagagttcgatcgccgggttacaagcggcgaactcgacaaccttcaggccgtcatggtcaaagaaggcttttgcctgatcgccagcaaggccgattccccggatgaggatgttttcatgctccggcgaactgacaaaaaaccctatatctggaacaacgagctggggccaagctcctatgccagaactcgcggctgctccagcctgaccgttttctatcgtgaaaatctctcggttagctcaattcaaggactaatgcatgtttaa

SEQ ID NO: 378248 - DNA, 909 bp, Salmonella enterica
atgtttaagcaatggaaaaaactcactgtttattcactgtctcgcgacatcgaaaaccttatcgaactggaagataaatcgaagcagatcctgtttacgccgtgctgtagccaggatatggctaaatttggttttgtttctccgtttggtgagcattcggacgccgccgcaatgcacggtaatggcttcatccttgtcgaggctaaacgtgaaacaaaaattatcccggcgccggttatccagcgagaacttaccagcaaggtagaagaactggagcaggagcaggcccgtaagttgaaaaaaaccgaaaaagacgccctgaaagacgaagttctgcactcactgctgccgcgagcattctccaaatttactactacccaggccatttacgacggttccactaagcgcatatacatcaacgctggcccacgccaggcagaagatatgctggcactcatgcgtaaatccctggggtcattaccggttgtgccactgaccactgaaaaccccatagagctgacaatgacggaatgggttcgtagtggcaatgctccgcagggctttgtcatgggagattccgcagaactgaaagcgttactggaagatggcggtattgctcgcctgaaaaaacaggatttagtcagtgatgagatattcactcatctggaagcaggaaagcttgtaacaaaattgtccctgaactggcaggaccgaatcaaatttaccctggacgataattttggcctttccagtctgaaatttgctgacgagctgatcgtccagaatgacgacatcgatcgtgaggatgttgcgcagcgtcttgatgctgatttcttgcttttaaccagtgaactgtcctgcctggttgatgcgctggtatccggtcttggcggtgaggctaagcgttaa

SEQ ID NO: 378249 - DNA, 2502 bp, Salmonella enterica
atgagtagtctctcttacggttctgtttgtagtggcatagaggcggccagcatcgcctgggagccgctgggtatgcgcccggcgtggttctccgaaattgagcctttcccttgtgccgttctggccgaacgttggcctgaagtacctaatctgggggatatgaccaaaatagcggcatctgtcgccgctaatgaagtagccgcgcctgacctgctggtgggcggaactccatgccaggcattctctatcgccgggctgagaagggggcttgctgataagcgcggtcagttaactctcgcatatgtggaattagtaaatgcaatcgactatagccgtatcaggcaaggcctaccacccgccatattctgctgggaaaacgtacccggcgtcctctccagtaaagacaatgcctttgggtgcttccttgccgggctggctggagaagatgaaccgttcgaacctggtccacgacctgagcgaggaaaaaaaagcacgttctggcgctgggacaaaaaagcccgcaagcattatccaaagtggccacagtctggttgtgttgttggacgacagcgcaaactggcctggcgagtccttgatgccgaatacttcggtgttccacaacgacgccaccgcgtcttcgttgtcggaagtgctggagaagggttcgatcccgaaacgatactttttgagttcgaaggcgtgcgtcggaatactccaccgagcaaaaaaacgtggcagacggttgccgcccttactgcaaatggcgttggaacatgtggtgcagacgacaaccagggacaagcaggacatcttcaagtagtaggcgcgctcgctgcccactcattcacggggggcgcgggtggtcggccagaaggtgctgccgccggacattttatccctgtcgcggtcatggcccacgggcaaggtggcgcggaaattaaaactgatgattctgcccctacattgacctgcaaccatgaagcgccaattgttttcagtagcactggtgccggattctggagcgaggggccaggtactttgcgagcccgtgaacaggaaagccatgagcatctcgccgtattagcctttcctgcgtatatgagcagtacacaatatgcgtcggctgaaggtgtgtcgccgacgatacagtcccgcaatcctactgcgatagcctatggctttcagccacggatcgcccgcaatggacgcggtgatatgggcgacatttgccatacattaaatgcccaatcaggtggtacggggagaggggattctgcaccatgtattgtgcaggcttttactgaaaacagtcgtggagagaaacatcttcaggatagtaatggtctggtatccggcctgctttctgcgggtggcgggaaccccgaccagggctatccagcgattatcaacggaatgtcagtacgtcgcctgactccacttgagtgtgagcgtcttcagggcttccctgacttccacaccctgatccccgcaaataagcgcaatacgttaatcgctgatgagcttgcgtatctgcgagaacatttccctgacatgcctgaagaagaggcgcaccgcctggccgccgacggcccacgctataaagcgctcggcaactcaatggcggtgccggtgatgcgttggattggcaaacgcatcatcgagagattgtcaaaaaccactacgccatctgtccgcataaagccattcctgaaatgggccggtggtaagttcggcgtgattgatgacttgctggcgcacatgcctcatgggcaccgtctggttgagccgtttgctggtggcggttctatcttccttaacgccgggtttgatgaggcgattgtaagcgacgcctgccaagacctgatcctgacataccaggtgatgcagcgtgagccgctggcgctaatcgacaaagctaacgtaatgttccgtgaaggcaacaacccggaatactttgatgatatcaaagtacgttttaatcgccgcgacatgacgcagatggagcgcgccgccgcctttatctacctcaaccgccactgctacaacggcctcatgcgttacaaccgccagggcgagttcaacgtgggatttggaaagtatcgccaaccatatttcccattagccgaactggaagctttttccgccgtagcgagccgctgtaccttcgccgttgccgattgcaatgacactgtggcgctggcgggcgagggggatgtggttttctgtgatccgccgtatgagccgatgccgggcaaatcagggttcacgaattacagtggacaaagcttccgttttgacgatcaggtacgtcttgcgcagtcactgaaagccgcccaccagcgcggcgccagcgtggttattacaaatagtggagccccggcgattcgtgagttgtataccagtatgggatttgatgtaaggccgctacgggcgcgccgctctatatcctgtaccggggaaacgcgagaaactgttactgacatcataggagtattagcttaa

SEQ ID NO: 378250 - DNA, 699 bp, Salmonella enterica
atggccagaactacacctcctcacctggctttagctctggatcgcgtaaaagcgtttgtgagcaaacatccgaatggcgttgatgtgaatgatctgctgaaggttgaagcgtatacgtttctcaacaagaaggcgcgtaagcagttgcttgaggtgatcgagcattataaccaactggtggtcatccgtacgggtaagcccggtcgggagagcatttggttacgtcataaacgttatttaactgagcacattgaagaaagaaacggtgatgacacaaccgaaccgctctatacatgcgctgaatgtctgaaagaaaagcccgcgggcgaattctatggacacaagaacaagtccttcagatgtaaagaatgtaccgagcgcctgccggcgcagattaagacagcccccgttcaattatcgtcagatattaaagacaaggataaagaagtgattgtaacgaaacaaaatctctctccacttgagctacgcaaaaaagcagaagaacttctgcgccaggctgaagaaacagaacgaaccataacggcgaaggatgtgtttcagaagcagcttgaacctgttcgtcgcgaagtgcttcttgcgcataccaaagtaacgaaagctgttgaggcgatggttgatggtatggccgagtttgacaaggctgtggcaaaactgcgtgagttcaaaatcatcccataa

SEQ ID NO: 378251 - DNA, 129 bp, Salmonella enterica
atgcaaattctacaactcatatttgaccatccagtctttaccattgtgctcttgttggttgtcttttccggcatagaagggctaatcaaagcaagcaagcgccccaagtctaatgtcaagaaaaattga

SEQ ID NO: 378252 - DNA, 1359 bp, Salmonella enterica
atgggtgaaattaaatcgccaccgcattctattgaggcggaacaggcagttctgggcggtcttatgttggataacggtcgctgggacgatgttgccgaacgcgttgttgctgatgacttctatcctcgtccacatcgacagatttttatagaaatggggcgattgcaggaaaacggtagccctattgatctgattacactgtctgaatcactcgaaagacagggggcactagatcgcgttgggggatttgcttacctcgcggagctttctaaaaacacacccagcgctgcaaacatctgtgcgtatgcggacattgttcgtgagcgagctgttgttcgtgagctgatcagcatatcaaaccagatcgctgatgcgggctattcgccaaatggaagaagtagcgaagaacttttggatatggccgagcggctggtgttcggcatcgcagaaaagcgccagaaagccgatgcagggccgaaggatattaccagcatcctggattccacagttgcgcgcatagaagagctgtttcagcgtccacacgatggtgtaaccggtctggacacgggatttacagacctcaataaaaagacggcaggccttcagccatcagatctaatcattgtggccgcgcgcccctctatggggaaaaccacgtttgctatgaacctggtggagaatgccgccataaatagcgataaaccagcgctggtgtttagcctggaaatgcccagcgatcagttaatgatgcgatcgctggcatcactatcccgcgtggaccagacccgtattcgtaccggccagcttggcgatgaagactgggcgaaaatttccggcgccatgagcattttgctggataaccgaaatatttttattgatgactccagtgggctgacgcctaccgaactacgttcccgcgcgcgccgtgtctaccgggagaacggtggacttagcatgattatggtcgattaccttcaattgatgcgagttccggaattaaaggaaaaccgcacgctggaaatcgctgaaatttcccgctcgctgaaagcgctggcgaaggagcttcaggtgccggtagtggcactgtcacaacttaaccgttcactggaacaacgcgcagataagcgcccggtgaattccgacctacgtgaatccggcgctatcgaacaggatgctgacctcatcatgttcctgtaccgcgatgaggtttaccacgaaaactcggatcttagaggtattgcagaagtgattatcggtaagcaacgtaacgggccaatcgggaccgtgcgacttactttcaacggccagtattcacgatttgataactacgctggccagaactggaacgaggatgattaa

SEQ ID NO: 378253 - DNA, 297 bp, Salmonella enterica
atgaaaaagtttatgaacgtcacaatgccggacaatagcgtatggcaggttcctactgatgtaatagccaataactgcgcagcatattatgccaaagaacatggaattacgcttgaagaaagcctggagaaatacacgcttcctctttttcagagcgacccttacgagatcgaagattgggccgagaacaatatgaactggagcgatgtactaccgcatgcaactatgattcgtgctggcgaagtggattatgatgatggttgggctaatggcgagaaaacctttatagaggcctga

SEQ ID NO: 378254 - DNA, 213 bp, Salmonella enterica
atgaaatatcgaattgataaaagagctgccccatgtggtcagcctgtttacatggttcaggggctagtgggtattttccgtaagcaatggattgatctcacggtttcgggactccccgcgttcagatttggtgggggtggcgtcgcgttggcgacaccatatatgaccagagttgatgcagaacgagcgataattcgttttgcgggcttataa

SEQ ID NO: 378255 - DNA, 609 bp, Salmonella enterica
atgggtaatttcaacgggaaatatcgcgccgtcgttgtcagcgtcgaagatcctcaaggcctaatgcgtacccagattcgcgttaacggcctgatggacggcttaccggatgcctccctgccctgggcagaaactattcttcagaacgcaaataccttttcgccgttcctggcgggtgacaaggtttgggtggagttcccatacgatggcgactctcgctggccgcttatcatcggtttcgctcaggatgcttcaggcggtgcgccgaacgttcccccagaagcatccgggcaaggtactggttacacgccgcctgatgttgatggtgcgccgtctatgccatccaccagcgcgaccaaagacttcatttactcccgtaatggcttaatggagataagaaatgccggtggagcatggtctgtaactcatttgggtagcggtacaacaattggctttaacgaggccggggaattgttcgcaatatcacagggaggcgcattcatttcggctgccggtgatatgaatattaaagctggtggcaatatggggattgaggctggtggagtgctgggtataaaggcagcagaagttaaagtggataaaggatag

SEQ ID NO: 378256 - DNA, 1017 bp, Salmonella enterica
atggctactaaaaccacatcggcccccgatgccggttcaaaacgaacgcagctatttttacagaccgtcaagattggggaaaatgagatcccgcgtgaaatgattgtgggatgcgtttatgtcgaaccaggcaaactgactggcccacaactcatgttaacggtgcgtgatagtacagcctatatcgtgaataagatgggagttaaatttggcaccattttaaccgcttcttttggcgatcccgaaggcatcggcggccaactattttctgaagaatttttcgtcctcaaagctcccaggaaagacgataccgtgatggtttatgcgttcagtaatcaggttcgcctgatgaaagaaccggccaccagcccgcagtatttcgtagacaagcagccatccgctatagttggagcgctggcgccatcgctgaaggttgttgctgactcattcaagaaaacgtctacctatcatctcaacgtcggagagaagcctacacaggtgcttcaggatatgggccgggataccggttctatgtgttgggtatctcgcagcgcaatcaatttccgcagcctggataaactggctaatgcagatgcaactctcacgtatgaatccgggaacccgaataccaaaggattgacgatcagtcagttcaacattctgaatgccgattatgaataccaacgccagcataattaccgcatggccagctatgacatgactaaaggcgtagtgtattcagggagcaaagacgcgccaattaaatttaccagtaacccggacccgatggcgctggccaactacaacaaattcctgatgccccgcttcgatatgctggtggagggcaattctcttttaacgccgggagcagttcttaaagttctggtacacagcatgaatcaggatggcggactggatgaatcggtgcctgataaaatggtagtgctatcggcaacacactttgaagatcgcttccggtacatcacgcgggcgcagttaggagtggtcaatgggtaa

SEQ ID NO: 378257 - DNA, 792 bp, Salmonella enterica
atggcaacgctgattaatcaggaatggttactggcgatattccgcaaaaagcagttaaagccaaccggcaaacaggaattcgtccctgttgaatgtatcgatacagctttcgctgccgcccttaatgatgcgtttgaacctcttgttatctcggcaaccaaccggatgaataagtcgttctccgcgtttcttaaacgttctccacgcgatcgcattacggtcggttcattcaatgacataaaagagtggtttgcggcagttgaggcttcacgcgccggccgcaaagactccactcgccagccagtaaacaaacttgccatgccgctggttaacctatcccgatcgccagccttctccatttatgaaggggaattaagccgggatgtgtttaatgatggtgaaattactgatgagaatggtgttacttccgcgctggtgtccactatcccattttcactgaattattcactgtggatcgccagcgatgaaaaagaatctttaggaatggtagcgagcgcgtttgctttctggcttcgtttatacgccagtcatgggcaagccagctttacggccaccagcgtaatcagcgacgtcgaaatgccgataaattgcgtcatcgagggacaaaaatctatcgcattccaacccttcacttccggtacagaagaggaccgaatatttgctgttgggctcgacatgacggtcgttgctgatttgccgttgcttacatatgtcgaacaggtagacgcaaaaatcacggttaaagcgaaagtccaggacgggccgcaataa

SEQ ID NO: 378258 - DNA, 741 bp, Salmonella enterica
atggctggttttttcgacgatatgtttgaagacggcgatgaatcgccacatgtgaccggtgatattttcccggaagcacctaacgaagacgccagcgagctggtggacttcaataaggaagattttactcaggaggaagaggaaaaagatgctggaaacgaaagcgatggtgtggacattgggaattttattgatcctgtggagaacactaaccttccctgtctggatcacggcctgcttagtgactctggcgtgcgcagccgttatgaaggtcatgcagtttttaatgatcttgtgcggatggactggctcaaagccatcaaattagaccctgattcattcgatgcggtgttatatcgttccgtcccgcatcaaaggacagacattccggatactgcgtcggaggttatcgaacctaatcagcaaatttatgattatcaggaacctgaactaattaccgttctggactgcccggatgaaatggattccttccgttcactctacgacggcagcgacaataccggcataagcgaaatggctctcattttacgcctgtctgcgactaacgtgccggtgggctctatgctggaatggctggagcaacaatctgatggctccagtgtgcgccggttctggtacatacatcgtatttttaactatggaaccgcgaaggtaggcagcctgttttattgcgtaccgtcacgggcatttgagggaaatttttatggcaacgctgattaa

SEQ ID NO: 378259 - DNA, 1218 bp, Salmonella enterica
atgccggttgaatacgcgcgcaacgaacagggacgctaccagaccgatgggttaagcgctaaagacttccatcgggtatttgaactgattcaaaaacagcagcgtaaaaatcgccgtaaagcccgtcggacgcttacacctcgcacaatgggtaagcgtaatcgagatctggacgcctttcttaacctcggcaagaaaaaggatggcacctacttcaccccggaagacatacgcaattttgatgcagccaggaagacgcacaaaagtaatttccgaaatacggttccgggcatcacgtatgcgcagctggtagcacaatccaccagcatagatattaaacgggctaataaccgcgtttcagacggcacaggcatcaaagcggcgaccttcctcggcattaagcacaacctggctgtagtctccgtcaaagcatctgaagagtcagtccaccagcatcaccgcgtgcgtattcgtttcgaagaatgggatcaggcagtagaggatatgggcgaagacggcgcaaataaagcgcggatcgccgctgacctttgcaaagggcgcgtatcgttcgactgtgattgtggccgccatcaatactggtatcgctacatggctaccgccggtaactatgccgtcgcgccaccaaaagaatatgccttccccaaaattcgtaacccggatcttactggcgttgcctgtaaacacgtcctgcatacgatgacccgctttcagtcatccacctggcaccgggcgatcattaacgcactggagaaggccgctaaacaggtagcgtttggtgatgacaagcggaaaacgaccacgttcttcaagggcgagatagccaaagcgttagcacgcaacagaaccacaacgacagatcaggccaaagctgccagggagtttgaacgttatcagaaagcccaggatgcgctggataaaaaacttaaatcacccagccaggcaacggataaagtccgccggttgctgaaaaaagccaggacgaaggccaataaaaaagaggctgaattgcaggccgcaaaagcgcgagaggaacaggcccgcaaagaagctgccgcactgaaaaaaacgcttcaggcacaagctgataacctcattaaatttttcatgagtcagggcatggataaagcggctgctacagctcaggcaaaggctattctgcaaacgcagattaacgaagcacggaagcgaaaaggataa

SEQ ID NO: 378260 - DNA, 261 bp, Salmonella enterica
atgtgcgaatctaacgaccagaacctgacaatctactatgtgctacctgatgagcaataccgtgcggatttgatcgcgtatcgggtgtggggtattgaggaactacgttgggtagttactctggccgccggtctggaggatgaatctcaagggatgatggtcggacagaaactaaaactgccgccggcgacctgggtacgtgaaatggtccgtcatttccagtttgacggccaggtaattggcactttatcgattgcgtaa

SEQ ID NO: 378261 - DNA, 642 bp, Salmonella enterica
atggataagaagatttgtgtcgtgtgtcttagcgtaggaaaaccggcaatgcttacagccgcctgggttaacgacgaactgattatggccgagcgtaagaactatccggaccgccggcgcgcaatggagcttgagctgctaaaagatctccgtgagaaagaagaaaaaggctttatcgtgctggtggatgaagaaaacagtttcatcaccgggcgcgttggacagcgcatccggctacgtgacgaccacacaagcggatgccctgtgctggttgaagcaatgcgtatttataaagaactggaccggcaaaaggctatcaagcgcccacggcaggagtcagggaagtacattctgcatcaaagcattttcgattctgaccgggataaaaaaggcgaggagttttacaatattaactggcaggagctggaaacagaacacgtcctgacactcctgtgctgttatgcgacggaatacaacaacaccgccagcgcagatttcataaaatcaatgacaggtgaaatgtatcgccatcacgaaacatcactgattgaccctatgctgaatatcatacgcggagtgcaacgaattagcgaaaagcgcgtaccgcaagggaaactcacagggaaagggaatattctctga

SEQ ID NO: 378262 - DNA, 666 bp, Salmonella enterica
atgacccattctgaacttaacgaaattgcccgccgttggctcctccgcgctgaatcagcgcgggggccagggtgcaagatagcgttgaatgaggttggcgctgtgggcgatacagaacgtgccgatgcatggggctatcgatggggatggagaggcggcagtgtgctggtggaggtgaaagtatctcgctccgactttctgcgagacaaacataaaccgcaccgtcagcacggcgggctgggggattatcgctattacatgtgccccgaagggatcattaacatcagtgacctccctgatcgctgggggcttctgtgggtaaataagcgcggacacgtcaagctgatggccgggcatatctgctgcctggtgggtaatagctggggtggcaaccgtgatcttgcttacttctggcagcacgaaacagatatggaggtagagcgtggactgctggcgtacatgcttcaccgcgtaggcgatccagacaccctcttacaggagcagcgcgcctatctgcgaatgaacactcaacaggcgacaaagattaacgagctggagaaaagacggcgtgaagactctatgacaatataccggctacgtcgcttactggagaagaatggtattgctcttccccaccatattgaaagcagactggatgtattatga

SEQ ID NO: 378263 - DNA, 519 bp, Salmonella enterica
atgagctttgatattaaagaattaactgaaatagatctggaatcagccgatttttctgatgcgcttatgtggctgaaggaaggtaagcgtgttacgcgtaaaggctggaatggcaaggggcagttttgctggatggtgccagaaggtcagtatccggcgcgaacggaagctatcaaaggacatttccccggcgatatggtgccgtatagcgcttactttgccctgaagaatgctcaggacgctgtggtgccgtggcagccgtctgtgggcgacctactggctacggattggaaggtatatgatgtgccggtgtcagacattcccccctaccaactgcgcgtacgggaagaactggcgcaggtgagcgatcgtctgaataaactcaatgcgtttatcgacggtggcagcgagacatttgccagcctgccttgtattgagcagtcccgtctgcgcgagcaagccacgtatatggctgattatcaggacgtgctgatcaggcgtgtgattgcattttcatga

SEQ ID NO: 378264 - DNA, 252 bp, Salmonella enterica
atggatctgacgaaacaacaagtacaggtgctaagtcgcctggcgaacggtgaacaggtgtttaaaggggaagacgatgtatatcgctggagcggagacgctggtggacaagtctgcactgcgccagtgaaagcactgttgaaactgaaactggtacgcattgcgaaggtaaaaggtggaactgttctacgttgcgccgttaccgctgcgggccgggattacctgaagaattcatgggataaccaaaaatga

SEQ ID NO: 378265 - DNA, 552 bp, Salmonella enterica
gtgatactgacggaacaacaaattgaacggcgccggcagcgcgcaattgaggcaaagaacagagcgattgccaaacagcgagctaaaatgtcagacccggcatggcgtgcggaacaatatcaaaaacgtcgtgatgctgaaaaccggcgccgggagcgtatgcgttcttctcccccaccagctaaaccccgcaaaccaatcaagtctcgcgggttaaaaggccgaacaccaacagcagaagaaaaacgcatagccaatgcgcttggctcccttccctgcatcgcctgctacatgcatggtgtaataaacaatgtggtgtcgctgcatcatattgatggccgcaccgcgccggattgccacaaaaagcagttaccactatgcaactggcatcatcaatacgcagcgccaccggaaatacgaaaaatttatccgtggctggtgcctgtacacgcagatggcaatgtcggggggaaatctgaatttttccgccttaataagccagaaagcgatctactggttgatgcgtatcttcttgctggcttattagtctaa

SEQ ID NO: 378266 - DNA, 327 bp, Salmonella enterica
atgctgaaccgttttttcctcttcatgttgccgcttaatatgcttgtatcagtggttaacgaccagtcattatcaatttggtggctgatgtttctttcctgtgggtttatcgtcgtgtttgcgcttgaaaaacgccggtattctgctgaaatgcttgctcacgacaacttcatattagaagttcagcatgaacttcttagaggcatttatcgtaaacgctttaagagaatccttcagcgcaacaagtgggcgataccaggatatgagggagcggcagctatcgcgatgacacaagaatttatgaaggaatggttacatcaagaataa

SEQ ID NO: 378267 - DNA, 462 bp, Salmonella enterica
atgaatatgaatatgttgatgactaaagttgacgcttcgcaattgaccggatccgcccttgattgggcggtggctaaagcgctggggtacacgatctttatggcgaaccacgattgtggcccttactgctggcctggtaacggccacttagcggcgctgacatcacagcataccgtgatcattgtaggcgtaacgggccatatcagcattgagggaccagataatgtggaaacctggcaacctactacaaagtggtgccagtgcggtccgctgatcacccggtatttgattgagctgtcgcatgagctggtgggtaatgataagagcgtatggtatggacacagcgacatgctggatgaatggtacagtgccaccagccctacagaggccgtatgtatcgccgctgtaattaccatgttgggcaaaagcgtggaagttccaacggaattattaaaggagtaa

SEQ ID NO: 378268 - DNA, 825 bp, Salmonella enterica
atgcctaatcacgttacgaatgaaatcagtgttattggcgggtcaaataagcaacgccttgcattcatccgcgccataacaaataaacacggattgctcgatttcaacaatatcactcgtatgccgaagagcatgcacattgatgaaagttcagatgtcgagaagatggctacagccattgctggcaaacccatgactgacttatttttcgatgatgtcaaaaccgttgaagaggtcatcaactcgcttaaagagcgcggtgctgtatcgagctatataaagaaagtcaaagaacaggcgctgatgcggatagataataaacagcgttatggtttctattcctggtatgactggtcacgagtcaaatggggaacaaaatggaatgcttatagtgtagaaatgccggtggagcgcaagcgcgaacggattaagcacggctttaagcatcgtccaactcacatccgcgcatactgtaagcgcgtctttaagaaacaacttgcccgacatgctgcaagcggggctccattgatcatccgtttcgagacggcatggagctgccctgagccaattttttatgagattgccagacggttcccgcatcttgagtttcatattcgttatgcagacgaagatatgggtagcaactgcggttctgttttattaaaaaatgggcgatgggactgtgattatattgccccaagatggagtgaacaaacggaagaagagcatctcaaatggagaaagttcgcttttcaggtgcgataccccggcgatacacctcaacagcatggcatgaatgatgaatatgaatatgttgatgactaa

SEQ ID NO: 378269 - DNA, 612 bp, Salmonella enterica
atgggaaacaaagaaatcgtaatgtatgactccccggaggcggccagcattcagacgttaactggttgggtagatcgtcatggcagattttggggcgatgatgaacatatggcgcgctggtgtgggtctacacaccaaaaatgtgagcggaatccagaacaccccattcgtgagaatcgcggctactgtgaagcctgccgcgatgaacgtcagcaagcactttacatggctatggagcggcagccgtgggacggcgatacaatactgcacttgcataatactgacgtctattttcaagatatggagagcattcgcgaccactgcttagaacggcacgtattaccagaggagctacagctggtggtatgtaacccaacttacccatcggagatcgatggttgcgatcacttttgtgatgatttacctgaagacggtgaattaccaagtgaactgcaagaagcatttgaccggctgaacgaagttattcgcaagtgcccgccgctatcctggttcccaggcgagattgccgccattttgcctgatgatgtactgagcgctgaagagcgtcatggtattgaaatagcgcgtcaggagggtgcccaaaatgcctaa

SEQ ID NO: 378270 - DNA, 159 bp, Salmonella enterica
atgagaaggattgctgtagcgctggtaggtctggtgatcggctggcacatctggaaagtttttcaggactacaacgcggataaagcaggcgtttttgttctaatcattttggctttatctgcgctggtggcgctttatcgcactggagataaagactaa

SEQ ID NO: 378271 - DNA, 318 bp, Salmonella enterica
atgataaagcggaccttcaacatagatggggaaacggtatacctggtggcaagcccggcaaacggaacccccgttgtcattgtcggtctgcggttatctgacaacatgccagatctcgccagtataacagtggaattccccatgaagagcctgtgcagcgcggaagccttcgtgagcaatgctactgatgaaactgcccgccgggggcttgataagctgaaagcggaatatggggaactaatcagcatggttaacgactgcctgagccgtagtacgacacaatcgcggctgatgtccacgcgagggaaaatacaatga

SEQ ID NO: 378272 - DNA, 1029 bp, Salmonella enterica
atgaccaattcgttaaccgttcatcaaaatttaccggcgttacctgttgagtctgtcaacgaagaggttcgtcgaaacctgaatgcgatgttccgtgataaagaggcgttttccgaacacacctggaaaatgctgatgtcagtttgccgttcatgggctgaatggtgttcggttaacggttatacctggttcccggcacacccggaaaatgtgcgtgactatttactcggattgcaggcgcgcggactggcggttaagtcgatagaacaacatattgctcaactgaacatgctgcataaacgatctggcttgccacgcccaagcgacagtatggccgtctcccttgttatgcgccggatacgaaaggaaaacgtggatgccggcgagcgggctaaacaggcgctagcatttgagcgccgggattttcaaacggtccgctctctcctcatagaaagtgagcgtatcattgatattcgcaacctggcattcctggggctggcatataacaccctgctacgtatagccgaaattacccgtatccgcgttaaagacatttcgcgtaccgaaggtgggcgaatgctgatccgcattggacgtacaaaaacgcttgtcagcaccgccggtatagagaaagcgctaagccttgatgtaacgtatctggtagaccgatggatcacagcctccggcgtaggagaagacccggataattacctgttctgccgcgtacgtaaaaatggcgtagcagtcccatcatccaccagcaaactgacaacgcgatcgctggaacatatcttcgaggcagcacactacaaagtttatggtgcaaaagatgaatccggcgaacgctatctggcgtggtcaggacacagtgcccgtgtaggcgctgcgcgtgacatggcccgcgccggtgttggcgtgccggaaattatgcaagctggtggctggactaacgtcgaaatagttatgagctatatccgtaatctggacagtgaaactggcgctatggtccgcctgctggaggaaacctaa

SEQ ID NO: 378273 - DNA, 216 bp, Salmonella enterica
atgaagccaaacatagttgcgactaatcttgaactggagaaaaatcgtggttactggcgcgctaaaggattcgagcgtaaagcctgtgaaccctgtctgacgcgtggtgatgagacaattaagcgtgaccgtggctgttggtgcttgtacgacatcaccagggggcgagtaaaagccgaaccaatcctgtacactttgctgaaaactataatctga

SEQ ID NO: 378274 - DNA, 1071 bp, Salmonella enterica
atggctcaaatcaaaagaagtggtgagatccgtctgggagatgcccggatgtgcattttggaaaacccagggcatgtagacgatgcctatgagcgcggcttcaagcgtgaagttttccgtcgcatcatccagacgctcaatcgtcttggatggcttgttgtgatcccacaggacaaaatcgagcgatatagcgcgagcttcgcacggcaattccgttactgcacaaaaggcgacctgaaagcagatctgaagctatgcggtcgctgtattcaactggagtttttccagaacgtcaacgcaccggaccgcccggataacgagggccgataccagtacgataaagaaaagcacatgccttatttgctgcgaatggaaatgctgcgtacccgtaacagaatagtgacctacctgtccaacgttttcgacggttatcaagtggccgaacaaagtccgggctggagagacattggccccggcaagatgacaaatatggacgtaatcaaagctaactattccacattctggcattttgatggtaactggcaagcttatctgggaaaaaatccttatatgcataccagccactaccgcgaatcagcagaaaaagttctgcttgaaccaggtatgcgcgtctggtggttcgaccacaaaggacgcatcatgactggcacagcctggtatcacatcaacaatatgtggtatgtaacgtggggtcactatggcatagataacattgccagctttaatctgcataccagccttcctgaaagacctcgcatgaaacgcaacgaccgccggcgccgacaaaaactggaagaattgctgggagatgctgtaaccagaatggactacctgcgcgcccaccagttaaagcaaatactctatccggacaatgaaccactttaccgactgttccatactggccaccagctctatcaccgcccagagtttaatggttacacgaaagatccaaactacgccggtaagttccgccgcagtgaagtagagagtttcaatcctcacgaaaaccgtatggagctggtgggcgacgaacaggaggttgctgtatga

SEQ ID NO: 378275 - DNA, 207 bp, Salmonella enterica
atgatggacaagcaaaaacgtaaagagattcttcaaatagccgttgattcactccgcgctgcggaatacgcactcggccagctcgctgactcatacaccgaagaacgcgacggtaaattcagcgcctgtcatcccaaaagctcttttgaatcgtctttaggacaagtaacccgtctgcgtaaatcactggtgaaagccaaagtctaa

SEQ ID NO: 378276 - DNA, 471 bp, Salmonella enterica
ttgaaaagtgatgtttatgtgctttgggtcagaaagaggcctgccaaatgttgtcattatttgacaattgttctaataaattatagctttcgtccgaaaatggactcgctcaacaccagtgatggtgtggcgcttgatactggctataacggtaagagcattggcgatgagcgggcatgcacacaagccgcaagtcgatccggaggcacgcagtcctccgtatcagtgctctcaccgttgtggtgtagctcaattggggagagcgccccttgtctggggaggtggggaattcagggatcgttacctgattatctcatgcggctggttagacgttatccgggttcaaatcccggcgccacaatatctgttgctgtttcagttcggaaggcggtcgccatgacactgacagcaatagcagttagaagaagtcttccgttaactttgccgccgtcacacgcgcctttttgttaa

SEQ ID NO: 378277 - DNA, 210 bp, Salmonella enterica
atggcttttatcgctcccaccgtagacgacgttaagaattattctaacgaattgtctctcgatcttacctctccagacgctgcgcgcgccgttaccgaacaccatctaaagctctccaatcaagagcatagggtcactgttgatgaagtgcttgatctcattgactctgtagattatttaatctatctgatcctcacagaatcctcctaa

SEQ ID NO: 378278 - DNA, 852 bp, Salmonella enterica
atggtcaattatgtttatggcgagcaattgtacagggagttcgtcaaatttagggatctctttcttgccaatgccgttgcccgcgctcaacacgtcgacaaagccagcgacgggcgttttgttcgtcctgtagtggtattaccgttcaaagaaacggaccgtattcaggcggatatagacaaatggacggctatggccaaagagctggaacaatacccggatttaaacgttcccagaacaatcctttatcccgtccctaatattttacgtggggtaaggaaagctacgacttaccagactgaagccataaatagcgtgaatatgacagcaaaacgaattattcatttgctggataaagatatacgtattcagaaggccggcgatataaccgagtggagtaggcgctatataggtaatctggagcgcacaaaaaggttgatggaaaaattcccggacgaagaaaaattcagaatgcgcattcacggcttcaacgaaacgatgttgcgtgtgcattacatttccaccagccctaactacaacggcggtaagtccgtcccttaccatgtcccgttatgcggggtgtttatctgtgatgagacattgagggatggcttgtccattggcccagaatttgagaaagaaaaattcagcttatatgattcaattgagcctattatttgtgaccgctggccacaggccaagatttacagattaaaagacatagaagatgttaaaggtaatcttgctcgcatccgggaggataaaaaagctctgtctgcggcatcaacaacccgtacccgtaatactaaaaagggatcaccagtgaatgataatcccgaaagttctaaataa

SEQ ID NO: 378279 - DNA, 1485 bp, Salmonella enterica
atggcccgcagttgtataacggaccctcgctggcgagagctggtggcgcaatatcgttatgactggatagccgccgccgatgttatgttcgggaaaacccccacctggcagcaggaccagatcattgagtctgtgcaggagccgggcagcaaaacgtctgtatcgtctggtcacggtacgggtaagtcggatatgacctctatcatgatcatgctcttcatcatcatgttccccggcgcccgtgcaatcatcgttgcgaacaagatacagcaggttatgaccgggatctttaagtacctgaagattaactggtccacagccaccagcagattcccctggttggccgagtattttgtactaaccgatacctcgttctatgaaattaccagtaaaggcgtctggactgttgtaccgaaaggttttcgcctgggtaatgaggaagcgctggctggtgaacacgccgaccatctcctctacattatcgatgaagcatccggtgtgagtgataaggcgttcgggattatgacgggcgctcttaccggcaaagataaccgcattcttttgctttctcagccaacacgtccaagcggatatttctacgatacgcaccataaactggccaagcggcctggaaaccctaacggcatctatacggccattacgctaaatagcgaagaatcgccgcttgtaacgccagagttcattaagatgaaactggcggaatacggcggccgcgatagcccgatgtatctgatcaaggttcgtggtctgttcccgaaaactcaggatggcttcctgctgggcagtgatgaggttgagcgcgcctcgcgtcgtaaggtgaagatagctaaaggctggggctggatcgcgtgtgtggacgtcgctggtggcacagggcgcgataaatcagttatcaacataatgatggtatctggcgagcgtaataagcgtcgtatcattggttatcgcatcattgagtattctgacgttacagagacacaactggccgccaaaattaacgcggaatgcagtcctaatcgttatccaaacattacgatagtgattgacggcgatgggctggggaaatctaccgcagatttgttgtacgacaattatggaatcaccgcacagcgcattcgttggggcaaaaaaatgcacagtcgggaggatcgcagtctttactttgatcagcgcgcctatgcaaacgtacaggccgcagaagcggtcaaatcaggacgtatgcgactggataagggcgatgcaactattgaggaggcctctaagatcccggtagggattaattcagccggccaatggaaagtaatgagtaaagaggatatgaaaaagaaactcaacctgcgttcccctgaccattgggatacctattgtttcggaatgctggcaaactatgtaccccaaaacgaagtgcttagtgttgaggatgaggcgcaggttgatgaggcgctggcatggcttaatgaataa

SEQ ID NO: 378280 - DNA, 1188 bp, Salmonella enterica
gtgacctgggacgagcacaaagcgaattttgccaggctggcgcgcgatggtggctataccatcgctcagtacgccgccgagtttaatctgaaccccaatacagcccgccggtatctacgcgcatttaaggatagcggcacaggcccggacggcattaagccaaataagccggtgcgggcgcctgccaacaagtcaaagaatgatcaaaagagcgatcaaaataaatgtgatcactcttttgataaaagacattcaaaacagaaagatagctgcgtgatcatgggcgcgctggcgcaagcccgcgcccaaaagcagaaacttgatgatcgattgagtgatcatgaggtgatcacccgcgccaagagatcactcaaggacaaactggaacgtgatcggcttactgatgacggagaacgctttgagtttgagcctgctgactaccagatagacaaccatgaagcccgccgggaagcgagagctatgttgcgacgttccggcgccgatgcgcttgaagcggccttgctggagaaaacgctgtcacatctccttatgctggagaacgctcgcgacgtttgtatccagttggtacatcagatccaggccgataagaaagacgatgacacccctgtagagtaccgcattgccagcatgttgaataactgcaccgcgcaaatcagcagcctggtgaacactatattcactatccgtaataactaccggaaagagaaccgcgaagccgagaaacatgcacaaacaatggggcagactggcattgtgcagctggcgtaccagcggcgccgggaacttggctggaatgcacaggaaactgccgaatttatcgaatcacagggaggtaaagtacccccgttgttgatggagaagatccgcgccgagttgcgtaaccccaaaccagaaacgccagacccagccgaacaaaccgctgccggcaccccatctcttgcagatctcgacagagaggcccgcgagcgggccgccagccgccgcattgattcctcattatggattgagcaacgaagggaagaaatcgccgatatcgttgatacaggcggctatggtgatgttgatgttgatggcatatcaaatgactcgtggatggaacaggatttagacgaagacgaggaggaggacgaggaagtaacccgtaaactgtacggagatgatgactga

SEQ ID NO: 378281 - DNA, 420 bp, Salmonella enterica
atgagccgaaatcgaaacacacgtattacatcgtatgagattgcggaatacatgatccgcactaaagcattgctttccgccaaagaactggcagccatactggcaaaagaatatccccatcttgatattaatacccgtgacgtatacctgcgcctgaaatcaatatcagtatcccgtcactcttcagtatgggtggatgagagcagccgcccgcgcaaattccgcatccactcgctgaaccctgaatttttccgccgcagcagggcaccgcgccgctatggtgatgacataaaagatgtgctgcatatgacgaatgacgaaaaggagcgccgggagcataagttgtgggttatggcccgccagctatttaacactatcgcccgccagcaccggcaacataatcactccctttcccattga

SEQ ID NO: 378282 - DNA, 1035 bp, Salmonella enterica
atgaaagctgtcatcacgccctttgtccagaaagagttaggtctggccacattcaaagtagatgatgatgttgcccgcctggttagttctggccgtaaattcattatggaacctgttgcgcgtgagctggtggatcacatggaagacggggtaattcacaccgagcagtctatggccgccaacgaatcgttacgtcctttcttcatgagcgaagaacttttccggcgaataggcggcattgagtcgttgaaggattacctccgtaacaatgtgtcctgctgccagtctcccgatcgcgactggtgcgacaacaagctggcctacaccgaacgcaataacagcgccgttgtactgtgctggcaccacgacaaccattacatgatgcgcggctttgctgaacttgaagaaacgctgtatcgaaaccgtgtgaactggatactggataaggcccggagtgagatgggcctacccgacagccgggacttgagcattcaggaactttgctggtgggcctttatgcgtaacatgatagaggtgatgccagaagaggcatgtcggatagcgatcaacaagcaaaaagccgctgaagagcagccaggaccaatgaaagaggctgacattaagccttacgatgacagggcaatcgcctacatccgcatgatggaagagaaggcggcgccgatgcgtgaaaaaatctgtcctgtggacacagacccagatccgggcatggcttactacaagagaccaaagctccagtcgctgaaattacctgattacctggcgttcgtatcatctcgcccatgctgtggctgcggggcatctggcaataatgcccggataagcccgtttctggtacagagtcgccgcctgtgcgcccatgatatctacgcggtcccgttgtgccaccaatgccagactgaaatagcgcgcgaccgtacagaatgggaaaataaacatgggaagctggtggttcatcagcgtttattctttgactacgcgctgggaatcggcgctatcacaagtcattcgtcgtaa

SEQ ID NO: 378283 - DNA, 330 bp, Salmonella enterica
atgagtgatttaacgatggggaataaaaagatattcctgatggatgtggacccgttcgcacaccacacccctgatgcaacagtagacgagtttatctacgagcatgagctggtggaggaaacagaggacaactatctgctgatgggcgtggtctaccctggcgatgtagttaggtttccccgcgagctgtatacgaggcatgacacccgcgaagaggcgcttatccatcttgatcgcattgccctggacatgattcaggagctggaagagcgtacaagcaagctgcaacacctcattgatgccattgatgtggaatttcggaaaccgtaa

SEQ ID NO: 378284 - DNA, 633 bp, Salmonella enterica
gtggtgaagaaagcgttgaacctcactgaggcgcaagtattcaccctccgccggatgaatgccggcaccaaataccagatgcgtggtgacggcaagaaagcccacgaaaaccggccctcgatagaagttaagcacggccaatggtttcgtacagttgacccgatcaatgcacctagcgtgccagtgctttatcgcctggggctggtggacttcgccaataatcgtggtcaagaacccacaaagtattacaatgtgcgtttgactgacaaaggcctgaatgccttaacgccggagaacgacatgaccaaagcccctgagcaacgcgacccacgcagccttaaccctatgaaagaagccgtacccgcatcgtcggcaatccatatgcgagtcaccccagaccgcaaaaagcgttacgttaaccaggcaagggttgagggactgaagctaaccgactggattcagaagcacatggataacgtttgtaatgatgcggggcagcctgacaccacaatgcacaaagaggtggtgatcatccacggtttggggcagaaacccggtaacggtaaatgcgtaccgtttgaggtgccagaggacagtgggctggcaaaaatgaagggcaagagtgatgagtga

SEQ ID NO: 378285 - DNA, 414 bp, Salmonella enterica
atgaataaggccgccattaccaatggagcgatccgcactcgcattgaagcgctgcgcaacaccagcgccaacgtgatcgccagtacagctaaatgcgacgctgaggcgttcgaagagcttttgaagcgtcgggaggcaatgaaaaccacgcgcgtccgggtgctacagggtaacgcctgtgattgcaatgattcatgcgattgcgtaccgccgctctatgtcgctgtgaacggccttcaggggcatggacaagctttctggacataccgcgacgacggcaaaccaggcctcgcgtactggtgcgaatttatggggctggtgccgttctgggcagatgaccacactcacgctaccgatctgctgcgtgaaaagctggcgtggctgggggataaggtggaggtgtgcacgtggtga

SEQ ID NO: 378286 - DNA, 264 bp, Salmonella enterica
atgagcaaagatattctggctttggcaacacgttacgctggcaattcctcagtgatttctgacgttcaatgtgcgctggacgttatgcctctgatttttggcgctgttaacagtgcctgcgagcaaacccaattcgatgaggatgagttgctcgaaggaatggaccgcgttaagaaattccttctggctaaacaggctgaactacatgctgagagcgtgtctattcgcgctgaactgagcaaattaggagagaatgatgaataa

SEQ ID NO: 378287 - DNA, 306 bp, Salmonella enterica
atgaaaccgatgctcaaaacccccttcttttccctcgaaaacgagacctccgttgcagccaacactgacattactatgccgctgcaaattatctctgattacatgctgcggttcatgcacaacaacaaagacgccaagctttttgaagctaaagagcgactcgaaaagaagatcaccctgtttattgctgatgggtacgacgagcagcgcctacgcggggcgctatcggctttcagcggtcgcaactcggtgcttatctgcggaatctggagcagtacaactaaccacccagtgagggataaataa

SEQ ID NO: 378288 - DNA, 213 bp, Salmonella enterica
atgaaaattaccgcagatcaattcgtaacacgtagtggccgtagagttctgaccgatgatggccagcaaggtatgggtggggagcgtggaatagggtccaccactgagaggaaacagggtcaggtagctgcggcgatttatgcaaactgcgccgaattagacaacaatcagctcgatgaaataatagagtgggttcgcctgttcaagatctga

SEQ ID NO: 378289 - DNA, 276 bp, Salmonella enterica
atgtcaattcagacaacccagataaaactactggcgtcagcactgggtcttaacagagctgatattgcagaaattattgcgcttggcggcgtcactgtatctaaaagtcgcgttgatagctggttgcgcagcagttctgcgacaaaaaatgcaagcgggaattccgacctgtatgggcagcgaattaaccggaccggcacgataaaaccggaagaatttcacgctttttgtgttggactgaagtcgtggcttgacagagtgtcgccaacggaataa

SEQ ID NO: 378290 - DNA, 384 bp, Salmonella enterica
atgaaaagtttggataaaaacatgttgaaaacgctagcctttttttgtgttacgttttctgaaaaatatcgtgacggggcggatgttgacgagttgaagggactggttatcaacctgtcccttactatgcgcccggacagtgtaaaccctaacgcttcccagacttatgagcagtacggggagataatggaggcgatggttagctacctcgcatgtgaagacgatgatggtgccggcacagagtttgacagccattctgcacgcaccaaattatccattgctaacgaaaagctgaaatcaaagattcagcgcgtggctgacagaattaatgatcggttttcagagcagattgaatccattctggctaatgccccaaaaggatga

SEQ ID NO: 378291 - DNA, 480 bp, Salmonella enterica
atggataacgaggataaaaaagagtggctggcagaaattggcgaaacaattttcggagaccactggaagccagccctggcaaaacatcttggtactgacgacagcctggtgaggaagtgggccagtggaacgcgaaccatacctgataacctcattcgtggcttgttgtcactggcacacgacagagcgaatataatttcccgtcatgcagacagatttgcgcgtgaattgcgtcatgagcctggttatgagcgtattatttatatgccgggaataaagttagaaagtgtccggagtgacctgtacacagacaaacgtgactgttttgatatcgacggcagattgtttttgcttaatgagaatggaacggtcattgatattcatggttatgaaacagacggctatggtatgcctgtgttgcctgataatatcactgttaacgacttgctccaggccaaacaaaatcaccccggcgaataa

SEQ ID NO: 378292 - DNA, 255 bp, Salmonella enterica
atgcctaatttaaaaattgtagaatttaaatctacagaaaaagcgtacaacaataattcagacgtaattcgcctgcttgaagaggcgctgtcacacgctaaagcgaataatactcaaagcatggcgttagttatgcttgatgcaagtggtgatattcttgattgttggcatagcagtggtaggccatatgttatggttggcgcaatagagtcgctaaggcagggctttattattgcgtatacgggggagaattag

SEQ ID NO: 378293 - DNA, 1431 bp, Salmonella enterica
atgaataacaaactaacagacgaaacgctgagcgcctggaaaactgaggcgattatttcgctgggggaaacaccgaaagattgccgtgactactctcaccacgaagcaatactcgcgttagtaacagagctacaagaatgccgcaaggctgatagcgctgagcctgattacatccgttacgactgtggttgctgcgggtgggaaacaattgaggactggcgagagaacgacgtctgcccgaaatgcaatcataagccgatgggtaaaacggagctatacaccaccccgccagcgtcagaacgcgaacgtattcgccgtgagcacgccgagtggtcctataagacattcggcgatattggtcccatcggcccgctgaaacatctctcaaaagaagcgatggaggcagcagcggacccatccgatccgcttgagtgggctgatatgcagtttctgctgtgggatgctcaaaggcgtatgggtatttctgacgaattcattacgagggcgatgattgaaaagctggcgataaacaaaacccgccagtggccggagccgaaagacggcgagccgcggttgcatatcaaagagcagccagtgccggtagtgccggaggaaatcacggcggacggaattataggaatgcatgagtgcggatttgtggagggatggaacgcctgtcgcgccgctatgcttcaggctggaaaccatactgagcaacacctcgacatggtagatcattctggcgatgccaacgaaaagggtaaggatggtaccttcattgatgagggtaccaaacaggctggcaactctccggtgatcggcattgacatggcatctgaacctgatcgctcggtggaagttcgctaccttgctcctcctggctacgtgatggttcctaaggtggtgacgccggaaataggtaacgcaataaacgaagttggtcagcgctgcacatgtggtaattgctcgcagcgattatgggatttattgcttgcgtcagcgccggtacaggtagatattgaaatgctggcgtctacgctcaaaaatgctccgttagcaccgtcggataatcagggaaggccgagagcgccagtggtgccgcccgccattgagccagattacaaggtcattaaaagtatcctgcccacggccaaccctgatgaatatgcgtgctgcattgctgctgacatgtggaacgcctgccgcgctgccatgcttcagggggtcgagcaaccacaaaacgcacgacaaaatattcctgatggcaactctccggtaattccggatgattgggttatggtgccaaaagagccaactcaggccatgattaaagcgtggctatcagaggttgctaactttcgcggtcatgcagccggttacagggcggcgctggcagcgtcgccgcaacgagagataagaaattatgcctaa

SEQ ID NO: 378294 - DNA, 324 bp, Salmonella enterica
atgacaaccaataacaggctaaccgaaggacaactactttttcgactgcaagatttttacggagcagaacaggatgctttaaaaattggagactatgagttcgcgcaggaatgttcagacattgtgagtgttatccgcgagctgcaggagcgccgtaaattcgatcaggcaaaactaatcaataaattctatgaacggtatccgttagaaacgttcaagagcgatagcgaacgcgcggaggcgttgggctattacatggctggcgctgaattgcagcgttgcggggaatttatcgtctatgaggatgccaactgtgatgaataa

SEQ ID NO: 378295 - DNA, 309 bp, Salmonella enterica
atgaaaactaaaaaatatgatgagagaaaggaccttgacctttggtttgggttgtcatatgcagcgtttatcgtgatgccacgtgtagcaatgatgcaaatgccggaagagtggcgggagaaaatggccgaactgctcaatcagtatgatgaaaccattgataccgctgcgtttggcgtgaaaggctgtcgggttaatgcgctaactggcgacggcaagctaatgaaaatgccggaagagttattgaattaccgccacccacagccggaaacgatagctgcgcttttactgccaaaaggtgaggtctaa

SEQ ID NO: 378296 - DNA, 246 bp, Salmonella enterica
atggctattttcatggaagtgcgctgtgaggggctaggtgatattgatggctgtttctctagccagaacgccggttcaataacgtcagcacgtgaaagcgttaagagcgtttctatagcgctgaaatttcttaaagatgattctctcaataacggctgggtgctgcataaaggtgcgctttattgcccggtatgcgccaaagcaaaagcatgggacgccgctggccttggcgtgaagggggagtga

SEQ ID NO: 378297 - DNA, 537 bp, Salmonella enterica
atgagctacatcgacaaacaggcgcttcgtgaagaactttcaaacccggcaataggcagcaaagaccacctacggaaactggctttgtcgctgctggatgaactggagcattacaaatcacgcgaagagcgagttacaaagctggttctggacaactcgacaagctgggatgctctctacaagaagctggaagccgcagagaagcgtattgctgaacagcgtgagtattacgagggcgttattgctgatggaagtaagcgcatagcagaactggaaagtaaaaacgccaatctgcgaaccattgcgcacgaccagaacgagttagctatcagggccagtctggacagtaataacgcaacagtggagatgggcaggctgcacaaacgcatagcagaactggaggcaaagttagctaatcccgttttgctgccaaaaacaaacggctactggaatgagcaagaaaaggcgtatgaagaggccattacgctcgccaagcggcaggttcgtctggctggattcagtgttgaggacatgtaa

SEQ ID NO: 378298 - DNA, 261 bp, Salmonella enterica
atgagtaaatacggggattaccttcacgctgatagctgcctctcttttggtgaatggcttgttggtacacgcttgccagagttcgagcgccgagagacaggttttctaaccgggaaatatgaatatcgcatgttccgtcgtgtagcccgctggtttggggcagaacgcgatgttgagggtgggtggtgccaaaccatgaaagcagctaaagccagctataaagaagcactgcgcaaatcaaaacaggaggcagctcaatga

SEQ ID NO: 378299 - DNA, 861 bp, Salmonella enterica
atgagtgctgttataaagcatcctgcaatccgctatcacggcggtaaattccggctggcgtcctggattatcagccatttcccggcgcaccgctgttacgtcgagccgtttggcggcggtgcttcggtattgctgaaaaaagaaccatcagaagcggaggtctataacgacctggatggtgacgtggtgaacctgttccgcgtgcttcgtaactccgaatcccggcaagcacttattgatgcgtgtgctttaacaccttattcgcgcggtgaattttgttgcgcttatgaacaaaccgacgaccccattgaacaggcgcggcgattaattgttcgggccactatgggcttcggtagcgctggcgccacgaagggcaagacaggttttcgcctcgacaccaaacgcaatagcgcaaccgcccaaaaaatatgggcacggcagccagacaatctggccgctgttggtagccgatttgcaggggtcttgattgagaaccgtgacgctattcagtgtatgcgcgatcacgataccgtttcgacgctgcattttgttgatccgccgtatgttcatgaaacccgtgtcgaaacagcaaaaaatagcgcttatcgattcgaaatgaccaatgcgcagcacgcagaactgcttaatgcgctgaaagaactgcgtggcgctgtgattgtctgcggatacaacaccgacctatacaacaacgcgctaaccgggtggaagcgagtgactcgcactacatcggcaaatggatctgccggttctgttcagcgcacggaatgcttatggattaacccggcagcacagcagcaaaaagcggagcaggcgcatctttatcaggagtccttagaatga

SEQ ID NO: 378300 - DNA, 681 bp, Salmonella enterica
atgaaagagcgcggaatgatttttaacgcggagatggtgcgggcaattcttgacggcaggaagacgcagacgcgccgtgtattaggcacctaccaagacgctgtgaagttttgtcctgagtgggatgttaacggtaagcaaatatttattgtcctgggagaaaaagaccatacagggatgaatccggtaataaccgctattccttgtccttttggacagccgggtgatcgcatttgggtgcgggaaacgttccgtgtccatagccgggcaacggatttcgccacgctggtctaccgggccagtgtccgaaactcctggactgagcaaactcatcgcgttcccgttgcggtttgcaataaaccggccacagcagataagtggacgccgtctattcatatgccgcgctgggcgtccagaattcttctggaaatcaccgacgtgcgcgttgagcgcttgcatagtatcagtgaacgcgatgccctgagagaagggctgtttcagttaccagcatctgggcgctactgcttgcaaccgggaatgcagtatttcggtatggcgagccacagcgcgaaagaggtctattcctggctgtgggcgtctgtctacggcgaagagtcctgggcggctaacccgtgggtgtgggtgattgaatttaaacgcgttgaaggcggtgcagcatga

SEQ ID NO: 378301 - DNA, 489 bp, Salmonella enterica
atgaaaataacggataaagaaattcttttggccgtctggcaagctacagtgcaacggttgccctatgaagccacgcatcattacgttgggaatctgcgtggactggccccgtcagatgaatactggcaccagtctgctactgaaatatgttctgtatttcgtgaggcggcgcttgatctcccgttatctaagggccaatccttgcgtcgaattaaagcactgattgagcgtaatcggctggtggtttccggccgccgcccgcgccctggggaaggtttccactttaagctgcccgataacctcactcttccggcctttaacctgacgcaaaatcttttgcgtggctacggcatgaccgaaaaaatctttctgcccgatcatggctatgccgagatcgcacagaaagtttccatcgcagtagagagtgaaatcggcccgcttgtcgagcaatacgtacgccgctgcgctaaacaggaggccgccaaatga

SEQ ID NO: 378302 - DNA, 318 bp, Salmonella enterica
atgacccaagtgccaactattcgcgatcgcatatttaacactttatccgtgaacggtccgctaactaaggctgaaatatcacggcttaccagcctttcgcttgaacaaattaaccgtacggtgacgagcagccttcaaaaagggcagatacaaatccaggatgggcgaattgtattggttgaagatgctgttttcggcccatgcattgaggccagcaagcgcggacctggaaatattattttccagatatgtaagcggaactggcgcggttatcacgttcatcaattattcaacgccagccggagaacttccgtatga

SEQ ID NO: 378303 - DNA, 141 bp, Salmonella enterica
atgcacacagtattcaagctggcgatggcggcattttatatttggatatttactatcgtctttacaggtatagccaaagcaactcctgtcaacacttccgaagtggggatgcgcacgatttacagtgagctgggggaataa

SEQ ID NO: 378304 - DNA, 1263 bp, Salmonella enterica
atgacatctcctgcaaaaaaccaatcaatcatgactacttgtgttaccgatgtgctggaagctggcgtcccggctgtagtgcagaatatacgagcggcccaacgccgcgttacctgtgatgacctgacaaaccgcttcttcgacaatgccatagagtctgctgaaatgctgctggcgcaggcagtggacgtctacaataacgaagctgacgagcacaattcgctggttgaaacgctcgaagaccttcaggaacagttacacgggaaaaatacagagcttactgagcttcaaattttgctaaaacagcatgagcggcagaaacaggatgagatagaagaggctgtgcaggatgccatgcagcgcgccgaccgtgccgaactgctgtgcgtggaaatggaaaccaagctaaatgaagtcacagcaatggttgaactacgcaaccagcaaatccagaccctgaacaagagttacaaagaggttatggccctagatccattaaaccttgaaaaacgctacgctaaagccaagcgcgagcggcaggatttgcgtaaacaggtatcggatcttaaccagaaaatcgtcaaattaacgaaagacctgagcgatgcgcgcgtggcgtacgccagacaaaaaacagaaacgaccaggctggtggaagagacgaccaagtacgccactttgcaaaaagagatgtacggcattacgcaacaccagtttacctcgactaaggagcacccaaccctggggccgattcatttctacccacgattgctggcatacggaatatcatcaccgaagcaatacaataatgagcgcccatatattgtcacaaagctggattttgcctaccagttctgctgtgacatggggtttgccattgatattcgcataaacgaatggttgatgccgaatttccaacctatccgcatatttgaagagtttcagccggagggatggattgaatttttccatgaattaatttgtcgggaaatggaaagccggcgcccggagttagtgcgtcgtgcagaatgggcgcaagaggtaaatctggctgatgcaggtcttccgcttccggaggaattgatagccaaactggcagataacgatctccatacattatttgatgtcgtaacacgccgacatggccagcttgtagcaaaccataacctcacgccggaagaggcaaaatctgttctggatgtatgttatgcacgaactgacgcatgggaaaaagaaaacggtgggaccatctatgtacgctaa

SEQ ID NO: 378305 - DNA, 219 bp, Salmonella enterica
atgagactgttcaagcgtaaataccactactggttgattgcatttgccattcctaacggcgggatcaaatacgttatcacccgctaccggaataaacggcttacacctgcccgaatcttacaagcctcgctgggggaggggttggataccgattgtgccgtcctcccgcctgcttacctgggaaaaatgactgaagaagaagccaaaacggaaatctga

SEQ ID NO: 378306 - DNA, 714 bp, Salmonella enterica
ttgaaaattgcactcgtacttcgttcaggcggagatttcagcgcatcagatgttcaatggctggcaaaccagctaccgccagggtatgaaataatctgcctgacagatgttaaaaacatgctgatacccggagtaacctgtatcccgcttattcataaatggaatttctgccggggctggtgggctaaaattgagctattccgccctgacatcgaggatgatctcttctttctggatcttgataccgtcattaccggcgatataacccctatcctggatgcgccaccagccgaatttacgatgttgcgggatttttatcatccaggacgttttggcagtggggtaatgtggatacctaatacggtcaaagcaaaaatatggtccgctttctggcgggattcgtctggctggattaccagttgcaccacaacagagtattggggtgatcagggctttttacgtaaggtcatgggtgacagcatagcaacatttcaggatctctaccctggctggtttaaaagctacaaagttgatgtggctatgccgggaagcaagtatgcaaatccacgttactcgcgcgggaatggacgcttgcccgctgattgccggatcgtttcttttcatgggcgacctcgcccgcagcaggtgacagaaccgtggattccgggggcgcagccagtggccggactgattcatgaatgtgagtcagattaa

SEQ ID NO: 378307 - DNA, 660 bp, Salmonella enterica
atgagccccatttaccaccgcatagacggcggacgcttccgtaaaatctgggtagcaggagatctgcacggttgctacaccagcctgatacatcgcctcgatgaggtagggttctccacagaaacagatctgctgatctccgttggcgaccttatcgatcgcggaaccgaaaacgtggagtgtctggagttgctacaaatgccgtggtttcgtgcagttcgcggcaaccacgaacagatgatgctggatgcactatcaccaaacggcaatgttaatcactggatggtgaacggcggagcctggtttttccaactcgactatgacaaagaacggctggccattgcattggtggagttggtgcgccagcttccttacatcatagagctacgtactggcggaaaaacgatagtcatagcgcacgctgactacccggcagatgaatatcagttcggtaaagaattatcgctacatgatgtgatctggaagcgggacaggttagtggacgcacaagacaaaatcggtggcccgatcgccggcgctgaccattttatatttggacataccccggcacgtacacagctcacgttctggaaccagacttatattgataccggtgccgtattcagcggcaaccttactctacttcagctacaggaataa

SEQ ID NO: 378308 - DNA, 561 bp, Salmonella enterica
atgaactttgtcgcgccgcgaggcgtaccaattattgcagtaaatggatctgtcgactggctgaaccgcgtctcatacttttttactctcgacccgtcaccttcgaacctccagcgtatggcaagaggacgtcgacgccgtggtgttcgttactgtatcgctctaccagacgttaccgaagtggagcaacgtgatggcatctggtgttttcaccgtatagcagcgcgctcaaacgaaccggcacaaaaaaacacccctgaatggtgggcgtggcgctggtcggcaaaatttgggctttgcacaaaccagaacgagatcgccagcggcaacagtgcctacggcgcacttaatcttgcatatcatctgggatttaaacatgtcgcgctggtgggagtggatgcaacacaacaaccacgtatacattctggcggagtgccaaacaatctgagccacctgccgctcctgttccagtccgcacgcgatcagatcgacgtagtttcctgcgggcagatgggcggtattcctaaaatgtccctgaaagagtggttgaagaattcatga

SEQ ID NO: 378309 - DNA, 612 bp, Salmonella enterica
ttgctgaagaactggcagaacaaaacgaaagcacccactaagactattttctgtgtgggcagtggtccatcgctgacagcagaggactgtgaaactgtacagaaaacagggtgctcaatcatcgccgtaaacaattcctggcagcttttcagtgatatctatgccctgtacgccggggatctatcgtggtggaaaagataccgcaaagagatccccgtcggccagtttcgcaaatttacggctaacctcgccgccgctaaatcatatgcgctggaataccggcgctactgtgatttaaaggagggatttaacagcggagcaatggcgatcagcctggcggcggaattgggcgctgaagttgtcattcttctcggatatgactgttcactggcgcacggagttcactggcatggcccccatgaagataagctgcgtaatccgtcagaaacttcagtcagaacatggcatcagcaattcaagaaaacccaggaacggcacccaaatttacacattctgaacgctagcaggagtagtgaaattcaatgtttcccgcgaataaatctggaagcggcgatcgcgcaattatcgtcggcagcggcccaagcgcaatga

SEQ ID NO: 378310 - DNA, 156 bp, Salmonella enterica
atgaccattaccaataaaacctcacaggcgccagtaatgcctcgcaatcaggcggagattgacgcccatgttgacgggattgtgacggaaatgtaccgccgtctggaggacgaacttgctgaagaactggcagaacaaaacgaaagcacccactaa

SEQ ID NO: 378311 - DNA, 579 bp, Salmonella enterica
atgctccggtttaccgaagaggaatttaagcagtttaccacttcccgtaaccagaaaagcgggaagcgacgtaagaaggaggatgcttttctcgctttggcatctgtgaaagatccctctcctcatgctgttgccctggccgcgctggccaaaaatccagatctccgtaaaggcaatgttgagcacttcgaacaggtcattatttttgactatatggagcgcaaacacccggatatctatgagcttttgcacgcgacacccaatggcggccttcgggcgaaagcaacagccgggaaaatgaaggctgaagggcaaaagaaagggtatccggatttatcgctggatatgccgagaggcatttatcacggcatgaagatggaaatcaaagcgccagacggtaaaggcccaacagcggagcaaattgaatggatgaacaagttgtggagggagggatactacgtagcgctggcctatggtgcagaagaagctattacagccttgttggaatatgccagcctcagtaaaggagcgtctattgagcacatcatgaatggagaaaaatggtttttaatgtcttaa

SEQ ID NO: 378312 - DNA, 246 bp, Salmonella enterica
atgacgaattatgcggatgaagttgatctgagcgccagcatggaagaggtgattaaggaactggctattgaaggtattcggcagatggcccactcaaccagccgcgaatataccgggaaatgccattattgcgaggagccgatcagtaccggcatttattgtgatgctgactgtgctgcatggcatcgcgaagagcaagctgcaatggccagaaagtacggtcgtcgcccttcagaactggagtaa

SEQ ID NO: 378313 - DNA, 162 bp, Salmonella enterica
atgcgtgtttgggatatcccggaacgggatgtgaacttttcaagagattataaccgccagcgacgtagcaaaaggctggtggaaccgaaggataacggcaacaaatacgatccaatggccagcctgcgggctgcgcgggatcttcgccagggagggcgttaa

SEQ ID NO: 378314 - DNA, 153 bp, Salmonella enterica
atgaaagatttcgttattcaacgtcaccgtatcgcacgtatcagccatgagaagccaactctacgccaggttgtcacgttttgcgcacaggctttctgtgtaagcttcaccctgatttacatcctctccctaatctaccagcacgcaagataa

SEQ ID NO: 378315 - DNA, 252 bp, Salmonella enterica
ttgaaaaagcgctactatccagttaagcatgggacgctacgaacgttgcaggaatatgctgatccgttttcagtagaagtgcgtagggtgggcgtaaacaaggggtttcagatatatagacgtgatggggaatggagaacagtagtagattttagtgataacagcataccactcgctattcgcgatcgcacccatgccgagtgggggcggattatcactgataatgcattgctactactgagtgatgaatga

SEQ ID NO: 378316 - DNA, 441 bp, Salmonella enterica
atggcaacactatctgatacaatcaaaccaaacaagacttacctggaggcgctgttacgaactgcgcttttagggaaaaccgaagatgaatatattgattttttcctcaaagggttacgcgggcgtctgttaaagagtcctcgtctttatcgcagctatggaccgtactggcatgaaattaaaaagctgctactggaacgcggttatggcaattttggccgtctgattgaccgtgatgttcgtaaaatttatcgtttcgaccgaccagccttaacgctggtggccgcgaccttatacagccaagaaagatttaataatgggcagatctattctgcctggcacttgttacctgttccaccggacgttgatgatgcagactacccgtttgagtcttacgatctggaggtggaggttttagttcctggggaggggaaaaattga

SEQ ID NO: 378317 - DNA, 6765 bp, Salmonella enterica
atggcagacatatctggtggagttttctcctgtaaaagtataagcgagattgttcgatttattagagcaatttcaatgcgtcggcaacccgtatctttcggggtgaataaggttgagggaaagagtttcgacaggcttcgcaaagaggcgaacgcaaaagcggttgatttgcttaacagcctggcagatggcgcagaattaacggacgaacagcggcagacactcgctggctataccggggaggggggaattggcggttctgtttccgaatactatacgccgcagccggtagcagagggtgtatgggaaataatgaagctctacggcgccgacgtgggaaatacactggaaccgtctgctggcactggcgtattcaatgaaacgaaaccggtcggtacggtaatgacagcaacggagattagcaccgtttccggcaggataaataagcttttgcacccggaagatagcgtacagatttctccctttgagcagttggcagtcagtaccccgaatgacaccttcgatcacgtcgttggcaatgtaccattcggcgggcgcgacaatacgcgcaacatcgataaaccgtacgctgaagaaaccgacatggggtcgtacttcatgttgcgcatgctggacaagattaaacccggtggctttatgtgcgtaattgtaccgccatctatcgtttccggcaccaacatgaagcggctccgcctgcgcctttcccgaaaagctgagtttttaggtgcgcaccgactcccgaccggcacctttgatgccaacggcaccagcaccgtcgttgatgtcgttctgatgcgcaaacacccgaaagagatgaccgatagagttgcacaggcggaagaaagcacgctggaagccgcgaatgtcctttggccaacgtttatcactggcaaatggtttgagcgcgacggtcgccggttcgtccacggtacgcaggaaaaaggctttcagagacgcattgaagtacgcgctgatgggcagatcgataatctggcgctcaaggcgaagctaattcatcgtttcgacagccgtatcgactggtcaatgttggatattgatgaaccatcaccaactgctgatgtgattgatgaaggtgaaatgcgcctgattaatggcgtgtggcataaattcgcgggcggccgctggattgaggccgacgcgggtaaagagttggtaatcgacaacgaacgctttggcgcggatagctgggaagcacttcagcgtaacctttctactgccgaaggccgcctggggatgacctttgaccagatggcaaatgtacggcagcagtacgccagctcgctaagcgatgaccaggttcagatggtggactggattaacagccagccagagaaataccgcacccgcctctatcgcggggctatgctcggtcgcatgctgattgaatatcaggacatgaaggctgccgggcataacgaagatgatattgaacagcgccggttgtcactggcggccaaagttcaggccgagattgaccgctttggtaatccggggcgcggtccgatcgcaaaactttccggtgctggcgcccgtgcatggttcgcgtttcgtggtgcaattaagcttgatggttctatttccgatgaactgaccggaaaactggtgacacatgatgccagcgcgagctatgactccaccagctatcaggacacattacgtcacctctacagtgatctcacgcgcgatcccgttcaacttgaggatttccgccaggcattcacaggagatattcccgccagtgatgatgaattgcttgatctgctggctaacacgccgggcatcgccgtttcaccatatggcggcattgtgccgttcgcccgcgccaccagtggcgacataaacgagatcattgcacctaagcaggcctttctcgcccaactgccggatggtgcggtaagaaataacgttctcaaccaactggcggctattgaggagaagcgccttaaaaccccggcggaaaatattcgttttaaactcaacagtcgctggtttgaccgctcggtcatactggagtttttgcaggagaatggttatccggatctgcgctatgttcagtctgttcagatggaaggcgacgaaatggtgtccgaaacgtatcacggcggagacggactctttgttggtcatcgttatggtgtggtgcagcgcaaggacaaagaaaccggcgagatccgctatgagtgggacaaaaaatctggcgataacgcaacgggattcccggcgcagttggagaaataccttaacggtgcgcgcataggcgggaaagatagcgcgactgcgaatggttatcgcgagcagatggcgctgctggaagaacaattcaacaagtggataaaaacccatgaccgctatgatgatctggtcgccaaatacaacgacatcttcaacagcaatattccgtatgagcattccggagattctttagggctaaccgggatcagcggcaagcgtctgccgtttgattaccagaacagcgaggtccgtcgtttatcagaagatgggcgtggtatcctgggatttgggaccggcttaggtaaaaccacaactggcctggcgctggaggcattcaactttgagaacggacgctctacgcgcaccgcgtacgttgtgccaaaatccgtgctggaaaactggtattacgagacgaaggacttcctgagcgagcaggccttcagcaattacctttttgtcggtcttgacgtgctaatggatggtgatcagattcgccaggtccctgtactcgatgagaacggtaagccggtaatgaatgccgacggcacgccagtgatgcgcgacggactcaagctggcagatgaagcgaccataacggcccgcatgaacgcgatcccgcactccaactatcgtgcagtggtgtttaccaaagaacagtacgcccgcatcccgctacgcaatgaaacagtggacgaacacgcgcaggatatgctcatagatttcgtggccgccggtcgcgtgtccagcgcgatggagtccgactcccaccgtaaagaagcggcgcgccgacgcgtgctttccgagtattcagataccggcaccgagaaggccgagaaatacccgtatttcgaagatatgggctttgacagcgtgatcgccgacgagggtcataactaccgcaacagctacaaaaatggtcgtgaggcctcccaactggcttatcttccgaccagtgctgtagcgcagtcggctcgcgacatggcgatcaaaaatgcctatctgatgaagaagaacggcggccgcgggccggtgatgttgacagctacaccgatagttaacactccgattgacgcctacaacatgttgtctcacgtcctgccaaaagagttttggcagaaaatgggcatcttcgggccagatgactttgtgaaattcttcggcaaaacgcgcctggagacggtccagaaaatcagcggcgaagtcgaagaaaaaatggcgctggtgggctttgaaaacctcgatgcgctgcgcggcattttccaccgttggacgacgctgaagacagcggaagacgtgaaggacaccgtagagatccctgaactggatgaacgccagcaggatgcgccacttaccgatgagcaactggcggcttatgaggaactgcgcaaacaagccgaggcggcagcgaaagccaacaatggaatggccaccattgagcaggaggacgggaccactaccgaggagaaagcacgcccgatcttctccatcatccgtgacatggaccgtgtttgtacggatatggatctgtatcaccacagaattacgtatcgtttcctgccggaacacgccgatgcggtacaacaactggcggacagcctgccgaaacaggccaccagcgaggatgacgacagcgatgaggcagtgagacagcaggtgcaatattcgctgatcgacaaaggcgaatttatccaactccaggtgccggaggcgttcgaacctgaagtgaataaacgcctggcaaagttcggtattgacgagcgtaccgtcacgcatccggttacgccgaagtacgcgaagctaatcgccacactgaaggagttcttcccgcaaggtaagcagatcatctttaccgacgagaaaacgcagcaccagaagctgaagcgcattatctgtaacgcactgaatatcgacccgtcacaagttggtattctcaacgcccagaccgttgccgacgctggtaaatctggcaagaaactgaaggcagttaagccaccgaaagaccttccggatgaacctaccgaagcgcaactggcaaaatacaatgagcagatggccctgtatgatgcctatattgcgcagcaaaacgagatgtcgttaagcgggctggagaaaatcgccgccgatttccaggaaggccgtaccccgatcatcatctgcaacaaaaaagccgaggtaggtattaacctgcatcgcggcacaaccgacatccatcatcttacgttgccgtggactccggcgagtatcgcgcagcgtaacggtcgcggcgcccgcgtcggctccaaccgcgccagcgtgcgtgttcactactactgcggtaaaggttctttcgacgagtaccgcctgaagacgctgaagcgcaaggcgggctggatctccgatattctccgttccgacaaatcagaaatggagaatgccgacgccaacgacatgatcgaaatgcagatgtacaccgccaaagatgacggcgaacgtttggcgatgatgcaggtacagatggataaggcgaaggccgcgcagctggcgcgccagaaagagcaggctaacgttgatctccagaactacatcaaggcacagcatgccgctggtgaagacgtcgatgcactgactgccgaactggagcgcaacaaggccgaactggaagaagccacggcggatatcgccaggtatcgccaactggcgctggcgaaggcagcagataacgaggaatggaaggccaaatggggaaccatttatagcagcgaccgcgcgatgctggcgcagtatcgcaactcgcttaaagcggcgattcgccgtaaagccgaccttaccagcgcgatcagccagcgcgagaaactgctgacgcgcaccaaaaaggcggcgacggatatcaaacgtctgcgtccgctggtggaagatgcgatgagcaaaggcctgctgagtgtcgatcctgatctcattaaccacgccaaagattttcttgtgattaacgaccagtcctggcgcgtggggcagtattacgagaacaacggcgatatcgttcgcattaaggcgctggactttgacagccagcgtgctgacgtcgaggtgattttctccagcaaaggcacccgttcaagctcctggccggtgcggttgcttcaacagcaggttgacgtaaccccggatgaagcggcggttatgggtaaaatcagcggcggcgtgtccatcgcggggattaacgatctcatcagtcgcgacgacttctaccgtttccagcagcgcggtatgctgaaaatcaccgactcctatgcgatgcagaacaccgagcatggctactcgatggagtttgtcagcagctccgataccgtgcagaacgctgtttatccggaccgtactgatggcgcgctgaagtcggcgatcgcgaagtgggcgctgggctaccttgccgctggtcaggggtacaaaatcagcagtgccgagtcgtttttaaccgagctgtttggcagtaattaccgtgacgtgatctcttcctacggtgacgcactttcccctgaagatattcaggagcgtatcgtggccgagatcgccaaacttccggcgaaatccccggatggttcaacgcgtaacggtgattctgaggtggaggtggccaacgccatctttaacagctatccgttccgcgcgtccgcttatgagctgggtacgtcagagtttggcgcaatcagtgtctacagcaacaaagcggagattaaggccgcgatggatgcaactaacgcgcgcattgctgccgagcggcaggcgaatctggatcatgccgttgaggcgctggcgcaatcgtgggtgacggcaatcaagggagcggtagcaactggcaaaattacccctacaattgctgatgttgttaatgatggtgctaaattcatggatgcgtatcgcaatggctcaatgccgatgccaactgcatacggcatgactaccaatcatccgacgtataatctggtttccatgttcgccgatctggtgattctgggtctggtggaactgagcgaggtaacgccgacgctgttgagcgcccgcaaaaactatctcgatgtgctgattcgcgtggctgacgggctgcgggctcgcacagacgagcagaaggcggcagacgctgaccgcatcaacctggcgctgggtaatatcacggaagaggagatcgccgcgcgtaacgcgcagcaggacgagatcgccacggtgcagggcgacgccaccagtaccgcccaggcgctggggctcaactaccgagtatcgaccgccgatctcaaaatgatgtacgcgccgaagttcgccgctggcgaggtgtttggactacaggaggcatctggtcagaaaggcgtattgttccgcgccaaagacgagttgaaagataagttcaaagcgcgctggctgccagcgaaagccaggaatagcgacttccccggcaactggtggatcatcgaaactaaacacaacgcagcggacgtgctggccgttatccaacaatacgcataa

SEQ ID NO: 378318 - DNA, 1668 bp, Salmonella enterica
ttgacagacgtctttaaggacgcgaagggcgacagcaacaatgtcctgttggcggcactggctgttcagggtggtagcgggtatcttttttcccgcgcctcagcacctgccgcattagcgggctttcttagcaataacacaggcaaggacaaggacgaatcgtcatgcatggtggatggaagccgatttatttttgacgaagtgaaattgccggaagatcggttacagcgatatccgttgctggaagaaatgtctgtttacagcacaatagcaaccgctctgaacatccacatcacacacgcgctttcctacgacaaaaagacggggcagacattctctatttcgccggtgaacaacgggaatgaagcggattacaaagcttcacaggcactatgcgatgagttgatgaatgatatcggcaagaccatcaacaaagaggtggcaggctgggcgtttatcatgtccgtatttggtgtcgcctacatccgtccgcacgcggaagaacgtataggcattaagtcatttgagtgttcttattactcactgccctacttcgtgaaagagtttgaacttgccggcaacctggcaggcttcagcggcgattacctgaaggactccactggtaaacttgtattcgctgatccgtggtcactaatccctatgaaaattccgtactggcgtcccaaagggaaccagattccggtatatcatggcacccggccttacagcctgcttgatgacccggaatcactgatgccggtggaaactcaaaactatggcaccagcctgctcgaatatgcttacgagccgtatattaacctgctttcagcgatccgatcgctgaaagccagccgtttcaatgcttcaaaaattgatcgcattattggtctggcgatgaacagcctcgacccggtaaaagctgctgactattcccgtacaatatctcagaccctgaagcgcgctgccgaccttatggagaaacgcgcaaaaggagcaaacaatacgcctaccgtcaccaatacccttctgccaatcatgggcgacggtaaagggcagatgacgatcgacacgcaaaccattcaggcagatatcaacggcattgaggacatactgacgtatatgcgtcaactggccgccgcgctggggctggattatacgctgttaggctgggcagatcagatgtccggcgggctgggtgaaggcggcttcctgcgcacggccatacaggctgcaatgcgggcggcatggattcaacagggagtggaggaatttattcagcgcgccattgatatccacctggcgtacaaatacggcaaggtctatccggaaggcgagcgcccttacaaaatagaattccactccgtaaacactgcattgcagcaagagcataacgataaccgtgactctcaggctaactatgccactttgattacgcagatcctggatgccgtcagtaacaatacgacgctggctaattcggaagcgtttaaacgttatcttttctgcaatattctggagatagatgaaaacatctctaatgagctggtggctgaattaaaagccaaagacgaagacagctccatgatggattccatactcaaatcaacgccggaggaactggcgcacatccttgaatcagtctttaaagagggacaaaacaatgactga

SEQ ID NO: 378319 - DNA, 1017 bp, Salmonella enterica
atgactgacgttctgaagacggtcactgaccgtttctgtctgtataaaaacgcgcgtaccggtcgtcaaaacggacgcaagtatgtgttaggtgccgtgaaagccatgctggaaagcaaggagacacaggaaggcctgcgtctcggtgagctgtacggttattacggccacgggcgccgggaaatgaccggcaagctggagctacctgaaaccagtgtgattatggttgaaggccgccctgtggtcatcgataacgtgccagcctgccgtaccgttgatatctcagtggatgataacggtgttgttacccatacacaggaaattctgaacaccgaaccagggaaaatcgtcgctgcaatgatcgaaagtcgcgccggtggctggagctgggctaccggcggtcgccaggccggtaatattgcagtgaccaccagcttccacggcgtggattacgttaccaatccgaattacgtcagcctggatcacccggccagcgccggtatgttcgaaagtgctgatgcgcaatcactgttagcagaatcactggcacaacatggttactctgaggagtctgtacaggctgtaattacgcattacggaaagctggcggaactggagttgatgctggaggctaccgaacgtaacgctgaattagaaactgccctgctggaaagtcaggggcgcaatcttgaagcgaagatgctgctggccgacgctgaagcgcgcatttccttactggaaagcgccgcaggtgtgcgtgaagatgtgctggcggccattcaaaacgaactggataacctgcccatttttgtcactggtagccagaaagaagcctttaaattaaaagatcctgacgatgcaaaagttgttgcctctctctttgagtccttgctcaaagttggcgctcgcaatctacctcttacccctccggtggaagaaccggcgcgcaagtcgcccagaagtgagacgccaacaagcatgatcactttcgacaagcctgtaaaccccttcaaataa

SEQ ID NO: 378320 - DNA, 1008 bp, Salmonella enterica
atgacacattccgctataaaaaacaaaagcttttcatttaacagcgatggttcgttaaatcaatttggtttgaaaagcatcatccaggagatatctccaaagcttctccgtccagcagtgaaatacactctgatgatcgccagcgaacatgccacggccagcgacaaactttgcatcttcaaatctcttcagaatatcgctgatgagtgcggtatcagcagggatacagcccgccggcaccttcaaaaacttaccgaaatggggatactccgcaaggagtttgtgattgataaagaaacaggcaaacaaaaaccatgtttgtatacgtattcgcctcttttcatccggatagcaaagggcttccgtcgttatgccgataagctaaagagcagacgccaactggattttaagtccgcccgcacccgttttaatacactacttgagcgcctggtgtttcgtgcaaagtcaggatttacctccttgaagaataagctattttcaaagggatacccgcctaaaagtgccgttaaacaggggtggcaaaatacaacccaggagggtggcaaaactgaccacaataaagtagttatcaataaaataaataaatattctgcgggcgacacaatcgagggaaatgcagcaggtacagtagaaaaatctgccataatccacaaaaacggaaaggtccgtttcatgcaggatattcgtgatttatttacagccatgtcacaaagaaaatcgtcacgcaaagaaactaatataaaaaaatctacgttagaacaaaacaagacagaaaagtataaaaaaagaacagacaacactgccagcaacacaatgcaggaagcgtttaatcacgctcgctacgaggaagctaatcgtcaggcagatcaggactgggaggagcgtgctcgcatagcccgccagtcatcaccacaaaaaatctcagaacatctcgcaaatctccgggctctactgaataatgcccaggcaaagaaggcaggtaaatga

SEQ ID NO: 378321 - DNA, 531 bp, Salmonella enterica
atgatggaaaataaatcacgtacgctcaaaaaaattctggtccctggtgaaaacggccttgtacggccaaagaaaaaatcacataaaaagccagcgccaaaggttaaaaagctggctctgaaggacatccgtaagcaccagcgtagactggtaaaatactggcctgatttgtatcgcaacgggcgaatactaccggtcgccattggcattcgtgaagcaatgctgaatgatctgcgcgcacgcggtattgaagtcaaccctaagcgcattgcaagcgccctatcttcagcattaaacactgaaaattaccaacgccgggtgctgtttatgaagcaccgttacgggcttgacggtaagccggtggcgcttatcacagaccaggaacgtgaatatgcttatcagaagctggtggagaaaatggccgaacggaagcgcacagcaccgcgtcacggcttctggaaagagaaaaagaccttccgtagaaaaacgaaaggtcaggtgaatactgttaagccgactccctcctgctga

SEQ ID NO: 378322 - DNA, 255 bp, Salmonella enterica
atgaataagcgtcggcaactcttccgtctttcgacgatgaagttatcactggcagcaatcgtttttgattccatttttatggcggtgtcggtgtggaatgaaacatggccactggacccattaatatacgcggggatacggttgtgcctgacattcatgagcatgggcgcccggctgttacagcagggggaaaccacatctgattgcccccgccgagcaatgcgtaaattcttcagcaggagggagtcggcttaa

SEQ ID NO: 378323 - DNA, 555 bp, Salmonella enterica
atgaagaaaaaaacagcggtcgggggcggtgctatttgcgcagttggaatgatgattagcatcgtcctgagtcatggtactgtgcgaactaatgaggctggccttgagttaatcgggaatgccgagcagtgccgtcgtgatccgtacaaatgtcccgcagataagtggaccgacgggatagggaacacccataacgttaagcccggagtacgaaaaactgatcaacaaattgcggcggattgggaaaaaaatattctgatagctgaacgttgtattaatcagaattttcgcgggaaggacatgccggataacacgttcagcgcgatgaccagcgccgcgtttaacatggggtgtggaagtctacagacgtattacagcaaggcgaagcaacgtcgcgtagagacctctatccataaatgggcgcaggctgggaattgggtgaacatgtgtaatcatcttccggactttgttaatgcgggtggtgttcgtctacgtggtcttgagatccgccgggagaaagaacgccagctttgcctgacgggtcttgttaaatga

SEQ ID NO: 378324 - DNA, 537 bp, Salmonella enterica
gtggctcaacgtggcgtaaataaagtaatcctggttggcgctttgggacatgaccctgaagttcgctatctacctgataataaggctgtcaccagtcttcagttagcaactaacgagagctggcgtgacaagcaaaccggggaaataaaagaaaaagcggaatggcaccgcattgtgctgtttggcaaactggcggaagtggccggtgaatatctgcgtaagggttctcaggtttacatcgagggccagctacgtacccgtaaatggaaagatcagtccggccaggacagatataccacggagattgtcgtagggcagaaaggcacgatgcaaatgcttggcgggcgccgggatggttcgtcttcaggagatccacaacaaaccggttgggggcaacctcaacagccgcaagggactcagcagttcagcggcggcggccctggtcaacacagtgaaccaccaatggacttcgacgacgatataccgttcgcgccgattggcctgccctaccctcgccacaccgtctactgtctttaa

SEQ ID NO: 378325 - DNA, 294 bp, Salmonella enterica
atggaaaccattaagatcacgtctcccgatggtagggtgggggtagtagagtttgatgatggtccgatcctcaacgtgaccggtgatgtatcgttggcggagatagccgaggcaatccgcgttttacggcctaattcagccactggaactgtaaacatggtgggcgctgacgcatgttttgttctacgaagcgcggagatcgctggctggttggtggattggccggaaattgaaggagatgatgacgacgattcgtatgacagcggcatggatgaagatctgattgtaaattga

SEQ ID NO: 378326 - DNA, 2997 bp, Salmonella enterica
atgagtttacgcgaacaggtggcaatggccaccagcatgaccacgcttatcgagctgctgaagaacttgcccggttacgggcgggtttcatatgtggtgacggcgaaaggggatgaggtgaaaacggcgtttgacattgttgacgccgctgcgctccttgtttccaatacactggatgggaaaatcaatccagagtatccccaggagttgcagccgcgcgatcgtacacgcgcttcgagcctccttcaggttaaccagatatccaaagacctacgcccggcgcaactgactgattccggactgtcgagccacggggcaccaattatcggtgaagataatgccgttgaatccgggaacggtcgcacgatgggtatcatcaaagcctatcaggacggtagcgccgacaaataccgtgactaccttatcgagcatgcggcagattacggcctgagcgcagaaaaggtctccttgatggcggcgccggtactggttcgccggcgtctgactaaagtagaccgcgtgcaatttgcgaaagattccaatatctccgatctccaggaaatggcagccagcgaaaaggctttcgtagatgcagacagcattacaccgggcatgatggcgctgtttaacccgtccgagagcggtgatctcctgagtcgcagtaatgatgcctttatccgtggctttatgacgcaagttggcgcgacgcaggcggcaggactggtgactgaggacggcagaccaaccaggcagttggttgatcgcgtccagaacgctattttcgctaaagcctacaaagatgctcgcctggtacgcatggtggcagaagaaccggacccggacatgcgtaacgtgctgacagcgctgaatgccgccgctagcgattttgtacaaatgcaggctatatccggagaagctcataagcaggcagtaaacacccttgttgagggcatcgagacagttgattccctggataagaaggcactttcagcgctcaaagatgcggtggatctggtgcggcaggcgaaagaatccggacaacatattagtgacgtgatcgcgcagggcgatatgtttcatgagacggagcccgaagtaaaagcactggcgctgtttattgtcgctaacaaccgcagcgccaagcgtatggccaccgcatttaagctgatggcgcagcgtatcaatgacgagctacaacatcgggggcaggcgctgggggatatgttcggaggcgctgaggtatcgcttcaggatattctacgccaggtttctgaccatctggaaagcgaaggcatgcaagggataaccggcggtttgtttgaggcggttggtgccgaaggccaatacccaaacatcgggccgtacatcggtatgctacttcgtagtgcggataacattaacgatcttatcaacgtggttaagctcgtatctaaaaccgaacctgatgacaacaatgacatcatttcgctggcgctgtatctcaatctcaatgccagtcaggtgtttaactggagtaagtcgctgggcataagcaagaacgcaattgcttcactgcaccgcatggcagtacacagcaccactgcgtttcaggagatcaaagcagcgatacagaaccacgaattaccgccagcgatggattgggataaggcgcggacttaccgcgtaaaagagttcctggacgctaccagcactacggccccattgagcatggttattgatcgcctcaacaggttgtttggtgatcacacctccttccgggatttaacattgagtgagctgaaagaggcttcccgcgcgtgggcgcatgagcgtagcgatatccagccagtattcttgccaaaattcgataaagctatctcccgcgccgaaagcccactgaaggtcatgaaggccttccgggcggtcagtaaagccattgctgaaaaagcacgcgatattactggtgttatggacacgggtaaggcgtttgcatctgcggcagggttggataagccgatcactatcaaagataaagcgcagggttggttggcagattttgagtatgtgttagatctggatgttgtggacaacgacacccgcaatctgctggatttttatatagatgagatcagcaaagttattgatgacgaagaaaagctggggagatatctccatgatgccattcatcaaaataacatctcgctctatgcctcattgcgcgctcttcagcgtacagccgagaataaatatggcgaaaacgataaccgcgcgctgcgcctaatggacattgtgaactctttcaggaatggcctctcgccgagcctggtagataagattcatggcaatgtacaggctgcatttgaatcggtgctctcgcagtcgccggtcaatgacgaacaggctgaagcatgggtatcaggagtgcaacttgatgagccgctgatggaaaagtttagtgggtcgcatgagtggcgggcgcccattgatattaagcgcgagttgaagagcatttatcggctaaccggtggcaagctcggcacactgaaacgcatcgttcacgaagatggtgtgcgcgcgtatgctaacgcaagaggagatattgtgttggatggttccagtgacgatttgcatgtactttggcatgaagtcgggcatcatctggaatattccaatccggcgttgctggagaaggcccgctcgtttctgaagtcgaaaagcctttcttcctccgtatcctacggtaatttggggagccgccggaaaccagaatactatatccggacatcacttagccgtaaatatgcttcaaaaatttacatgagcaataaagttaacccgtctggccgcatgtcttcggagaagccaagcctgatgaagtgtaaaagcactgaggtgttttctatggcgctacagctttaccgtgataaggaaatggccgcaaggtctatcatcaacaatgatggtctgcttgagctggcgctggggtgcgcgaaggagttacacgatggaaaccattaa

SEQ ID NO: 378327 - DNA, 360 bp, Salmonella enterica
atgaaactctccgcactggaattgatggacctgagcgatacgcttgatgagttaatgtcaaaggcatccggcgctaccgggctggatctcctggatatcagcgacgaaattgatcaggtaatgcaacagatgggatacggcgcaggggctgacactaaaccggaagacccgaagccgtccgacaacgtgccgcaactggttgccgattttctggcggataaattcctgaagcaaagcccggatgcctttatcagcacgctccaggatcttagccagtacgttgatgtttatattgacctgggccaggtaaaggaacacacggcgtcatggattgatgccaacgtaaaagaggcagcataa

SEQ ID NO: 378328 - DNA, 1950 bp, Salmonella enterica
atggattttaatcttcacaaggcagtgactattaaaccgggattagatgttcttcccgcgcctatcacagatgaagaataccgggatcttatggcggggggaaatcgctatttgatgacggaagcgaactcgctggatgagttggaggcaacattcttctatgatgcaccggttcactggcaggcgggtgagttgctggaagcgattacttctacccggctgcaattgagccggacaatgcgtgcctttatccgtacgctgaaccaaaaattaaaaggcacaggcattactgctggtagtgataaaactggtgatgttgcacaaagtggcacgcgggagattggcggtgcggaggttggccgggcgcggaatgtaaatggtctaccggttctacctgcgctgattccccttagcgatgggcagacgatcagcattctgtttcacagtcctaccgctgaaaagagaattacgaacagcgatacgctgattgcgtttcagttcctgctgaataaaaaagacgtcacccatactgtagcgccgatgagcggacgagatatgacgctggcgcaggtgactatgaagctggcgaacttggcagaaaaaaatactgctaaattccagcgcgcgcagaagaagaaaaaagccctcactgacgagattaatcagcttcaggcagatagtgatcagaaagaagatgcacttagcgacctggcagaccaggccgccactgttcaaagtcagagtgcagatctggaacagcaggtaagcgttatagccgcgcaggcagaccagctcgatgaggagaatgagcgccttcaggcagaaattgatgaacttaaccgaaccggcgggcgtagtgatgcgaccactgttgcggtttctggtggacaggcgcgcgcgctgactgaccgcctcgccaatattaaaaatcggatgcatattgatggtcatgtgacgctaagtaatggtgcagaaatgcgacagggtattgttgatggggagggctatatccagctaactgccccggacggtagccgttaccagatccaggcagagtcaatacagggtgtacaccttgaagcggccataggaaaactgttcaaggcctataaagctggtaaggctgaacaatatctggttgcggcggaaccagaacccgcaccggcaccagaccccgcgcccgaaccggtccctgagccgataccggaacctgttcccgctcctgaagcagaacttaccgccggtaaatatcgctacgcgcttcaaatgcgcccggctggagtgggggctgtgccggctgataatgccggtattctgccgcgccctgactccgatgacccgtactacgattacgcccgtcacggcatcatcacctacaatgagccgctgtcagacgagcagatgcgcaacttcgatctgaagctgctgccgagggaagagtcctttgacttcctcgctaagacgcttgccagtggtccgtttggcaaatatgcccggcaatatcttgagatggctaccagcgcgccgaaagacttccagtcaacgctgaagatgaatttccagaagaccttccctaacatcgcttatccgctgggtgacggcactgaaaaactggtgcaaagcatgatcgttgcacttcagcaggaagtcgctgaaagtaagccagcaccagatccgcagcctgaaccggcaccggaacctacaccagaaccggaaattagcgaagcggataaagctgccaaccaggcaatcgactatctgaacagtattaacagtatgcagagcagcgatatgctggaaattcgtaacgcacgtagtagcgtacgtgaggcgatcgccgcacttcaggccgcaggccgctttgatgaaaacgaagagctggtgaacgctgccgcgcgtcatctggccgatctgctggtagcaatccagaaacagggggtaaacgcatga

SEQ ID NO: 378329 - DNA, 606 bp, Salmonella enterica
atgatgaccggaaataaatacgctacggttgattttgaccagattaatgaaaaaggcttaaaaagcctcataacggcgattaacaaaacgggaacaacggtacttgaagtagagtccagtaaccgagccacaacgaaagatggagttaaagttaagacggcgaagctggtattgcaggatggtcagattctgacaattcaggtcaacgatactggtgatatttcctccgttaaactgaatgggcgtgttattcctaacgcgcaatctcctgacattaagtcgttgggtgcggtaatggggcacgcagcgcttaataattctcaaaagtttcgtaaatcattggctgcaaaagccaagcgtgtggcaaatcctgtcgataaaaagcccgcagtaaaatccagctttcaacaactccaggaagcgaaagctcgtaatgcacaagtaacacagaattatcgctctattcaaaatcaggttgcggtaaatcagcaaaatattaccgatctgcgtggccggatggacaaagaaacagcacggttaaataacgccagagcaaaaaatattgagctgaaaacacgattgaaaaatctgaagtcggggaaataa

SEQ ID NO: 378330 - DNA, 444 bp, Salmonella enterica
atgatcagttggattgtcggcgctattgcactggctattgctgaccgctttctgctgaagcgtagcgatatttcagaaatccacttaggtgaggccgagttcctgggcggttttgtccgcgtacctatcacctataagagtcgtttcccgtttttacggggggcaacgattcgatactggatgagtgatgcgcgcaagcctacaaccgtcgtagagggcgatcaacgtaacttatcttacgccaagagaggcgagaactgtgaatggctattcattcctaccgagtatatggggggtgggaagcgtttatggctgtttactgccaacgttacacatggtgactcatttgtgaatccgttgtaccgaatttttccaatatcgaagcaggttcggagaagctactgtttggatctatcacaggaagtgaatgatgaccggaaataa

SEQ ID NO: 378331 - DNA, 252 bp, Salmonella enterica
atggatgtacgtgccggtcggcagactggcaatctgttggggttggtcacggagatctttgttgctgtgacagccggggtaatagcgtatctgtggggacagcataaaggatgggatctcttcgttacctatctggcagtaacaatagccagcaataacggtcacgaagtcgtctcaggtatgaaacggataaatattgacatgattctgaatggaataatgaatctgataaaaaagggaggcagtaaatga

SEQ ID NO: 378332 - DNA, 570 bp, Salmonella enterica
ttgaaaattggctacgtaagggtgtcaacaaatgaccaaaacaccgaattacagcgagaagcgttagagcgtttaaattgtgagctaatttttgaagataaaatgagcggaacaaagaagcatcggcctggattaaagagagcgctgaaacacctgaaggagggggatactcttattgtctggaaactggaccgtctgggcagatcaatgaaaaacctcatatcgtttattgatgaaattcggggtaaaggagcgcattttcaaagtgtgacggattctattgatacctcgactcatatggggagatttttcttccatgtcatgggggcgttagcagagatggagcgtgagttgatagtggaaagaacgcgcgctggtctggaggtcgcccgtgctaaaggcagaattggaggccgccggcccaaaatgacaacggaaaaaatcgcccaggcagaacgtttgctgttgaacgggcatagtcgccagcagttagcactgatttacgacgtatccacaaaaacaatttataagtatttcccgtcctcaaagtacccatctgcgattccatag

SEQ ID NO: 378333 - DNA, 285 bp, Salmonella enterica
atgccattgccagttagattaaatccctctgaaattcatcatgataaaatgcaatctatgacagcaattgcagaagaattaacgaatctcatagatactgggtccgacgaaatatctagcaaagtgaatgcattgatagaaaagtggaatatctttgctgttactaagtttgaatttagcgattttcgtgactaccactcatggatttctacagaaaattttgtaaagacggccctttatcaagctaaatatcaagcggacttgtctttccatgaggcgaaataa

SEQ ID NO: 378334 - DNA, 717 bp, Salmonella enterica
atggtgtggaatagtgaacataatcggtatgagttcactccagctcacggtgccgatggtccgctgattacctggacgcctgagagacctgaaggaagtgaccttccctcacataccggcagcgacatcaagtcaatagaccaggctacaatactcgtcacgccaattcctgacggcaaagatgaatacacgacaccaccattcccggtgccggaagaacgcgatcttaacgattacattctggtgttccctgcggattcaggcattaagccgatttatgtttatctgaaggatgatccgcgggatcaggctggtacagcttcaggaaacggttctcaaattgaaacaggacagaagtggcttgatttgtctgtaacaaacaatggagggggtgctaaaatcccttcaaatattgcagataaattacgtggaagacactatgatagtttccgtaagtctcgggaggatttatggttagaaataagcaaagatccagagctatcaaaacagtttagtaacggtaatatagaggcgatgcaagaggggaaagcaccaacagccccatttgctggacattatgtaggaccaaaacaagtaattaagaagtttgaaatacatcacataaaacctattgaagaaggtggtggagtgtatgatatcgataatttgcgaattacaacgccaaaacttcataaattcattcattacggggaatga

SEQ ID NO: 378335 - DNA, 267 bp, Salmonella enterica
atgaaagacgttaaggatatatttttaaaatacgttattaagcataaatccactctggtggcttgtgctaacagaatacatacaagattggactcagattactttcagatcaaacagtcgaaaaaatgtaactctaccactatcggtcacttttacttcacgatatcccggtgtgcgcgttatacatttttttcgcagaaaacccgagctttattgccagccagatgggtcatgcaaacgcgccgtgtacggggcgtggatggctga

SEQ ID NO: 378336 - DNA, 408 bp, Salmonella enterica
atgctctccgttaattacgcaatttattcttcaacgccgaacagcgaaggttttactcctattggccgagtcttccatagcgggcgcgagaaaattttgccctggattgccactctgactgaaaagagccgtggggcaatttccaacgaacaaccccagattgagaaaactgtcgatgcagatcactacattcggaacattggtacttctgactggtacgagtctggccaatcaacgaatacctctggtttatgtggccctctcttttctcaattcacccccaagggaggcaaaacctacctggtggagttccgctttaacggcaccaatagctgctctcaacaagtctacgaaataggtgtcggtgaagaacggttatcagtgcctcctgaaaatcgggggcagtga

SEQ ID NO: 378337 - DNA, 1404 bp, Salmonella enterica
atgcaactgacgctccagatagttataaccgatgaatcaggcctgagtcgaacggaagaactgatgacattacagaagtcaggggataccaggaacgacatcggattatcggtttcagaatcgaagcagttgctgaacacagtccagtactcggtggttcagttgcaggccgacgaatatactcacaaccatatccagtgccctcactgcctcgctgcacgtcggatcaaaggtcggcagaaaatacagtaccggacactgtttggcgttattcctgtatcagggcttcgggtgtaccgatgccgttgcgaggagagtgcgtcaaaaaccgtcagtctggtcagtgactgggctggcgatcacacccatccttcactgaaatatatagaaacccgctgggcgtccatgatctcgtatgaaatgacgacccgcctgctgaaggatgttctgccggtggagaacagcctgaatgcctcaacggtgaggaatcatttatgccaggtggcacagcgtcttgatgctgagacggaatcgcattctggttttctttccggttgcccccgcgactggggtaacctgcccagaccggggaaaccgcttgtagtgggtattgatggtggttatgttcgcgaccgggatgacaaaaagcgtaattttgaaattattgccggtaaatctttttctgtcggggcgccaacagacacgcgccgtttcggttttgtccagaaagatgactgtcatccggaacgcaggctcatggcacacctgtctgcccagggaatgcaggccaaccagcagatattctttctgtcagacggcgcggataacctgagggaactgcagttcggtatgtatcctgagtcaattcatgtgcttgactggtttcatattacgatgcggctgacggtactcatgcaatatgcaaaggggctacaggcatcagatccagagacgggcagtaaggtttcggtacttctggaaagcagtaaacgatacctctggcatggtaatgttaccactgcactggaatatattgatgactgcggcatgtactgcgatgaccctgagctcagctatgcgggcctgaaatctctgcaaaaacatctggatgaaatgtatacctacatccggaacaataagatgatgatcccaaactacggtgaaatgtaccggtacggggagccggtttcaacggcgtttgtggaatcaacgatcaatgaagtgatagccagaagaatggcgaaaaaacagcagatgcagtggagcagaaaaggtgcgcattatttgttacagacccgaaccgctgttctgaataacgagctgcaggataaattcgcctgctggtatccgggggtctcgatggacgaacaaagtgacggaaaggtatcagcaatggcagcatag

SEQ ID NO: 378338 - DNA, 573 bp, Salmonella enterica
gtgcaatatgcctacatcagggtaagctcggccgatcaaaatacggcacgccaggaagaggcgttgtcaaaagcgggctatcagccagataaaatttgtattgaacatgccagcgcgaaagatacaaaccggccggtattacaggaactccttgggcaattacgctccggcgatacgctccttgtccattccatcgatcgcctttgccggaatatgtcggatatgtgcgctgtcacaacccggcttcgtgaccagggcgttactcttatttttctgaaggagcagctcacgttcagtgccggcacaaacaatccgatgcaggaactgcagttgcacatgatgtcagcattcagccagtttgaacgtgccttactgaaggaaaggcaggccgatggcattgctgcgaagaaagcgcggggagaaaaaaccgggcggccctgtgccgatatcaaaaagatccaggaaattgatgcgctcagaagcaggggcgtcagactcaggatcgcctgcgaccatgcgggtcttggcgtctccacatactataagcttcgcaaccagatgaacaaccattag

SEQ ID NO: 378339 - DNA, 573 bp, Salmonella enterica
atgaagatctatgtcatcaaaatcgctgttcgtggtgtcagtcctatggtctggcgtcggataagaatcgcggctgatacgtcgctggccgcgcttcacttcattatccagatcgtacagggctggggcgacgactatctccaccagtttcatatttacggtaaagactacggtatctcttacgagggcggcattggttttccggataatccgttccgggtagttattgatgatttcgctttcgataccggcgatcgctttacctacgaatacaatttctttgagtactggcttcatgacattcgcatcgaggccattcatgaaaactcaacgctgaaaacgccattctgtatgagcggccgtggtatgcccggagcaatggctgcggatgaagctgataagacgctggcgttcctggaggccatcgttaatgccgatgattcaacaacggtcggcgatatcaggccttttatcgacgatctggatgccgtccggttcaaccgcaataaaatcaaccggcaactgagcaagcttgaccttgtatccccggcactggagcctgaagtgatctga

SEQ ID NO: 378340 - DNA, 723 bp, Salmonella enterica
atgactgacagactgaataaatttaagcaacccgttggcgcagaattatccggctggaaaagcgctaaccagccctgtgggaaaatgctggaaggtcgctattgccgtcttgaacgtatcaacgctgaacgtcatgcggtggatctttacgaatgttatagcgtggcgacggatgagcgagactggacttatctgatttcaggtccttttaatagttttgagttttacaggacctgggtgttgagtgttgaatcccgaaacgacccgctgcactacgccgtcatcgatgctggcaccaataaggcagttggcaccgtcgcacttatgcgtatggatctttctaacggcatcattgaagtcggcaacgtgatgtactcaccatgtatgaaacgctcacgtatttccactgaggtgatggcactttttcttcgctacgtatttacagaactcggatatcgccgttttgaatggaagtgtgattctctgaacgcgccgtcccggactgccgcagaacgcttcggctttcgtttcgaaggggttttccgtcaggcaatggtcacccgggggcgaaaccgtgataccgcatggtattccattattgacagtgagtatgctgctctgctgatcgcattcgaaaaatggcttgctccatcaaactttgatgaatacggtagacaatggaaaaaacttggcgtattcatcgcagaagagcgtgcccggtga

SEQ ID NO: 378341 - DNA, 921 bp, Salmonella enterica
atggctcttgaaccggaaatcgcaaatcttgtacacgactttattgctgcaggtcgtccttcatctcgtcatcagacaacagaagaacgtcgcgctgaatatgttgccagtactgcactggcgggaactattgagacccgtatatatattaaagatgaaattattgaaaatattccgttacgtatcttctcgcctttaaatgatgagacagtattgcctgcgattatctattatcacggtggttgctttgtaagtggtggtttttttactcatgataatcaactgcgacagcttgctttcatgagtggttgccgtgtcattgctatacaatatcggttagcgccagaacatacttatcctgctgcacatgatgatgctgaacatgccgctaacatcgtctggcaacacgccccggcattgggagttgatcgaaaacacataacattgatgggagacagcgcgggtggacatattgcactgataacagcactccgagtaagaaatgccgggcggtggttacccggacaactggttcttatttatccgatgctggatgcaacagcatcgtctgacagctacaagttaaacggcagcgattatatactgacagccgacacgctacttagcggttttgaagcctactttcctgaaactgattttatgcatccggaggccagtccattatttcgtaacgatttcgccgggttaccacatgtacatattatcacagcagaatacgatccattgcgtgatgagggtgaaactttgtttgtccgcatgactcagcaaggggtaaagtgtaccgctcagcgttatttgggcgtcatccatggtttctttcagcttggtggcatcagtcagacagcacataatctgatgagggatatttgcgctctggttgagaagaaaaatgaccactga

SEQ ID NO: 378342 - DNA, 162 bp, Salmonella enterica
atgaatgatgtgatgagtgattttcaggcactgataattcgagattttctggaagagaatattgagcagtttgctgagttctgcgaccgtgacggacgggacggagagggcattatgaatgaaatcttcaaagtgctgggtatactgagcggtgatgagtaa

SEQ ID NO: 378343 - DNA, 906 bp, Salmonella enterica
atgaataaattgttaaaggaaaaggttcccgctcgccggcgtatgccggctataccgtttctgaaatgggcgggaggcaaacgtcgcagtctggacacgctgcaccgctggctgccctctccggatgaggttgagtgtctggtggagccgtttgtgggcggagccagcgtttttctggggacggattaccgccagtatctgctggcggatatcaatgccgacctgattgatgtgtatcttcacgtcagggatgacccgtcggggatggttaagcgtctggagagactgtttcatgagggtaacaacgaagaagcctaccgggaaagcaaggacgagttcaaccgtatcagtcccggaccggagaaatcggcgctgtttatctacctgaaccagcactgtttcaacggtatctgtcggtataacaagcggggtatcttcaatgttccgtttggccggcggaagtcagcttacataccggaagcggaaatcatggcatttgccaggaagacggagcggtgccacgtttcgttttttcatgcggggtttgaggacacgctgaagatgacaacggcggggatgttttcagggatttcgtgtgcgatgtactgcgacccgccgtatctgccggtgagtgatacggcgggattcacgacatacagcggggaggcattcacggtagctgaccatgagcgactggtcggccagctatcagagcttcactcccggaaggggataccggtggtgatatcagcaagtgacacgccgctcagccacagcatttatgggaaggcaggcttcagtctgtacgggcatcaggtatcaagaacggtatcggcaagcgcggcgtcgcgaaaaacggcaggtgagctgacgggcgtgctgaggcatggtccgggtaaacgttaa

SEQ ID NO: 378344 - DNA, 144 bp, Salmonella enterica
atgggcgatatcaatcacgactgcccctcgattttttatgctttccgggtaacattcagcccggagaccggtaaacgtaatggcggtacaacgcaggcccgcgttatgttaccggagaccatcagaacattatccggtaagtga

SEQ ID NO: 378345 - DNA, 327 bp, Salmonella enterica
atgttacgaatcagcgacgtcatagagttagcgatggtcagtcgtaaaactatctataacgcaatcaatagtggccggctgaaatatcagttggtgaatatggataatcgtcaggttcgtatgtttctcgaagaggatgtcttcgaagcttttccgaaaaccaatcgtgcggtgactcaggagcaagaagtccaggcgctacgtgaggaagtcgcttcgcttaagtttgcgttggcagagttgcaaaaggcagtgaacgccatggatcctgaaggcaagtacgaaatgaccagcgttaaagagccatcaaaaacgcccccccgctag

SEQ ID NO: 378346 - DNA, 456 bp, Salmonella enterica
atgatgtttagcgcacagcgggtagtgaagtttaccgggaacgtgagtcggacggccttgttaacccggctggcggaaagcctgcaggccgacgggctggttaaaccgagttttgccgatggggtacttgaacgggaaaacgtctacccaacagggatatttatggagacccacagcgtcgccattccgcataccgagtttgaacatgttaaccagaccggttttgctatcgggattaacctggcgagcgttgaatttcagcgtaccgacgagcctgatgagagcgttgtgccgcagatagtcgtgatgatggcgattgataaaacttgcgaaaaagtggcaattattcaatccttattcgcattattggccgatcgcgatcgagttaacgatatcgtgaaaatgacgccggaggagattgcaaaaatgttcaccgatgccgtcgtcacgcagtaa

SEQ ID NO: 378347 - DNA, 1368 bp, Salmonella enterica
atgtttattattgattacattgtggggttaggggcatctgtcatgatgccgcttatatttatgctcctggggttgatattacgtttgtcgctgagcaaagccttaaaagccggtttaatggtcggtatcggttttataggtttaagcattactgttaatctgatgatcgattccctgaccccagtgagccatgctctggtggagcgttttggtcttaatctcaatgtcctggacgtgggctggcctgctgctgccgccgttgccatggggaccagagttggtgcgctggtgattccggtgtgcgttgcgattaacgtcctgatgctgtacaccaaaaccacgcgggtactgaacgtggatatctggaacctgtggcatcatgcgtttactggttctctggtggcaattattactgatagcctctggttgggggtattcgctgccggtatcaactgtattattacaatggtgatagctgaccgtaccagcggtgatgttgagaaatacctgaatttaccgtctatttctgtgccgcacggtttttctgcatcgtttgtaccagctgcctggttggtgaatgctgtcgttgaccgtatcccggttattcgtgatatcaaaattgataccgaagttatccagaaaagattatcgattctcggcgacccggcatctctgggggctattattggcgcactgttgggaattattgccggtattgaagtaaaagccatattacaaacggcgattacgatggcggcggtgatgaccattattccgcggatggcgaaaatgctgatggaaggggtttatccgatcagcgaacgtattcaggagattgcacagtctcgcgccggttcattcggcaaaatcgctatcggcctggattctgccgtgagcgttgggcatccggtgacgctgtccgtgtcgatgctgatgatcccggtgatgctggtactggcggcaattattccaggcaaccagttcctgccgttcgcatccttgaccgggctaccgttcgccttcgtgttggtgacggcagtttgtcgtggcgatatgttccgtactctgctgaccgggttgctgaccttaagcctggcgctgttaattggtaccagcctggcaccgattgtcaccagtaccgcagtcagtaccggcttctcgctgccgcaggggaccaccagtataagcagcgtggactatgccggagcaatgctaccgtgggcgattatccagagcttccacctgaaagagattggcgtgggtatcctgacgctgtgcaccatcgcactggtgctgtggaaccgtcgtaagctggcgcaggagaatgagcaagtctcagcagaagtgagcgtggaggccgtaaaatga

SEQ ID NO: 378348 - DNA, 282 bp, Salmonella enterica
atgaaacacatgatgatttgctgcggcgctggcgtcgcgaccagtaccgttgctttaaataaacttcaggatttcctgaaaaaagagaatattctcgataaagtccgtatctctcagggaaccgtggctgaagcgaaaacccgcgacgatgtggattttattgtttccacttcaccggttgcgctttctattcccgttgttaacgctctgccgctattaaccggtatgggcacggataaagtattcagcaatgtaaaagaattaattctcgccggggggtaa

SEQ ID NO: 378349 - DNA, 522 bp, Salmonella enterica
atgcaaaacattacgcttattggtatcgatctcggcaagcattccttccacgttcattgtcaggataaatcaggcaagtcattactgcgcaaaaagtttacccgcaccaaacttattgagtttctggcctccattacatcggctaccgttgtgatggaggcctgcggcggtgctcatttcatggctcgccagattactgatttaggccatgaagcaaaattgatttctccgcagttcgttcgcccttttgtcaagagtaacaagaacgattttgtcgatgctgaagccatatgcgaagctgcatcacgtccctccatgcgatttgtgcaaccacgaacagaggctcaacaggctatgcgtgcacttcaccgggtcagggagtctctggtcagagataaagtcaaaacgactaatcagatgcatgcttttttgctggaatttggcatcagtatgccgatcggagccgctgtaataaaacgactttcaggagagcatgaaaaattgtggggtaacggtggctga

SEQ ID NO: 378350 - DNA, 1107 bp, Salmonella enterica
atgcgaattttatttataggtccaccgttatatggacttctgtatcctctcatttctcttgctcaaggattccgaactaatgggcatgaagttataatggccagtgcgggaatttttgcaaaaaaggcaagtgaagcaggtctggtagtgttcgatgccgcaccagaccttgattcggaagctgattatcgtcatagagaggaacttagaaagaaaacgaatatatttgggaacttctctttttttagtaacgaaatggctgatagtcttattgaattagctgcttactggaaacctgacttaattgtataccctccacttggtctggtggggccgcttattgcagctaaatatgatattccaaccgttatgcaaacagtggggtttggacatacttcagcccatatagaattagtaactcgaacactagctaatgcttacgtacgtcatggtgttaatgccccaaaacgagatcttgcatggattgatgttacaccaccaagcatgagtattattaaaaataatggtgaaccaataatttcaatgcaatatataccctataacggaggtgcaatatgggataaatggtggaaaagaaacccggagaggaaacgcttactaataagtttggggactctaaaacctattgtagatggattggatctcatctcctgggtaatggattcagctgacgaagttgatgcagaaattattcttcagctttctgttaatgcccgcactggtttacgttgcctcccacaaaatgtcagacttgtcgaatggctctccatgggggtttttctcaacggcgcagatggtttcattcatcatggaggtgctggtaatactttaactgcactgaggaacgggataccacagattgtatttggtcagggcgctgaccgtccagctaatgcacaagctgtggttaaacgagggtgtggagttattccaggcaaagatggtctgaccagcaagctgatcaattcgttcctgacaaatacagtaatacgtaaatgttcagaacaggttgctgttgaaatggcaaatcaattatcaccttctgaagtagcaaaactccttataaaaaaaataaaaaatgaatga

SEQ ID NO: 378351 - DNA, 135 bp, Salmonella enterica
atgaaggatgtactgggaaaagaaagcgaaaatataaatccaatccctaacatcaataaatataacttatcaaaaggtaaaagaaacatagctatattccacagttatattagctaccatttgatggtgaactaa

SEQ ID NO: 378352 - DNA, 1515 bp, Salmonella enterica
atgagacatacatattctcttactgatttttcagaaaatctggttccatttactgctcggcaggtaaagtcatcattaatatggtgtgctccggatattaataacagagatgtacttaaggactcctgcagttatctgattgatccggataattcggctcctgctaagatattctatgcagaacgctatggaggaagtgggattcagcgcaatggcggcggggctcgttgtggttttgatggatattatcagatcaaggggattggggccaaccctttagtcggtactggttctgacagaaaacactccagtggtagactggatatctgtgatgccatttatgaggctttctggagtgaaatgctcggacaggtattaccttatggtgcagtccagacacaagctgttttactcgttgaaaatgacgagacaccggaacgagcattacttgttcgtgaacccgtgctccggcctgctcatttcgaacgctctccctactttcgtccacaatctgagtatgaaggaaaactaatacatgatactcagcgggtcagaaatgtaatacgcagattgcctgaatgtttaccagttccttacgttggtttcagcaaagaggctactttagatccgcaaatcttctgtattgaaggtttgtgcgaaatggcccgacgtcaagcatggcaaatggcatattgccgaacgcgttttctgcgcttaacgacttctccgtctaatatatcaatagacggaagattattagattttaatggactcagatgctttttcccggctgatcatcactataattttgaatacggactcagaattaagtaccagatgaccgattctgttattcttcagcagggattatccaacctttgtatttatcttggcaaataccattttgggaaggaatttacccaagtttcctgtaaaatggttgatgatacatacaataaaacttttcagaatgcctgttatttttgttatctggatttactaggaatcccttgtaatatttttgaattcaataacatacctgatgttttgattagactggcaaattgtattatagattttcttaatagtcaaagcaaggttttgcataatccagctaaaaatagtgcaaatgatttattgttgcagaagatgataacaaagataatccataaaagtcttgggaatgacataatgaaatgtgaaatcattgaatatgacattcactataaaagaattttattaacatttatggaattcaatcagtggttagctaaattatgtaatgataaaggatgggattttttatttttaatggagcagattgaacaaaaagcaaaaaaaagattgcaatcaagactatgtctggaatatttatgtatgtctaaaaatatatctgatatttttaatgaatacaaatccaataccagtgagttgcaaaaacaattttacaagaaaggggaagaattaaaaatatttgccagagacgcgttaggatatcaacatcctgttgtgtga

SEQ ID NO: 378353 - DNA, 435 bp, Salmonella enterica
atgattttttcttttcaggaaaaaaatagcaataagaatgaattatcaatccatgaaaaaattggttttgctgtaagatgtatgctttacaatcgtaattatagcctctatccggttttgactattcagatctggactgagtttgcaataaaccatgaccaaattaaatttctttttgacacaaagggaatgccacttgcatacattacatgggcttacatagcaccggatacggaagagcgattgattaacgaccctgagttcagactacatctttcagaatggaatgaaggggggcgaatatgggttcttgatttttgttgcaaacccggatttggagctaaagctattgaacattttatcaaattccctccctggggggaaggtgaagtgcgttggcttagccgaaagaaaaaaataatgaaacttcgataa

SEQ ID NO: 378354 - DNA, 1275 bp, Salmonella enterica
ttgtttcgtaaggatgcgttatatcaaaggaaaattaagtggcgggggcgggctattttactttcaggattgccgctgtggttaatcatgctgggtagtgctattttcattgcggcattacttatttttattattgccggatcttatacccgtcgtgtaaatgtcactggggaggttacgacctggccgagagctgtaaatatatattctggagttcagggtaccgtagtgaagcagtttgttcatgaaggacaaacaatacataaaggcgaaccactctatcagatagatgtcagcaaaagtaccaagagtggtgtcgttagtgataatcagcgaatagatattgaaaaccagattacccgcgtgaaaaatatcatatcgcgcattaaagaaaataagaaaattacacttgacgcacttaaaaaacaacacgcgcaatacagtgatgctttctctagatcatcaaacattataaaaagagcagaggaaggaataaaaataatgagaaataacatggaaaactataaagactatcaaaagaaggggcttataaataaagaccagttagccagtcaggtagcgctgtattaccagcaacaaaataactttctcagtctgagtggtcagaatgagcaaaatgctcttcagataaccagtctggaaagtcagattcaaacacaatctgctgattttgataataggatttaccagatggagttacaacaatatgagttacagaaagagctggttaatactgaccttggtggagaaataattgtacggtctctatctgacgggaaagtggactcaatgagtatgactgtgggacaaatggttaatccaggagacagtttattgcaggtaatacccaaacatattgaaagttattaccttgttatctgggtacctaacgatgcggttccttatataaataagggggataaggttaatattcgctatgaggccttcccggcagaaaagtttggccaattttccgcaactgtgactattgtatccagaacaccggcttcggttcaggaaatgctgacttaccagggggcccctagggctactcaggacacctctgccccctggtacaaggttattgtcaaacctgacaaacagacgattacttatgacggaaaatccctttcgctggaaaatggaatgaaagccagaagtacattatttctcgaaaaaagacagatctatcagtggatgatttcacctttttatgacatgaaaaacagtgctacaggaccagtgaatggctaa

SEQ ID NO: 378355 - DNA, 2097 bp, Salmonella enterica
atggctaaaggaaatttcaaacaaatcgttaatcagctggatatgcgttggcgtcgtagtgtgcctgtagtccatcagacagagtcctcggagtgtggactggcctgtctgtccatgatatgtggacactatggcaagaatattgatttgatatcacttaggcgacaatttaatctttcagcgcgtggtaccagcctttctggtataaaaggaatggcagaagaactggggatgcttacccgggctttgtcactggagttacatgaactggggggactgcaagtcccatgcattcttcactggaatttcagccactttgttgtattagtcagggttaaacgaaacaggtttgtattacatgatccagcccggggaagaagaattgtcgggcaggaggaaatgtctcagtattttaccggcgtggcacttgaagtatggcctggtagtgaatttacggtagagactgtgaataaccggattaatatcagaaccctgattcacagcatttatggcattaaaagcactctggccaagattttctgtctttcagttatgatagaagcaattaatctggttattcctgttggaactcagttggttatggatcatgctatcccggcaggtgataagggattgctgacccttatttgtgcagggttgatgttttttattcttctccgggctgctacaggagtgctacgagcctggtcatccctggtgatggggacgcttattgatgtccagtggcagtcaggcttgtttaatcatcttatgagactgccgttgggatattttgaacgaagaaagctgggggatattcagtcacgttttagctcactggataccttacgtgtcacgttcactaccagtgttgttggtgccattatggacggaatcatggttgccggggttctgtgtatgatgattctttatggagggactctgacttggatcgtactgggtttcaccgcagtttatgtacttattcggttagtaacttatgggtattaccgtcaactatcagaggatacaatcgtcagaagtgcgcgatccagttcatattttatggaaacactgtatggcatagccacagtgaaaattcaggggttggctgaattgcgaggggcgcactggcttaatcttaaaatagatgctatcaattctggtgttaagttaaccagaatggatcttctttttggaggtgtaagtacgtttgttgctgcctgtgatcaggtgattattttgtggctgggaaccagccttgtcattgacaatcaaatgacaatcggtatgtttgtggccttcggtgcttttcggggacagttttcggatcgcgtcacttcactgacaaattttattctgcaactgcgaatgatgagcctgcataatgaacgtattgctgatatagctttgcacgagcgggaaactaaaaaacctgatctggatattaaagctgcaatgtgtccggtttccctcgatgcggttgaactgagttatcgctacgacagccactctcctcctgtgttcagtagcctcactttttcagttgcccccggcgagagtgtagctatcacaggcccttctggttcaggaaaaaccactttgatgaaagtattatgcgggttgtcggaacctgatgtaggcagagtcatgatcgatggcatagatatcagacatataggcgttaataattaccagaaaataattgcctgcgttatacaggatgaccgtcttttttctggttctgtgcgggagaatatttgtggattttctgaagaaattgatgagggctggatgattgaatgtaccagagccagctatattcatgatgtaataataaaaatgcctatgggatatgatacactgataggcgaattaggtgagggattatctggaggtcagaaacaacgtatttttattgcacgggcgctttacaggaaacccggtatactttttatggatgaggcaacaagttctctggataccgaaagtgagcgttttgtgaatggtgcaataaaaaaactaaatattaccagggtgattattgctcacagagaaacaactcttagatctgttgatagaataatcacactttaa

SEQ ID NO: 378356 - DNA, 207 bp, Salmonella enterica
atgaagagtaaatatgactggttgtttcagttaagaaaatgcagcaataaagaaacactcgagaaagtcgctgaatctaaccgttataaactgtcagatgatgaactggaaatgttcaactccgctgctgaccaccggctggctgaactgaccatgaaccgtctctatgacaaggttccggccagcgtatggcagtttgtccggtaa

SEQ ID NO: 378357 - DNA, 261 bp, Salmonella enterica
atgataaatgaaaaaaacactcacgatatgacatcggctgacctcagactccaccagaaacgcggacgccaggctctcatgctggaaatcgccggagattatacagcggctgccctggcgtggcagaacaccgcaaataaagcgccactcccgcagtggcgaatattcgccagggaaagggggcgttattgtcagaaccgtaaaacaaccggttaccgcccgcacagtgacaggaatttccgcgcatcagggggccgctga

SEQ ID NO: 378358 - DNA, 282 bp, Salmonella enterica
atgagcgaactggccggtcttcacccgcaaatcagtgagcccgatgagtatgagcagtatttactctctgctctccttacgaaggctgccacagacgccggcaaaaaattaaacctgaatgaacgccgggccgtcgccgctgaattttttgactcccgccaggctgaccgcaaaactcagcccggctaccgccgaagcgccaccatgtcacgcaaaatgcgcgatatccgtgctcaggaaaagagcgactttcactggaaacctgcacgaccacgacgctga

SEQ ID NO: 378359 - DNA, 624 bp, Salmonella enterica
atgacggcaggtacggttaaaaaatcaccggttattgtggtgaagaaaaaacgacaaatcgcgcctgtcacggaaaacgtgccagctcccgctgcacaggaaagggaagaccttcctccggttgccagtgagtcacctgttgtcagcccgcagccacaaactcacccctccggactgacaaaaaaacagcgcaagttcctgcgccacaaagaaaggatgcgtcagattcgccgtgacaatatacgaaacggacggcagaagctgcccctcttccgccaggtctttcctctactctggcctgaagacaacgtctttcgccttattaaggtcggcatcagcaaagatattgaagcctttattaacgaaaaccctgactgcggtcttacccttatggactgccgctgcgttttctccctggttactcaggggctaccctatctcagtctttttacccccggagccgttcgttacgacctcagcggactgcccgccggctccgtcactgaaagggaaatcctccacgctcgccaggcctgtgaacgcattctccgttttcagcaacaaaaggctgaaaaagcgcaccagaacgccgcttccgggcccggtgatgagaaaaatgactga

SEQ ID NO: 378360 - DNA, 870 bp, Salmonella enterica
gtggctagcagcactcacaatatttcctccggatacgtgcaggtcatcaacccgtaccctcagttcattgaacctgcagataaaaagacgcttcccttctgtcgtaaactgatggaaaaagcggccggtttcacgacgcgttttcactttgaactgtgcgtggcgttttcccgctccacgggacggcgtaagcgtcggccccctgaactgcgctgccgggcaatagacgccctgctgcaggcgatgtgtttccattacgacccgctggccggggagacgggacgcgtccagcgttcggtcaccaatctggcaatagagagcggactggcgacggagtctgaaaagggtaacttctcaatcacgcgcgtgacccggacgctggagtccctggacagggaattcggtctggttatctatgacaccgagttcgatccggagatcggctgtaacgtgccgtcgaatatccagttcacgccggccctgtttgaggcgctggaaatctctccggaggcgctggcggctgtgcgtgagagccgtgctgagtggaaaaacagacagcgtgaaaaacatggccagccgcgtctcgacctcatcgagctggcctgccaggcattcagctatgtgcgggacggattccgggcgtatcaccgggaacgtcgtctgcacgggctgaagcgcgcccgggcgaagcgtgatgctgtacgcagccgtaaggaaatcgaagccctggtgaagcgtgagctgacccgggagattgcaaacggactgttccctgccgacagggacgcggtcttcagggaggttgagcgtcgtaccgccgagcgtacgataatgtccaggggtaattacacccgccttgttcccgcctga

SEQ ID NO: 378361 - DNA, 255 bp, Salmonella enterica
atggggcgggaaaataaacagaacggtgaaaaggcctgcaaaaaaggatcgtcggcgatcttcgtcttgcaagcggttaaaaatagggtactatttactgacttccggaacgggatcctgatgcgatccataaggaaaaaaggtttgaattcatggtgtgccacgccgcaaggtggcaggagactggctcagaatagttttaccggagccagaaatgtgaaaaccccgagaatcttgtcatctttggcgggataa

SEQ ID NO: 378362 - DNA, 525 bp, Salmonella enterica
atgaatattgcgaatattaatcacatcaccggcagacgctggtaccttgcccggtataacaccagcggcaaaaaccgtgaaatgctgtttcactggctgggcgagctgcaggtcgtcccctggacgcccctgaccatacggcaggttcgccgcactgacgccatctgttctttccgccgcaaaatttcagccgtctttccgggctatttctttctcaggacggatttatccacccgcgcggcatccgacattcgccggcacagcgcgttcattgattttgtgcagtatggcagcaccatcacccccgtctgcgaccgtatcgttgacggtctgatgaaagtttacccggactccgcgctctgtccgggagccagggaggcgctggacgcggcttcccgcgtatggctgacacgggcgcagtaccggcaccttctccgcctggaggaaactccgcttccggcgtcgagaatttccatgctcctggacctggtatttaacgccggcaatcacggctttgaggagtga

SEQ ID NO: 378363 - DNA, 672 bp, Salmonella enterica
atgactgaacatcccgtcagacatctgctctggtgcatgcttgcggccctgcgagaggcatctgagggcagaaaattcaattcagaaaaggaacgccgccgctggcttcgggaatggctgcgcaacgcgaggaaagaggagacgtttcgccgcctgcccgatgagattgccacactgcgccggctgctcgacagcaaccgggtggtatccattgaaaacgtgcttaaccagctgttcatcaattcggcagaagccgataagtgtgacctgttccgcttcagggcggcgctgaacgccgcgaagaaaacgggctggcgtaccggcatctgccggtgtaacgacgaaattctttatgaaaccctgcaccgggctgaaacccgtcgcagtcatattctgcagctggcccgcacggaggagagttttgccccgaccggcgaaatgaccgctcccgtcacgttcctgctgatacaaccgcagaatcgcgcccgggagatcgtcgaacagattttccatgacgaaaaattccaggtggttacaggcagggaggaaatgctctaccacagctcggtcagaaccatctggattggctgccccaccctgcctgatgccgtctggggggccggtaccgacaatatatggacgtcggctgagaccgggtacgcactgcattaa

SEQ ID NO: 378364 - DNA, 360 bp, Salmonella enterica
atgaatcttgaaggagcaggtattgtttcgatggttactcttatgctgtttatgttgtttgctttagtgtttatgcagatagaggatgcggatctggcacgggaggcagcgacgctgccggacgtcagggttatcggaaagatcacggaaagcgaaccggtaaatgacaatactgtccgtctgcggcttgatgacggtaccactgtgacactggagacccgtgactccattccggccggcgtgacggcggtgcttcgccggaccggtgagacctcccggaaccagaaggactggctgtgcctgaaagcactgagtacgacaaacacaaaatgttaccgtctgccgggagacctcttctga

SEQ ID NO: 378365 - DNA, 264 bp, Salmonella enterica
atggatatttcagcttctgtcccgcttaaggtactggtgatcgacaatacctgcggaaaacacattcatgacctccagccggaagatgacccgctggcggcggcacgcgaattctgtaccccctgtaactgtctggtctgtgtctacagccacgacacgccgctcgttcgcctggagcgggcaccgggaaccgccgaccgctggagcagtgtgacgcctgaacctccgcgccgcagaaggtcttaccgtctcagggggttatga

SEQ ID NO: 378366 - DNA, 192 bp, Salmonella enterica
atgcagaaatttaaatcagaagatatctgtacgaaaacggcgacatacgcgcagttcaggacaaaaaccggagaatgtattggtcttccgtattaccgttatatccgggaggggctcacgttcccgcaggctgaaagagggtgttatttcagcgaggctgacagcatttctgaaaaaaacgaagactcataa

SEQ ID NO: 378367 - DNA, 195 bp, Salmonella enterica
atgcaacgtaatttctctctcaaaaagcactatgcccggaccctggaatatcaggccattcgctcaacaaatgcctgtaacatcccggtcagtgcgcgtcaggtactgcatgcactggtggaattactgccggcacttgatgcagaaaaactgaacgagaccatcatccagctgaaccagaggaaaaacgcatga

SEQ ID NO: 378368 - DNA, 1008 bp, Salmonella enterica
atgaaacaatactctgtaaccgctttagggctgttactcagtggctgcgcggtgcagggaaatcacataccggaggtacccgctgacgatgttgttgaccagctgatggcggtcaatattcagaaagtcagcctcgtacagcaacaactcattgctgcgctcacaccggttttacccgcactccctcagcagccacgcccggcgtcagcattgctgaccggaaaaaccgccacgccacctccggccggtccggacaccgccacagccacagccaccgctgccgtaccatcctcccgtctgcctgcgttaacatatgtcggccgacaacaggatctcccggcgctggcagcctccggtaaagcgccaacactgcatcaggcgctcgccagaatcgtccctgacacctggagcatccactttgatatgggactgaagccggaagtgaaacgtccgctgacctggatcggtaatgatcagtggccatatgtcctcaaccggatactggtgcaggaaaaactgcatgctgagatcaactggtctgcacaaaaagtatcggtatcggatgccggaaccaccccgacgtcgtcgacgtcaccatccgtcacatcagcgtctgcggccaaatcagcatctgataaacctgctggtaaaaatcctttcacgggaggcagaacgaaatccggaacaacagcggcagcagccactggtcccggggttcaggccgccatgacgccacccacggtatggcgtgccattcctggtgtgacgcttaaggacacgttactggactggacaacccgtgagaaatgtccggccggtggaacctggaaactcgcatggaataccagcgtcagttaccgtatcgacgccccactcgcgttcagcggttcattccgggaagcgctcaaccagttattcatcctctacggagccgcgttcaccccactctacgcagcaactcagtcggttcagtgtgtcctgctggttgacgacagggagccacgctga

SEQ ID NO: 378369 - DNA, 432 bp, Salmonella enterica
atgccctggatattctttcttctggggctgtttgccgtggtgatttatggagggggaccgacaccttccggacaggcgctggaacagcagaatatccagaaccagctgtcacagcaggcccgacagactttcgcctggcttaccgcccttaatgactggcgatatgagcatcctttacagaatggcaccatcgatgccggccagaccggcattccactttcaggtcacctgaaaaaccaggtcgtcaacaaccgtctttgggtatggcagccggcgaaacccggcctgtttaacgccctgctcgctcagagcgaccgttcagcgctgattggtcaggttcgtgaccggcggctgtttgatgccaccaacaccgatatgcaggttgccgttcctgacagcgttcccgacggcagtctggtctgcctcaattaa

SEQ ID NO: 378370 - DNA, 1641 bp, Salmonella enterica
atgatgagaaaaacgcgtttggcgctttcggcgctggcggtgctgtgcctgctcgccggctgcagcacgcttgacagtattgattcacttgaccggaaggctcgtgaggacgggaacaccgtaaataaacacctgcagacgctcaaaagtggcgatgtcgttcgtgacctccctggccagtggatcaaccccattccgctcaatgccagggggcacgaccgggaacgtctccctgcctgtcttattccggttaatcgtcccggcgtgatatcgctgaatgacatcagcgccctcatcacccgcacctgccatattcctgtggtgctcacaccggatgcgcgccagataacacaggccggcgggccaaccgaacagattaagggtcccctgcccgcgccggacgcaaacggtatgctgccactggcgcagatgggcagcagtgcggcaacactgtcagcaccacgacagcattcagaactcacactgcggggcgtttactggaagggtgcgctcgacggttttctggacaatatcacagcccgtctcggactgtcctggcgctatgaagaaggccggatagtcatttattacctggatacacagaattgtcctgttttattcatggattcactggcgggcttcagttcaaaaaccgtcagtggcacaacctcatcgacgggcagcagtggcggcggaagcggaagcagcggcggtatcagcggcgactccagtacctcacagtccacagacatgaccatcaaatccaacctgtatggtgatgtctctgccacggtcaaatccatgctgacccccggtgtcggcagaatgaacctgtcagccggtgtgctgaccgtcaccgataccccgcgcgtactctcacagataggccggtatattggtgaccgtaaccgggaactgaaccgtcaggtcgtactgaacgtccagatttacagtgtcgaaagtaaacgttccgaccagctcggcatcgactgggatgcggtattacgcctcgggagtgttaaatccacgttcaccagcgcatttgccggcgcggctgattccatagccagcggcggcgcgatggtcgttgatggccagggggcagggacaaaagcactggtcaaagctctgtcggagcagggaaacgtcagcgttgtcacacaggcatccagcctgaccaccaatctgagcgcggttcccattcaggttgccctgcaacaggactacgtctctgatatcaccagcgaccagaccgccaacgtcggcagcagcgtatctgtcacccgttcgacaatcacaaccggcttcaacatgacggtgttgccgtatctgatgcccggcagcagcaatatgcagttgcagttcagcgtcaatatgtccgacgacccgaccatgcggacggttaaagaaggcgacaacagttccgtcgaactgatgaagacccgcctgaaaacctttacccagcgcgtcaacatgaaatcgggccagacgctgattctgagcgggtatgaacagctcaataccaccgcagaccaccagggcgtgatatcgccacgtttcttcgggctgggtggcggcgcacgcggtgaccgcaaccgtacccagctggtcatgctcatcactcccgtcattctggggtaa

SEQ ID NO: 378371 - DNA, 1284 bp, Salmonella enterica
atggataaaattcataacctctacgttgttacccacggcaaatctcactatgtggccggactgaactgggaggttatcacccctcagtcagcccgccggtcacgcagacaggcaaaggagggcggcgcggatcattatctggtgtggcgccagccggatacggttctgcttggtatgacggtgctttctgcatttcgggaaacccgcgatcgtcagacctaccgttcgttagcgctgcatgttctgccccatctgccggctaacggttatgccgttattgccttatcggataaggtctggtggtttgtggccaccctcgaaggccgtctttctccgctcagtgatatcgtgggttctcctgagcagataaaacaggccatcagcgtctttgtcacaatgaaccccctgccttccgcaggctgggaggtcatcgccccggaaaatttcgtacccgggaacacacagcctccgccgccactttccacctggctggctcccgacgcccggcataaaacgccgcgcctgttacccaccagtgccagggccgccgccgtgtcatgggtgctgctgttgctggcgctcattgccgggtactttggctggcagtactggcagcagcgtcagcaggatgcggaaatcgcggcagcgcaggcggcgctgaccgcaaggcgggcagaactcagggacgaaaacggccaccgtccatggggtgaccagcccccctttaatgccgtgttacgcacctgtcatgaccactggaaaaccctgccattatccattgccggctggacgttcgcacaggcgcagtgttccccgtcaggcagtctttctgtcagctatgcccttccggagggagggaccgtggccgattttgccgggcgactctcccactggtatcccggtacttcggcgggatttaacattcccggggccgctgacatggcaagtttcacgctcacttttgcaccaccgctcaccagaccggcagaaaatattccggataacgccacacagacacagcgtttcaccagttttgctcaacggctgaacgccgcactccagctggtgaaacaggacaatgcgttacgtgatgaggacggcaatatcattgaggttccctggaatacttacgcctttacctttgtgaccgatattccccctgaccggctgtttctggctcagcacttcgatgacgccggacttcgcttacaacaggtttccctcactcaacgtgacggtcaactgacttataccctggagggttatctctatgctgcgaaatag

SEQ ID NO: 378372 - DNA, 561 bp, Salmonella enterica
atgctgcgaaatagcctgtttgcagtacttatgttacttcccgttctggtccgggccgccggagcaacgccggcacccgttacgacacttccaccgccagcgccagcgtcggtaccagtacctgcgccggcaccacctgatgtgaaaacagttgttcccccttccactggcggcacggttgctcatatggaagatatacaggcacagaccctgctgtataaagcacagctcatgcgtgacaaggctctggctgagctacaaaaaatcagcagcaacagtgacagtctgcccgtttccggaggcccgttatcgtatgacacctcagcgtccgcacctgtctcatcagcccgggatgatgcgtccccgcaggtcattcagataacgggggacggaaaaaccttctccgccttaatccggacgaaccggggcagccagttaatagttcatgccggcaataccatccccggcacgaatctgaaggtggacaaaataacctttgacgcggtcaccgtgagtacagcgggtaaaccgccccggatactggcttttgtggaggattaa

SEQ ID NO: 378373 - DNA, 1497 bp, Salmonella enterica
atgggtgaaaccgctgaacgttatctgtggcaggctcccgatgccatctatgtttcgacagaccatgcgtccctcgcggaagtacaaagcgcggtggcacgtttactgcgtataaccccgggactgcccattaaaacctgttcactgcagcaactgcgggattatcagaaagagcagcaacagagcgtggattttaccgctgccggcaataactctcaggagcagaatcgtgtgctgggatattaccgcgatgccctgtcacaacactcttctgatatccactttcgtatcggtgaaaacgggttaacccgcattctgtaccgtatccacggagaactcggggaaatcggccaccttgaaacacaggaaggcctcacactggcctccaccatcattcagtcgatgtgtgaccagtcagagccgagcttccatcctaaccggccccagagcgcacgtctgcgtaaggaatttctgcgtcaggtgggactgttcggggcaagatatgaacattaccccaccgagtttggtctgctggccgtcatgcgccttatccccgatgatggtgacaatccgccctcacttgaagcgctgggattactccctcagcagattgccctgctcgaacagatgctgatgacacctgaagggatgatgttaatttcggggcctaccggctcaggcaagtcgacgacattacgtaccctgtgccggatgtacatggaactcaccaacggcacccgtcatctgttaacgtttgaagatccggttgaaggcgggatacccggcgcggttcagtgcggaataaaagctgaccgcagcaatcctgatgcggtcagtctcgcctggatgagtgccctgacgagcggcatgcgactcgatccggacgccattcttgtcggtgagcagcgtgaccggaactcagcgatggccagtattatcgccgccctcaccggtcacatcgtcatgagtacggtacacacccctgacgctattcgcattatcgaccggctgattgaaacctttggtgtcagcgcttcactggtcattgacccccaggtcatgatgggactgatgtcccagcgactggttcaggcactctgccctcactgcaaactggattacgcagaccggcagaaatcccgttccctgccggaactgaccggactgcagaagaacctgctggcggagcataccgataccgcccgtatagcattccggcatcccgatggctgccctcactgctggaagggcgtggtcggacgccgtgcgattgctgaaattatccgtcccgatgcgatgttcatggatttgtaccagcgccacggcaagctgcagacccgcagttactgggtgcattacatgcagggcataacacgccgcgcccatttacagcactatctgaatgccggtcaggtcgatcccctcaatgcgcacttcacctgtccgctggatgaagacaagcgccttttattaccccgtgaggccgttcatgtttga

SEQ ID NO: 378374 - DNA, 1110 bp, Salmonella enterica
atgtttgattcgatgcctgccccgctcaggccgctgttgtcccctttccggcggggatgggagcgggctgaggcctggctggggcgaaagacctttaacgccggcgatcgcttaaagatatatgaggatttatcatttttactggataacaacgtaaaacttgaggatgccgtcagaggaatggcggaaaaccggagggaaggtacattacgtcccggtgccagcgtgtactgtctgcaggatgtcgcacaggcactgacccgtgggcaaccgctcgatcagggactcaggcggtggataccccgtaacgaagccgccattattcaggccggtgtacaggaaaaacgtctggcagatgcactcaggcgggctatttatctggtactggctgtccgtgatattcgctcaacgacacttgaacgtctcatttcgccgctgttgctgttcctgagcctgatagcgctggcttgcatgatgtcatggaatttcctcccgcaactggaaacgttaaagccccgcgaacagtggcagggaagtctggtatggatggccggtatttccgatttatttggtcagcatctggtgttgtgggggatcggaactctgtttgtggccgcctggacctggtggtccttcgcgaacctgacgggacccgcccgccgtatgatggatttatttccgccatggtcagtctaccgtgaaattcagggtgccacgtttctgctcaactttgccgcgctttcgcgggcacaggtcaaggaggaagacgcgttactccagctgagcctgcatggttctccctggctgcgacagcgcctgaataccgcccatcgcctgatgaaaagcggtaattctctgggacagtcgctgtatgacagcggttataaattcccctcccgggatgccatcaaccggatgagactactcacacagggggatggcggtgaagccatcatcgacagcttcgcccgtaaccagctcgaccggacgctggccggcatcagaagtcttgccggctggttaaacctgataatttacgccctgtcggggctgtatatgggattagttgctttctcaacccaaaacctcggcgctgtcaccggcgcataa

SEQ ID NO: 378375 - DNA, 597 bp, Salmonella enterica
atggaaaacattatgttatcccgacgcactgtgcctgttaaccgtggtgaagccaacctgctggcactggttatctcccttgccgtggtggcggtaatgatcatcggtgtcatcaagtttggctcgaatatctctgactccaacaacgtgcaggcagaatacagtaacggtaccagtcttatcaccaatgcccgcgcccgcctgaaaacagacggtatctacgattttaacggcacagccgatatgacaggtgcactgatccagtttggcggcgtgccgggcgggatgaagattgacggtaaaaagacctcgggaaccgccacgctgaaaaacctgtttggcggctcgattaccctcgcccccgcaaccagcaatggctcggcaaaatcagcctttacgctgacctacagcggtgttccctatgaagcctgtacacagctggctacccagatgagcggcgcaccaagtgtggtcaccactgccattaacggtacgtcaaacagcggtacagtatctgcggccaacgccggtaaacagtgtaccgccgataacggcagcacagggcagaacacgctggcgttcaccaccaacaactaa

SEQ ID NO: 378376 - DNA, 474 bp, Salmonella enterica
atggctgtcttacgcaacgcgttcctcctgatggcactgggcctgggactggtcactcaggcccgggcctggtgttttgcagaagcggggcaacgctaccacattgatccgctcctgctgcaggcgatagccatcagggaaagcagccttaatcccggggccatcggggttaaccgggataaaaaaggtaaagcaaccagccgcgattacggactgatgcaaatcaatgacacgaatgcagaccggcttatcaggatgggcgtcattcacaaccaccaggatttactgagcaatgcctgcctgaatgttcaggcgggggcctgggtactggcccggcattttcaggtctgcggtatcacatgggactgtcttggatcttacaacgccggcttcagggataaaaatgcccccatacgtcagcgctatgcccgggaggtttacaccatttaccagcggttacggggtgtcggatga

SEQ ID NO: 378377 - DNA, 612 bp, Salmonella enterica
atgaacctgtggacggggggaataacattcccgttgttatgcctgtgcctctttttacagaaacgtcaggtcaacacctttctgaaagagcatgatgcgccgccattaccggaccggttatccgactgcgtgtctctggtctttctcccgctcgggatgtttcttgtaagccgggaaaatttaccggcgctgtttatgttcagcgccctgctcccgttgctgtggctcgactgttaccggcactggctgccgctgcgttttaccaacatcttctggtgtaccggcctgttaacacaactgctggcggaaaaaccgctgctgtcagtgttacccgcgctcgtcaacagcatactgatgttcggtctgatgtggagcatgtggtgggggctgaaacgccaccaccaacgcgaagttctgggtctgggggatgttcatcttatcgccggcctgtttgcctggctgacgccagccggagccctgtatacctgcggtctctcatttttgctgatgttcgtggccatcgtcatcagcagaaaaccccagccgctggccccctttatgtgcctgtcattactggcgggtctctttactgtggagttcacacagctatga

SEQ ID NO: 378378 - DNA, 1242 bp, Salmonella enterica
atgaaaaaagtcaaccggggtaacgcacaactgatatctctggtactggttctgggtctcgccatgctggcggccccccggggcatagaaatgatcgcgcagcaacagtcacagcgcatatgggaggttacggcaaatcagttcaatgccgttcaactggccgcccgccagtatatcagtgaccatatcgatacgctggcaacacaggtgaaacccggccacccggtgtatgtatcagtgaataccctcaagagtaccggtcaccttcccgccggcttcggtgcaaacgatcataaccagaactaccttattgctgtggtcagcaatccgaaaaccacgggaaagcttctggcttttgtcatgacgacaggtggtcagccgtgggattttggcgcactacgttatatctccagcaatatttccgggatgggaggctacgtctggcctgacaatcaggctaccggcgctggcggcggatggaagatgaagctgacagactatgggctgagcagcagacagggctcactggtgacgtttataccgtcagaccagctcggtacttccggtcagggaaatgaccgtctgtatcgttatgccgttaacggtcatcccgatttcaaccgtatgcataccgctatagatatgaacgggaataatctcaacagtgccggagatgtaaacggccagcgtgccaccatgaacggtgatatcaaaagcacaaacggctggatagtgacgcagggcagcaaggggtggctgaatgaatcccatggtggcggattttacatgtcggataacgactatatccgcagcgtcaacaacaagggcatttacaccggcgggcagttaaaaggcggctcagtccggtctgacggtgacctgtctgccgggggtattttaaagctcgaccaggtgaacgttgcaggcacctggtgtccgcagaagggggcgataagctacgacagctctggcgggatactttcgtgccaatccggtcgctggaaaaaccagggaaaaatgacctggaaagtgggtggtactttcactgtctggcccgggcagactcaggatctggggcgttttaaattgtgcatcaatacataccgcatagacggtcgagaaatggcgttgacacaactcattcccacggactcccctgatgccgacgggaacacaaactggcgtgcttataacggtactcaatactatgcctactatatggggattcactgtttcatctag

SEQ ID NO: 378379 - DNA, 351 bp, Salmonella enterica
atgagcaagttaaccagagaattagctgcacagtcgatgctcagcagcattgaaaattatgtatttgagattatcgattctgttgagaatgatgttggtgtgctgaccgcagaagaccattacaccctaaatgcctgggtcagaaatgccgtggaaaaagcagcaactgaactggaggccgatgaacagtgtcgtgtttacgagcttgagcagcgtataactgagatggagattgaattatcagtgaaagacgccgcgattatcgaactcagacaacagtattcccggttgcaggaaactcgttacgaaaccagttgcagaacacctgcgcctgcgcaagataacagttga

SEQ ID NO: 378380 - DNA, 264 bp, Salmonella enterica
atgaaatttttttcacaagaccctatatccagattcgattttggcgttgccattgttgtattacttctgataattgtgttgatttatgtttaccagttctggaaaccatcccggtgggaaagcgtatgtcagcatcaaaattcagggaagctggattcgatgtctgaacagaagataaataccctttgcaaagcacacagaaacaaggaaacagaatgcgtagataagaagtgcaggcagccagtagagtcggaaccacattaa

SEQ ID NO: 378381 - DNA, 753 bp, Salmonella enterica
atggacagttttattgatgatgtactgattacatccttgctttttgtcgaatttggcagagtagtatttactggcttgagtgtagcgctacttgctgtcaatttactgatgagggctttgaacagaaaaaatcatcctccggctgcactttatcacttcaccacctatggcaggatgatgtccatactgggaacaggctgtgtccggggggggaatcatggcattgtattcacaactgccaataaaaaatatcgtaacagaggctctgtaagatacagaaaccatactcaaatgcacgaggacgataatggagccagaataattttcaaagacaaatcagtagagctctttcagtcatgttcttcccgtcttctttccgtgttcaccgggatttcgttatacgcggagttaaatgatgaattcacttcccgacgaaagggaaacataaaacttctgaaatacagacggcgaggaacaacgcttgtagttacggatgctgcgattattgctgcccctacaatggaaaggttatatatgagcatctgcggttttttgttatctgtgccgaaaactttagccactgttttgtatatattcactatactcttctgggctgactattttttttcgttaatgtggttccgactctactggctgcctgcacttcttatctacgcattctgtttccttgtttctgtgtgctttgcaaagggtatttatcttctgttcagacatcgaatccagcttccctga

SEQ ID NO: 378382 - DNA, 186 bp, Salmonella enterica
atgaacacacaagcgtttttctgccagagactgactctggtgattgccggaggtacgcagcagacctcaacgtcaaccgcttgcggtagcgcgtttgcacaaagtcagcggccttccgtcttctccggtatctaccagcgttctccggaggttacccgcagcgggcgttacgttaatttcaggtga

SEQ ID NO: 378383 - DNA, 456 bp, Salmonella enterica
atgaaacgacccatcctgaccgggatactggtgccattcctgctgtctggctgccagcaagtccctacatcaacctcaacatcatccacgctggcatcaacgccggcacacgcacaaatcgcgtttaaacaggaacaacagcgactcgcactgaccctgacagaggatggctggctacttccgggccggatcaccgcgaactcacagcgcgtcaccgtggactgggatggcgacgccatcgagctgctgtccgcactcgcccatcagcggggactcattctgcgttattccggtgtccggctgccgttacccgtcactgttcatgaacgtgatatcacgtttgaaaccctgctgcgccttatccgcacacagattagctggcgtgcaacggtaacacagcaatccggcgcaattgaagtcggctttatgcctccacttaaaggtaaaatgtcatga

SEQ ID NO: 378384 - DNA, 816 bp, Salmonella enterica
atgataacgcgcaattttttctctgcgggcctcatcatctttgccctttgttgtccgacgtcgggcgtatttgcggcaacctccgcagtcagtacgatgcccccctccatgtcggcctatctcagccctgaagcagacgatcataacggtgttaacgataccgtatatcagatgttaaccgaggccgggaaaaccgaagggtttcgcgggggaaaagcgcagcgtgcatgggaacttcgccagtctctggaacagcgcgcccgtcagctcgacagcacgtaccttttctcaccgttaataaatcgccagggctggctcccgccagtgattgccgaggcaacatcgctggcgactgtcaccgataagcagatgcgcacggcaaaccacgtctacaacatcctggtgccggagcgttttgtcagtaacccacctggctggcgccagtatctgttcgccgggttatccatcaaatcagcgcccacagatacggtcattccgcgtaaccggtcagaacgcacggtctggcagaacgctatccgcaatggctggcaggaaggccgtcagagcgccgacgacacgctggcggctaatttcaaccgtctcacccgggattacaccggcatgatgcgctattcgctgttagtgaaacaaaaaataatcaccccgcccgtcattaccgaacagcagcaaaccgtcagcggtaatcgcgaagagctgatgctcggcgataaggtccgggatctcagacaacgcgccggcttcgaactggataaaaaacagtggcagccgctgattcagacaagggcatctcaatga

SEQ ID NO: 378385 - DNA, 1170 bp, Salmonella enterica
atgacagaactggataagtttgatttctccgcaggtctgacgcccgatgtgttccgcgccttctttgtccactgttaccggcatggtgtgtcggacatccatttacagtccagtggcccactggttcttggccatcatggacgaaaggtccgggcctcagcgttcacgctcgaccactcgacactcctgctgctcatcgactctctcttcagccccctcgtcaaagcgcggattcaggggggtaaaggcgatgatgccgcactgcagctggaaggtgacagtcagcagcgctacggacttgaaaggggggaacgtattcgttttcgcgccaacttcactcaggccaccatccggggcatcaatactgccatcgcggtgaccctgcgtgtgattaacaaccacatccctgcgctgaacagcctgggactccccgacccgttgtaccagacgctggcacatctcccggttgaaggtatcggtctggttgtcggccctacgggttccggaaaaaccacgctgctgtcatcggtataccagcaccacggtgaaacggaccccaactgcaaggtcaccacctatgaagatcctgtcgagacactgctcggtggtccggactggctgctgcagccccagcagtgtgaaatcggacgcgacgtcccgagctatgccgaaggcctgcgcctgtccatgcgccaggcccccaccattatcggcataggcgaagttcgcgacggggaaacaacggaaggcatggtcagcagcgcgctctccggccacctctgcctggggaccgaacacgcattttccgcaggacacgcctttgcgcgcagcattcgtatgctgccgcctgaaaaccgcgagccactggcccatgacatgctgaaactgatgcgtttcatcgtgatgcagcgtctggtccccaccaccgatggcaggcggcgcgccatacaggagtatgtgctgtttgatgatgaattgcgggagtccttacgccagcatgagtacacgcagtgggcctcgctgctcacgcgtgacctggcctgccgtgaagcccgtatcagtgaccatgtctggaaaatgtaccgtgaagagtcagtgaccgaagatattgcgcgcagctatatcggcaccagtgaattcatcaaaaggagtgagcgttatgtccggtga

SEQ ID NO: 378386 - DNA, 267 bp, Salmonella enterica
atgtccggtgattatcaccctggccgggatgcctccccgccggttcgcattgtgggtgttccggcgctggcctggctagtttttgcgctctggtttaagtggccatccgtgaagatgtttctgttctgtaccggactcatcatcttctatgccgttctggcccactttggtttcacagtgacagtactcagccagcgtatcttccacctcctccggggtaagcgccttaccggtcgcccctggtggtaccgaaaattctttgagtaa

SEQ ID NO: 378387 - DNA, 3438 bp, Salmonella enterica
atggagtcgacgcaaacccgcacctatctggcggtaccccacgacgaaaaagatgaagcccgtaaggccgcaggaaaacttgaaaataacaaacctgcactgcgttttgatgacgaacgcagggtctggtatgcccttcccggtgccgacatggaagcgctcaaacgctggaaacctgatccgttactgaccggcgtatcggcaggagatgcactgacacagtttgctgacttcctgcgggctaacggcgccgatctgactgaaaaggtcgtcatggacggcacccggcaacgtattcgtatgaaggatgacaagcccggtaaaaaatcctgtacctatgtcgggcacctcgatggcctgcccaatggctggttcaacgatttccgggacggcgggaaggatgacctgaatacctggtatttcagcggtgaagaaggtgaccctgtcgcggcactgcatatgaaagccgtgacggcacagggccagtgggaccgggcggaagctaaacgtattctgcatgacaagaaagcaggcaatgtccgctacgtccacggcaaatttggccaggccgggcatcagcatccctacctggtcaaaaaaggcgtgcaggcggccagaggtgtacacattgacgacaagcagaggttactcatccccctgcagaacgtggagggcgtcattcgctcgatgcagaccatcgaccccgagggcaacaagcgtctgaccaaagacgcggaaaaaagcggcaattttttcgttgttggcggcacgctgaaaaacggcaggcctatcgtctgtgccgaaggttacgccacagccgccagtggagcgatggcgctacgcatgccggtcgtcatggccattgactccggcaacctggttaaagtggcggagaacctccataaaaaataccccgacagcccgatgctgttcctgggtgacgatgacccgcccaaaccccacagaccaggtaacccgggtaaagaagcggcggagaaagcggcccgattaacagggggtattgccgtactgccggcgctcacaccggaagaaaaagcacagggaatgacagattttaacgacctgcatcagtcccgcggcctggcagcactgaccgaagaactggcccccctgcgtcagacactgttacccgagcccacacctgacgcctcccccgaattacaaccgactgagactgttatcatgaacgaaccggataatgtgaacaatgaacctgctgcgcgggatgatgaaataagccagatggcagtgtatgaggactggatggcatccggacaggatataacacctgagcccgtccagcctgaaccggtccctgctgcccctgtcgcacctgaaattgcagcacctgagaccgtcgcaccgcaaacgctgtctccggacagcgctgccgaaaccagtgcaaaggctcccgtgaaaaaagcccgcagggctaagaaagccgcaccggccgatgcaaaagagaaaggcagcacaaaaccggcagcggcccccaaaaagccccgccagaaaaaagccacgacggaagataagcaggaaaaaccacaacaggccgcgcctgctgaggcagaaagccagaacaactccggggcagacccgacgccgtcactgtcatcactgctgaaacaggaatccccggctgtatcaacgccccccgccccggaagacgaggaggttcagccggttataccgcccgtgaacgaggccgtaccgccgttacgcaaagacgccccctccgggacagacgagaatggcacacctgacagcgatgccccggtcagtgacgccatgccagagccggatggtatccggttcgaacggagcctccaggcccgcgaacgcattgatttagtcgccctggaaggggcattactgcacaaacccggcaatgaacgcggtacccagcaatatttgctggacggtgaacgtgcctttacacggtacatgcagcaggggcgcatcattatggccacaccacaggccagccagaacgaccgtatgatcctcggtgcccttctggtggccaaacaggacatggttctgcaggggaacatcgagctgaccggcagtccggcgtttaaacagcgcgccatcaacctgatagcggagtacgacctgccacttaaactcaccagtccggagcagattaaaatgctcgaagaggcccgggagaaattacggtctgagccggcgcttccggatgagccgacgcccctgggcagcgaggcctctgaaattctggtacatccggcggcaacccgcgcctcaccgcagcccggcgaagtgcccgcttcagcggccccggcgtcggctgtcacagcccgtaacacagccaccgcgccgctgccgcctgatattctgccgcaaaaggcccccgcgcccgttcccatgaatgccagtcatgatgaggcatcggctggactgacggggacgctgctggaacatggtgctgcaccgtataactttcagaaggatgagagccacagctattacgcccggctgcggactgccgaaggagagcgtgtggtctgggggatagctctgcgcgccgccatttctgacgccgggctgcagaacaacgatctggtcacgctgcagatgacggggaaagagaccgtcgccgtggatgttaaacagaaaggtccggacggaaaaccgatggttgatgagaaaggccgccctgtttaccgcaaagaagagcgggagcggaataaatggaccgcccgacaggccattgacccaggcgtcgtcaatgccgacacccggacgatgaccccgccaggcgagttactggcgtattccctgaaggactggcacaacctgcaggccggggtggaagaactggccaccaaagccggggtgtcgttgccggactggccgggactgcccgatgcattgtggatggagctggcggggaaaggcgtccccacgcccgacagaaagccggacaaccccatgatcccgtccccgtcccgcgatgcaggaaaggcgctgtttcaggcgatggatgccgaggagcggctcaaactgttactggtcaaagcccacggcgactacgtccagggcgttgtgcttcatgaggatgtttacaagccggtgctcgggaaactgtgtaaaaacgcccgtggtgcgccgcatatgacgctcaacgaaatcacccctgacggactgaaacccctgggctacggaaacccaatcaacaacgacacaggcagctttaacgactatgtgttccgcctgaataatgaaccccggcgtttgtatgctcagggccttgagccggaaaagcgcccggcggcactacagcagcagctgggatttgacagtgcaccggtggcacctgaccagctggtagtccgccgtgaacaggaacccacccaccggcatacgcccaccatgccacgccccggccgttaa

SEQ ID NO: 378388 - DNA, 471 bp, Salmonella enterica
atgaagaagttatcactcacctgtctgttgctgtacgccacgctgtcaggtcctgcagcgaatgccgccagctgtgccgccgcctcggcggcgcttgctggcgcgcaggccggttatgagcaaaacaggaaagccgcagagtcctggtcgcaacgggaaaagcaggccagcaacggatttcagcaatgcctcggtgatatcagtaccagcatcacggtgccgacatttccggacttcagccagatatttgaccagattaaggacaaaatctgttctgctgcccgggataaagtctcatcactgttgcccggcaatatcgacccgtggggagatttgggcggcgattacattccgacgaccgacattcctgtcggcacccggagtgtaaaaaacgcagtcccccgacacacgtcgccggcacctgcctccggcacaccgtcagccagctccgcctaccccttctcactgtaa

SEQ ID NO: 378389 - DNA, 678 bp, Salmonella enterica
atgaagaagaagactgtctcccccccggcgacggataaaaacccatacgaaaatgctttcgcgcagcatcaacatgcccaactgaatgtgagctttacgcgtaaaagcttacaggccaacgtatggcagtccgtcgcgatcgtcattctgctgtgcagtaccattctgttcgcctggaaagcagccaacccgcccctgagtgtcatcgccagtgacaacggccgcatcatcccgctgccaaccatcaacgatcccgtatacagcgacgcggacatcatcgactacggtgccagacatatccgggaggacttcacgctggatttcgttcactaccgtgagcagatcaatgcccgccgggatagtttttccactgaaggttttaccttctattacaactcgctggttagttcaaacatactgtccaatgttcgggataagaaaatgaacctgtcggtactgacctccacaggcgtggttaacagcaagggggttctcgacaacggcgcctatgcctggcgactgcaataccctattacgctacgactcgacggacagacctcgtcccttcctccgcaaaacttcacgctagtccagattgtcactcgtgccgatccccgactcaaaaaagacggtctggaagtcattcagcagatcacccgggaggctgcagcacaatga

SEQ ID NO: 378390 - DNA, 1023 bp, Salmonella enterica
atgaacaagacactgatagttatcgccagtctggttagcagtatatccgtaatggcggcggaaacaccgcaggcacagtggcaaccggcgcagacattatccgctaaccccacgacagcgctgccacctgcgccagcccagccaccccaggcggcagcgggccagcccgttcaggctgtgacgccggcaccgcaaagtgccggaaccgtttctgcaccgccggtcccgatgccacctgatgcggcgctgcagtacgccgaaaatgtggttgcgccgttatctccggacgccattaaggaattgcgcgccggactcgatggcgtccagcgaagtaccggaaccgccccggccacggcggtcccccggatacgctcgctgaccgtaaagcttgaacccgggtcatccctgcccatgatacaggtcctgcccaattaccccggcacggtgaattttaccgaccagaccggcgcgccgtggccgattgccgctccgcccgtgaacggcaacccgggaggattccaggtgacttatctgcctgacacgccgtcgatggccattcaggcacgtcgggcttatgacaccggcagcgtgacggtttatctcaaagggcttgcggtgccggtcgtcatcagtatgaccagcggggaacccggtaacccggacacctcacaacccacagacagccgggtcgatttacgtatcccgcagcggggtcccgcagcacgcgttgccgcagctccccggcagaaagtcgggctgtatgacaacaccctgcaggcctttctggatggtgttcccccgaaagaagcacagcgtatcaaaacgcaggggggcgtgccggatgttcaggcctggcagctgggcgatgatgtgtatctgcgctcacgcgccgatttacgcgatgcctttgacagcacgctgtcctccgctgacggcacccatgtctggaaaatgccggtgacgccgtatgtcaccttctcggtgcagggacataacgtcccactgactctggagttgcaataa

SEQ ID NO: 378391 - DNA, 1200 bp, Salmonella enterica
atgtcgatagaacaggatgcggccagtgacggcaaaaaaacgatggcactggttgccgtcgcagccatcatcgttgtgggcgccgggtatctgggctggggatggatgcagcagtcagccgtccccgagtcgcagtacaacctcagtcgcgtggccaacaatgcgccgctctctgcacaggagagccggcagtaccgtgaattactgaagctgtccaaccagcagggcgcgcaggcggccgagagagagggtaacagttttgtggcctccctcagtgaaagccagcagacagacgacgcgccggtagttccccgcgtggcacctgtcccggtgacactgaatacgcaaatgggctcatcacagtacgaaacaggtcagctgggcggtctgaacgaagagcagaagcagcagatcacaaatctgctcacgcaactgaatgcccgctggcagaccagtgatatgcagctcgccgccgcatttggcagtgaggggcaggacgggcagtcgcccttcagtcagtgggcgcagagtgttccgggcctggtctctccccctccgcagccggtaacacagggcgcggcaggcaccgcggcaataacagcgacgtcccgtatcaatataccgggtttatcgcgttatcccggcacgattgataccgccattgactccgataaccctgagtcaaaagtgatagctgtcatccctgcaggcaaactgcagggcgcacagctggcggcacccaatgtccagctggctggcgacggggtgattgtgaatttcaaaaccctcgcgttcaacggcatgacctgcaccatcgatgcgtatgcacaggatgatgaaactcagcgttcgtccatcgccagtgatgttaatcaccggtacgtcacccgcatcatattacccgcgctcgccaatggcttaggcaaagtcggccaactgtacgaggacagcaatacgcaaatcctgacgaccaacagcgggaccgtcacgggccggacaggtaccccggacagtaaagccgttgccggcgtcatcgcaggcggtatcgggcagcaaactgcccaggtaatgacgcaggatgcgtcccggctgccggtgacacaggtcaacgtggaccgacgtcaggttgtctccattctgtttatgaaacccgtcactgacaaagactgcacccccatgcccgcaggagaaaactcgtaa

SEQ ID NO: 378392 - DNA, 750 bp, Salmonella enterica
atgaaatcacacttcgatcctcagataaccgccccactcccgctcgaggatgacgaatcagaggctgaagcaacggtaacgtctgcagataaacccgtgaaacgtcctctgtgggatcaacctaaaattcaaatcggcgccctagcgatttttgcgattgtggggttaacgtggaaaatgagcggcagcagcaccccaccctcatcacagccacaatttaccgtcacggagccggtgaactctccggcccccgttacggtgaattcgtcaccccgtcccgaaccgtctcccgccccgcagcaggtcgcgccagtcacagaggaactgccgccagcatccccgtcctctgagactgactctctggccggtgaagtctcacgggcactgaattcgcagcaggtttacagcgaaaaaacccgggagggattagcagctctggcccgtcgcgtgggcaatcttgagcaacagatcacggagctgaaaaaacagcgtcaggaaacgcctgtcgcggtcagacagcccgcggtggccagcgcagcggctaagccaaaaacatccgggagtgcgtccactaagggctggtcaggtcaccgggcaacgattaacagcctctaccccggccttgcctgggtaacctggcagggcagcagttgggcattgcgtccgggagaccggttcgcgggtgccacggtactgcgtatcgatgaacgtaaacgggaagtggtgacgtcatcgggggtcatccggtaa

SEQ ID NO: 378393 - DNA, 531 bp, Salmonella enterica
atggactttgtccagatgctggcaaatgcggccaataatttgtcagccatctccacacaactggttctggccatcgccggcgtgggggggatagccctcattatcctgtatctgtccgggcaggctggccggacgcggcggggtcagcagaccgactctgccggtaccttcctcgccgttctgctgctgggttgttgcattatcagcatccagagcgtcgtgaatgccggttcaaaccagttcgccctcggggcggtcacctatgatgccatctcttatgtacccgaagcccgatatggtccggccgccgtggcggtgaatgccggtctgacggttctccagacggtcggatgggtctatgtcctcaacggcctgttacgtctgcgccggtcacagaaggatggacacaccgggttaacccgcggggatgacatttcttcaggcattaaacgttttatctgcggtgttctgcttatctgcaatcccgcagtgcttaacgcccttcagaacacaatcaacattcactggtaa

SEQ ID NO: 378394 - DNA, 399 bp, Salmonella enterica
atggaaatcctgaaaaatatgatgctgcggaccgcagtagaattttccctgcgcgcctggcacctgcgccgccgcgcatcgatgtggctgagtggcctgctgttgagtgcgctggccagtcagccggcacacgcagccggtgatgacctcggcgctatggtaaaaagcgggcttggatttttcaccgatatcaagcagcctctccttgatgccgcgccggtgattggcctcatctttatcattctggccttactgatgatgcgctggaaaaagaacaaccctaatatcaaaccgtgggagattgccgtgatgtttgggattggattgtttttactggcactgagtcagattgccagccgcggtcagaaacagctgggactgaacccggtaggattctga

SEQ ID NO: 378395 - DNA, 411 bp, Salmonella enterica
gtggataaagtaacaggaaacaccacctttcaatttacactcatctttattgccggaataattttcggttttcaggcgggagaacaatccaaattttacaatctgtcgaaagagccggaagcagcatttgtagaattgatatataagaaatgcagggggcatgatattttcgtgagagacgttcgcggtccgtggtcgacggaacaaatggcatgctggagtgaagaacttgctcatgttcgtgataacacattcaaaacagaaatgtattttaaaatcagtcgatacatccatgaatgcaaccttaaaaaagaagaccaaaagaaatgtcaggccgacatttcatccaaatatcaagagaggctggaaaagtatcacgaactgaaaatcctgatggctgagtcatcataa

SEQ ID NO: 378396 - DNA, 267 bp, Salmonella enterica
atgaaaacagaaagtatcattctaaaaaatgaaatgcttagtgaatacatctatactttaaaacttatctggttattaactgaaagtaactcattgagtaatcagataaaagaaggacgtacaaataaacagttaattgatgaacttaaagaagccgtaagaaagacaaagctatcagaacatttatcagacactggatactatgaacttgccgaatccatctttttcataattgagcaaagagtcaatgaatgcagcaagttgtaa

SEQ ID NO: 378397 - DNA, 609 bp, Salmonella enterica
atgcctgaattagaccttaaacataccattgccggtgccccccctgaaacagacgccacactgcaaaatgcccgtgctcagtcaatgggctgcgaatgcgaatactgtggctatccttcccctcataatacggcgatacaccgggatgggaatccactcaatcgcgatgacagtaacctgacggtcgttgaccccttctgtcgcgcatggcgggaacttaacacactcaatgccgataatgcggtgatgaccatcctccccggtatttcatcggaagatatcagtcatttacaacgcaccatccacatcgctctccatagtgatgatccgtccacgcgggaggatgcccgccagttactggactggctcaccgaacataaatcactcgcagagaagcgtttcgacacgtcgcatccgggcgcgtttgcgcaggcattacaccggaccgccccgtcgcaacgtcatgagacccgggttgcctggcgtcatgtcgcgccggtactgaatccgtcccgactgcctgaccccactgagttaacgtcactggaatccacaccggcctggtggccaatgatgtaccaacattaccgcacgcagggtggcgcatga

SEQ ID NO: 378398 - DNA, 3063 bp, Salmonella enterica
atgatcatagataaaattgaagacgcatttgcctggctttcacgctacacgctgggcgagaacttcgcagactactgtgaccttcgcacagtaattggcttaaccgccgatgacaaaatccgccatccctcaatggatgccccgtatattcaggtcaccaaaaataacgactatgtcagctgcctggaaataaagggggcattccgtgagttcagttttgacgaggttgcggaaggactgcccccgaaatcaggcacctttcagttcttctacacgaatctggccgacaagctcaccggcgattttaaagatctgggccataaactcagtattgtctttgagcatgaccccgatcgcggccgggaggagatgaccgaactgatgaagccgctgcgtcgtggatggacgcgccttcatctggatatggatgatctggcgctggagcgtatcgaaaaaatgacgccgtggctggcgagagagcgtgtttttctcgttatctacacggctattggcgccctgcccgctgatgaacttaaagacgagatccgccgccagaatgccgtgggtgaattaccggagtcccgcttctcacaaaacccgctttatgccgaatttgaaggcctgaaactccgccatgacgcgtttatggataagctcatctttgatatgaacgccggaaacaacggtgtctctgttcgtctgatggatgcgcatgaaacgggccgcgtgatccgcgacgagattgaaaaaagcagcacatcaccgtactggcaaccgcttcttcccggtgaccgggtcatgcctcatggccgcttaagaggtgacgggaaagatatcagcgcctgcctagcaccccatctcaactatcagtactgcgacacgaaaatcgacaccgacggaccgtttgtgaatgtggatgactttttccacgggcagctggccatgacactgttcccccagcggccacaaaccttcccggagttgtttgccaacgttccccggcaggttccgtggcgtgtacgcttcgacctgatacccggtggagcttcgcaactggggtacaaaaatttcctgctgacgtttctggccatcattccggccctgcgccagcagtatgaatccgtgcagtggctgctccatcgtgacaagaaagatccggttgtcgtcctgagcatcacagccagcacctggcatcgcgataagaagaccatgcaacggaatcttacgttactgaaaaaatcccttcagggctgggggatatgtaatgtcaccggcacattcggtgatccagtccgggcatgggtatccacgctcccggccgcctccagctacagcggcccgaacctcatgttctcgcccttgtccgatgccctgcgcctgcttcccctgcagcagccgtgcagtccctggtcggaagggaatgtgatttacctgacgcccgggcgaaaaccctttgtcatgaaactggccagccccctgcaggaaaaacacacggaactcgttatggggccgcccggctcaggtaaatcggtcctctgtaacagcagtcatctttcgttcctggccaacagcaataccgatctgccctttatgctgctcatcgataaagggtataccgcgcagggattccacgacatcgtctacgacgccctgccggacgatgcgaagcacaaaattgccagtatcgtactaaaaaatacggcagagcactgtcgtaacccgatggatattcagctgggcctgaaagccccgctgagcaccgagcgtgagtatattctgagtctgctcaaaagcttgtgtgcagaccccgcgaccgggatgcctccggacccgaccagctgtgcagatatcctgggcaggatcgtcgacagtgcgttcaaagaaaaaggcatgataaacccgtcacgctatggtgcagggatcgttcctgaagtggatcgcgccctggaggaaagcggcatccggcatggtcatcctccggaatggtgggaatcggccacatggtacgaagttcgcgacatgctctttgacaaggggtatgtctccgaagccacacgtgcccaggctcaggcagtaccgctgcttaacgacctgcagaatgagctaaacagtaaagagatggccgacgcatttaagggggtgacgcgcccggggacacaggaatctttactgcagtatgtttcccgttgtctggccaaagcgctgaccgattatcccgtactgtcaggcagaacacgcctcgtgttcagtccggaaaccaggatcgtgattgtcgatgtcaacaacgtcgccggcaagccgactccggaaggtaaactgaagaccggtatcatgtatcagtttgcgcgccagattggcggcgggaatgacttctacctcccgcagattcaggatgaactctacgccagcctggacccacgttacatccctctgcacaggaagcgtatagagcaactggatcaggaaaccaaactgatctttatcgatgagatgcacaatatcaaaggggtgccggtgctgtgggatgcactgcagactgaagaccgtgagcagcgtaaattcgggatacgcaccgtttttgcctcccagtacccggacgactatccgcctgacctgctggaatccgctaactccatctacctgatgcgcgtccgtgagaaggatttcgggctgctcagtaaatcctgtcagatcccggagataaccctccggcgtctgttgatgacaccgcctggtgcggctcccgatggttcaggcaccaccttcctgggcatattcaagacctcacgcggtaacgtggcacagttactgaagcatgccgtgggaccacgggaactgtgggcgctgaactccacgcccgaaaaccgggctctgagaaagcaactcactgccagcctgggctcacgcactgcccgcgaactgttgtcgtcaaaatttcctcacggcagcgccctggcacaaatcaactacatgaaagacaagacgaatggcgatgacgggaccagcacagtaaaccgtcttgccgatcgactcctcaacgaatacggctacctgcaaggctaa

SEQ ID NO: 378399 - DNA, 1221 bp, Salmonella enterica
atggacaaacaccttcgccggcattcccggcccgctgtctttacgctatccctgatttcattccttattgcctcaccggcacaggccatgacggtcaacgtcaacagcagtgtgcccgtgacgcgggatgtgatgcctcagcttcgcaccgccaatggcacattaaccgaaatagcaaacacccagcagcaggtgggtgcggcaatcaatgccagcgccaacaaaatttcatcctcaattgagcaggcagagcagtccaggtccacacaggaaagctttgcgcgccagtctgaacggctggaacagtcgcgccgcagttttgccgtacctgaaaccatctgcacggaatcaacgtcaggctctgccgcccgggtcagcagtcaggcccgcgcgacgcagagcagctactccagaggtggtggagttagtaacaaaacgattaagagtgcgctgaccgacgccaccccggcgccggagcaggttcagtaccagagtgccgccatccacggtcagtggtgtgatgaaactgattacgctgcgtatggcggtaccgacctctgcccgtctgtatcgcaatatccgggcggagataaacaactggcctccctgctggacggggccggtaagccaggtaaaacccccgacttaacgttcacgcagaagcagattgatgccgccgtcgcctacaccctcaataccactgccgccgcagcaggtcgccagctggggaaaggcgaagtaaaaaccgcctcgggcaaacagtatgccggtcttatgacgcagtacgagggcatcatggatgcggcccgggagccgcagatggccatgattgcggcaagtacccccaataaagccacaaaggacgccctgaacgacgcgctcaaagtggcctcggcacaaagttactttgacgacaccgcatcagagcaggcccgatcatcgggcgagatgtcacagcgggagtttgagtcgtttgaagtgggcagacgttatgccaataccgcctacttatctgacctgcagcagatggagggtgacaatctcatccgggagcagatccgcgtgcagaatctggggaactggctggcactggcctcgaagcgtgaactggaaaagagcaacatcctcaccggacaggtacttgctctgttggccacagaacaataccggccgcagctggccgccaaaatggagcaggttaaagcaggagtcgcgagatga

SEQ ID NO: 378400 - DNA, 519 bp, Salmonella enterica
atgaaaatgaaaaccggcctttactggctggccaatatcttcctccctctttctgaagcacgctataccaaaaacaaaatcatcccgtcctttgcgaaacaactgcagcgcatgcgtgtggccaaaaagctccttgcccgacgtcggcgtcaacccggattaacctgggcggaggcggtggcggcaagtggcatggacacggcgggcatcgagcgccggcagttgcggcgcaaaaagcagtatctggcgatggctgccgtccctgttcttatggctgtcggcctgtttcttgccgtgctggccagtgggatctatgtcgcgcctttgctgatccgcctgggcgtaatgacagttgtcctagtgatgctggggagtatcccgctgctgcaggcagtggtctgcacctggcggttgtggcagttacgcgaacgccgggtcagcgtggaggaaaaaggcacgtttactgacttccggcgtgaaaccgcgtggataagcctgaccctgaatccctggcgttaa

SEQ ID NO: 378401 - DNA, 2133 bp, Salmonella enterica
atgaaatggatacgaaccttatatgccagtgttctggttaatttgctgtggtcgtcatctgccctcgctgatacagcggtgagttttgacagcattgaagcggcagctaaacgctcgaccgacctgtcacgtcagctactggtgatgatattcggcgacgttgtcactaatccgctgtccaccaatgcaacgatggttggccagttgttcttcatctttaacgggattgtgttcgtcctcgcagtcatctggtttctgctgataagcctcaagcacatcaccaaagcgggccacacagggaaagtgtttggcagtggtgccacgccaatggcggtggtcaccactgtcgccggctttttatttctggtcccgaccgtctccggatggtccctcgcccagttggtattcctgtgggcagtgtccgtgatggggattggcagcgccaacctgatgaccgacaaaatcgcagatctgatgaaaagtggctattcactggtgatgcagccggtggcaccgcagaccgtcagttcagcgcgcgccatttatgaaatgaacctgtgcatgtacgcgacgaacgcggaactcagcggcatgtacagccagtatggcaaaagcgacaccccactgatggccatcaaaaccacaacagagggttttgaaatcaccaacggcagtgccagctgcggttcggcgcgcctgccggcatcaagtaaaaacagcctgaccggctggctgttcgcgccggatgtaaacacggatgccattgagtcggctcagcgtaacgccatgaatcagatgcagaacacgctgaaccagaatgcctcgtcatttgtcaccgccctgctgaacaagcagaagaacggcgttggcacccttccggatgcagaaacggctattcaacaggccgcccggacctatgaggactcgatcaatgcagtcgtcaacgcacaggagaacggcgatgagctggccaccgcaatgacaacagaactaaaaagaagtggctggctctctctgggggcgtggtatcagaccttcgcaaccgccaaccagaaagtcagtgatgcagtgacattaagacccgttatcagcggtcaatctgctcttggggatattggcgttagcgggatattaagtgatgtgatgactgcgtatcgctcacaactacaaaactcaacatataccccacctttagggactcaaacagcaaaggactctcaggctacaagcgcagaagaccctatttcatatttaatatccattacacacaatcccatgctgagtatcaccaacactatcgcaacagcaaatattggttctgatcaggtaaacagcaatcaaatgaatcctttgttaaagatgaaaacagttggtgacataacactggtggcaacagaagtaatatataccgcattctcagcggcaaaaattgtgagtgatggcatatctaataatttcgttttgaatgttttatcgttgggattagttaaggtaccttctgcaattgtatcagcaatcacaccactcatcctatttttgtgcctcgtacttcttggtgttgcatttagtcttgcgatttatttgcccatgattccattcatattttggatagcggcagctgcgaactggattgtcagtgttttagttggtgcaactggtggttcactatgggctgccactcatatcggggcggaggaggacaaaggtagtcgttctgcttatgggtatatatttttaattgatgctcaaatcagaccgatgttgatggttttgggatttgcttttgccagccttgtaattgttgcaataggtactttgcttaatatgttatttgcacctgtgttattaaatgttcaatccagttcatttaccggattagcatcaatggctggtttactgatggtatatgctcgcatctgtaccacatccgttacaagagtattcgctttgcaggttaccatgcctgactatgtcatatcctggcttgggggccgtgaagcagccagtattcttggtggtctggctgaatcgacaaaaagtatatttgctggattttctcgtggacttcaacatgtaccagatgtaaaattaaatagtaaaaatccttcaaatggagaggatgggataaagtga

SEQ ID NO: 378402 - DNA, 546 bp, Salmonella enterica
atgtctttaaaatcgatattaatcgtatcaatacatctattagccgcattgtgtaccgttttagtgattgcgttctatttcggcactggcgttagcaactttgtgatatgcctcactctctttaccggggcactttgggcaacacttctatatctttcaatgactggtaaaaagaaaatacagagaattgttaaatcagtgtttgctgacaataattcagtgatttcgcactttggtccatattcattaagatatattggcatagatacaaacgcaggaaacatactactcatagcgctagacaagtttaggccacaaattttaggttttaactataacgactgggcaggttatgagaaaaaaggttgtttgttgactctgaaatttaatgatttaaacacccctagctttcaaatcaacagtaatgcaacggtaaatcattttgttgatcaattggactttttgttatcatcgtcttaccaaccatccacaggttacagtaagcagtttggcaaaatagtgacagagaaactgcaaactgtttag

SEQ ID NO: 378403 - DNA, 564 bp, Salmonella enterica
atgattaaattttttttcatttcttttttgagaataatactgtggggatgtgctgtctgttgtattggtttcgcattactgctgttcatcagccccgggtttgccttgtggcaagttttttttgcaaccgttggagtcttgaccatcatcggtcttagaaaaactctagcacttagaaaatcaaaaaacgataaattcattaaacatttttactgtgagacatttcaacctcaaaataatttcgcaatgaaaagattagatattggtcattacctaggaatagatacagacacaggaaatatcttgatgatttcaaggctagaaaaaatatttaagggtgataattgcagaaatttgatgggttatcgtcgtaacggtagtgttcttactctaaagtttagaaatttaacatttccatttttcaaagcctactttggtagtgaacatgaatgtacagaatattgccatcgactagatgtcttgctgtcagcgcagtatcgccccacaaaagaatccaatgtagatttcgacatttttgtaaaagacaaactccagacagcttaa

SEQ ID NO: 378404 - DNA, 324 bp, Salmonella enterica
atgccgaagcaatttgatgtttatcgtaatccttcggccaaaacgaataaactttggcctttctatctcattatccagaatgactacttcgatgatttaacgacccgattggtagttcctctggtatctaaaaaagatctaaacctcaacaaaaagagaatcactccaacggtagaggtggagtgccaggaatattatattttcacaccggcgataacttttctggactcaaagaaaatcgtacaaaaagatttcatatgtaatgtatcggcatacagaaacgatatagtttcagctattgatgcaatcattacgaacacctga

SEQ ID NO: 378405 - DNA, 249 bp, Salmonella enterica
atgcctgcacagaccgtcacccgtaacactggtaaaagaagtaccaatgtctatctgacagctgcactggtagataaagcccgcagcctggacatgaatctgtctgcaacactggatactcttcttgctcgcgaaattgaagcaaagagtctggagcgtgagaaggagaaagaagatatgcaatccatgaatcagtttatggaaaaagcaggaatgctgacagatgacgatttcttcgggagcttgtga

SEQ ID NO: 378406 - DNA, 1293 bp, Salmonella enterica
atgtctgcctaccaacccaccccgtcacccaacaatgaccaggggacaatgatgctgatggcgctggctctgatactgatagccatcgccatatttcactcagttttttactacgcctgctgcgcgatgctttattacctctggtacctcgcggactttgcatcagtacacacctacgtggccgggaaaattaaccttctgtcctgggccagcagaagagtggaagaactgagtctgggggagttcctggacgtgatgaaccagactgccggcattctgtatgtctttttacttcccatcacggtgtacggcctcgtggccacacgaaaccatccattaagtctgacccgtcgccggattgatattcatacgttgccaaagattatgtccagcttttccccggccatcatcccggctctgcagtatggtgacccgaaaacccagttacttaatgtggacccgccagaacaccgtagcgcactgacgccggaagagttcgccatagagcataaactggtgatcgggcagcgcctcgaccacaaacgggcgaagcaggcttttgacgctcaactgggaaccccgttgcacagcgaatccagcttcagcacacatgaacgtgccctggtggccatcattggattacaggtgttttgcgacgatcgcccagctgctcttgcactccgtgacgcgttgaaccgctcctgcgggaaccgtcagcgtgaacacggcaataaacgcggttatccgcggtttagtctggcagacaaggcatttaaacaggtgatggccacaccaaaagcgaaagcgtgggtacgccgccacagtacaacacgcacagccctgtcagcgctgcatgcacaggatctgaggctgcctgcaggccagtttcggtggctgaaaggcctcgaccggacattgtggtatgtcctgtcatcatcagaccgcagtaaatgttttgtcgagggagccggtgtggtgaccgctgcacagtgggagccgctcgtatcccggatgtcgaaaaaattaaaagtggtgatccctgtacctgaagatctcaccgtttatgcggtacgcggcctggaagacgacctgcgtagtatcggcatgctcatcgatgaccacgaacgcaacactcatatcgatgaggaagacgacacaaccacattcgacgatctggtgtttctgcataacgttccggatacatcagctacgacttcttcggtaacaccagaaacggttcccctgcaggaaacccaaatagcttccacgccccttttcagaccccggaaataa

SEQ ID NO: 378407 - DNA, 1026 bp, Salmonella enterica
atgtctgataccttttccgccctgtttaaaaacgggatgctggcggtttacgccggtcattcactgagcccgttatttctgatcatgccaggttcctcaactcgcttttatctccgcgggaacgtgctgatgcatgacagtaaaacgcagtcaccccaggagatttaccaggctgaaacgccagaacaggcagccatactgctaaaggtgatacaggaggaaaggcagcgccggtataaaagccagaagaactttttactttccctcctgatgctggtaatggtcatcctgtttggtttggcagtcctcacaacggccaactcgtacatctcggcgtatgagcgtaatagtaatacgccacaacaggtagctgccgtatcgcgttcaaagcccgcgaaacatgcaccagtcaccgtggacatcgtggcggagcctcctgcagccgccgttccacagaagtcagtccctgtggcgcaggccatcccgttagcacctgaagactcacgagccatccggactgccagccttaaaaaagcgaccgacagcggtcgttacaccataaatttatccggcggtcgcgcacggacgatttatgtcttttccgatccgctctgccctcactgccgtgaaatcgaacccacacttgaagcactgacgcgtgattacaacgtggtcattttccctgtgacgctggttggaaagcaaaagaccactgaagccgtggcaccggtactttgcgctgcgccgcaaaaacgtgcgcagttgtggcagtcactctttaaggaggacggcgtgatgcctctttcctccactgcgtctgacacaccgacaccgaccagctgcactgacggcgagcacgctgtcgcgatcaatgaccgtgcctttgactattaccagctcccgggtacgccgcagctaattgcagatgatggccgtgatatccccttcagcgccctcaccagtgatgatgcgctgacccgcttcatgaatacacctgtacagggggcaggcaatgacaaccggtaa

SEQ ID NO: 378408 - DNA, 2196 bp, Salmonella enterica
atgacaaccggtaatacccagcccgttgacaaggacagagtccgacagataacccgttccacctggattgacgattacctgctggcgccggccaccgttcaggctggcctggtcgtcattttagtgctgacattcctgcgtacctggatactgctccccggcgtattcgcaaccgccatctggttgctgacattcttcgggcagctgttccggatgccgctgcggatgccaaaggatattggtggtattgatatgaccaccgaacgtgaaaacgcactggaattcaaaggcccgatgggcctttttcgtttcacccgccgcaggctgacgtgggataaatcagccgggattatgtgtcttggccatgccagacggcggttcctcggccgggaactgtggctgacgcgtgatgattgtctccggcacatgcagctgctggcaaccaccggttcgggaaaaacagaggccctgctctccctgcaactcaacagtctctgcatgggccggggaatgatgttctccgatggcaaggcagaaacgagactggcctacgccatctggtcgctgatgcgtcgttacgggcaggaggataatttctatgttctcaactttctcaacggcggtcgtgaccggttcgatgaactcctgggcaatgaccggacacgtcctcagtcaaacacaacaaacttcttcggggatgccaacgcaaccttcatcatccagctgatggaatcgctgttaccactggtcggatcaaacgaagccggctggcaggataaagccaaacccatgctgtatggcctggtctacgcgctgtattacaagtgcaggaaagataacatccggctctcacaatcaataatacagaagcacctgcccctgaaggaaatggcggacctgtatattgaagccaggcaaaacggctggcacgacgaagccgtcagtgcgctggaggcgtatctcagtaatctggcaggctttcgcatggagctggtcagcaagtcctctgagtgggaccagggcgtttatgatcagcatggcttcctgacgcagcagttctcccgcatgctggccatgttcaacgacgtctatggccacatcttttcttccgatgccggcgacatcgatatcagcgatgtgctgcataacgatcggaccctggtcgtgctcattcccgccctggaattatccaaaagtgaatccgcaaacctggggaaattatacatttcagcgaaacgcatggtctacgcccgcgacctcggctatcagcttgagggaaaaagcagggatgtactgaccgggaagaggttccagaacccttttccctttcctgatgtgcatgatgaactggcaagttactttgcaccgggcatggatgatcttgccgctcagatgcgcagcctgggcgtcatgctggtcatttcagctcaggatatccagcgttttgtggcacagttcaagggagaataccagaccgtcaacgccaacacgctcgtgaaatggtttatggcgatgcaggatgaaaaggatacgtttgaactggcgaaagccacggccgggaaggattactttgccgaactcggtgagatgaagcgcacaccgggtacggtcagcagcagctatgaagaagcaaacaccacttatatccgtgagaaaaaccggataacgctggatgaactaaaggatcttaacccgggtgaagggtttatctcattcaaaagcgccctggtgcccagcagtgcaatctatatccctgatgatgagaagatatcgtcaaaactgtcactgcggatcaaccggttcatcgatactggaaagccgaccgaggcggacctggtcgcacagaatccccatcttaagagcctgctcccgccctcagaactggaggtcagcatgctgttacagaggactgatgaaatcatcgccggcagtgagacgcacacattaccgcccctcatggacccgatactggccagactgatgaaggtcgcactggatctcgataaccgctgcgatatcagctacaccccgacacagcgcggaattctgctctttgaagccgcgcgggacgtcctgaaaaagcgcgggaaaaaatggttcaccgtcaagacgcaacccaacccgctcagggtgtctgacgcaatggcgcatcgtctggccagaaagtcgacggcgtttatgccccaggagcagtaa

SEQ ID NO: 378409 - DNA, 567 bp, Salmonella enterica
atgttcagattcagttccgcgcatgtcatgcgcgcatcacgcctgtcactggcactgattcttctggtgggtatccctgcctgtaccgtgacggccgcgtcaatccaggttggtttttctccggaaggcaccgcacagcaggtcgttctcaataccatcaaccagtcacagcagtctgtccgtctgatggcgtattcatttacgtccccggaggtcgtcagggccttaatcaacgccagaaagcgcggtgttgacgtccgggtcgttatcgatgaaaaaggaaatacctgcgataaatgcaaagccagcaaggctgcaatgaacctgctggtaaatgcagatatcccgctgcgcaccgtcagcaaatataaaatcatgcacgacaaggtcattattacgaatggtgccaacgttgaaacaggctcttataacttcagctccgtggcaaataaatccaattcagagaacgctattcttatccagaatgtaccggagttagcacagcaatatcttcagcactggcaatcccgatggcaagtgggacgcgactggaaatcggcctattaa

SEQ ID NO: 378410 - DNA, 516 bp, Salmonella enterica
atgagcaccatagacattgtatttgaatcccgttacaggggattctatctcctgtttggtagccagttcgttcgctttggcacactgcctcatttacagagctggaagctggaacaagccatcaaggccgatacgatatgtagaagattgatcgaattttattacgatactaactcggggaaagggcatttcatacttcctgattcatcagtctcgccagcgggttatcgtgctctgcgatatccactacccaggacagtgacacaaagaacggtctatcgctggcaggacagggttcgtgatgaaacacacacgcatatcgcaacaggcgcacatggttttgaatcgctgtgttgctcagaaatgctggccgaaatggtcgaagacgctgaactgacaaccgttggcaaagtgacctgcccactgtgcaaaatcatctgggaggactgcagagcatttgaaccctgtgatttcagcgatactcaggaaataagtagattaatgaccatattatag

SEQ ID NO: 378411 - DNA, 576 bp, Salmonella enterica
atgacgacaaacactaccgatttactcggccatttcgcatggtgcgcccagattgcaattggaatcgcccgccgcgacaaaatggtcaccacatcagttcaggaacatatctttttaatgaactggctgacaacggcccagaaaaagaaattattcccacgggaaattgcgggtgagattgatgttctgattcgcctcggaaaacaacaggggataatagcgggactgaaacgcaagctcacttttatctacaagtcctgctgcgaagatatcggcgaacagagtgatttatttcgcctgacttatgcactggaagaactcaaaaataatggcaggagaagccataccctttcgaccgcagactggaaaaaaggatgggaaggccctttcagccccgccatctacattgagttaccggcactgcaggcagcattcagtgacgaaggaaaacaacttaagcctctgccagtacgtatcaccggagacgctgaatatgccactcagatgttatccagactgctcagtccgtctgtttctgtatgtcccgccaataacctcctgctattgacaccctga

SEQ ID NO: 378412 - DNA, 210 bp, Salmonella enterica
atgaccatcgcacaacagcttgaacagaaaggcatcgagaaaggtcggatggaaggtatccagattggcgaagagaaaggccgtcacgaaggcaaactcgagggcaagctcgaagtagcccgcacaatgctccaaaacggcctcgaccgcagtacagtcatgaagatgaccggcctgaccgctgacgaactggaacaaattcgtcactaa

SEQ ID NO: 378413 - DNA, 1119 bp, Salmonella enterica
atgttgcagcctcctcaaacgatcacactggcagagttcctggctgcctttccaaaagtagatctacattatcatctgctgggcggcgtacgtttaacgactatgctggagctggcgcagaaatataatgtacctctctcagagtctgaagccaaaagctactaccgccggtatcagcacgaaaccggcgtcgttaaaggtgggattgctgcgctgaatttcttgtatccattgcttcgtaacgctgaagattattttcgtgtgacttatgaagtcgctgaggatgccgctgcgactggcattcgccatctggaactgttctggaatccttccgacacggttctgacctatgctgaggttacagaggcgatgagcgaggctatgaaacaagcagccagagtgtgggaaattcgtgcactgtttattccctctatcaaccgtgaaaaatcacctgaagacgctgtggctatggtggatgcggtgttgcaatacccacatccattagtgccaggcatcggcatcgattacaaagaaaatgatgcgcctattgagcatttctggaaagcctatcgcaaagctgaacaaggggggttacgtttgaccggacactgctctgagttcggtttgcattggcgtaatgtggagacaggtctggatcttatccatctggaacgtattgatcatggctacaccgttctggaaaaccctgaacttacagaccgctgtgtgtgtgagaatgtgccattcactgttgtccctggtaatacctattatctgaaaaagtggccagagatatctcagtggcgccgaaaccatcccattcgacaaatggcgttagcggggatgaatattatcccagcgactgatgactggcatatgcataacactaatggcatggaatgttttcgggtgatggtggaggagtttggttttgaccttgatggcgtacgtcaactgatgctgaatggtattgatgcctgttggcaacctgaagggatcaaagcgcagtggcgacaggactgggctcaggaatttgatttacttcgcaaaatgctggctcaagaaccgcaaatcgatacggcacagcatattacatatcatcgtccccaaaaggtatag

SEQ ID NO: 378414 - DNA, 1053 bp, Salmonella enterica
atgaaaaaaatacttttaagtatgttattttccggtaccttagcctgcgttattacccccgcttcagcggcagtcgacctggtaaaacccaatgttactattctggcgactggtggaacaattgctggaaattcggcgtcgactactgataccaccgactataaggctggttcgctgggtattgatgttctgatgactgcggtaccggaaataaataatgttgcggtggtgaaaggtgaacagatttcgaacactatcagtggcaatatcagcagttcgattctgctgaaactcagtaaacgagtgaatacgttacttggtgaaggaggtcagcagggcgtggtgatcactcatggcactgataccatagaagaaaccgcgtttttcctggatttaaccgtaaaaagcgtcaaaccaaccgtactggttggtgcaatgcgtcctgcatcggccattagtgctgatggacctatgaatctgctggaagcagtaacactggcagcagataagaacgccgaaaaacgcggcgttatggtcgtacttaacgatcgtattggttcggcattttataccaacaagactaactcgactgtacttgataccttcagggcttatgaacccggttatctgggggtttttgttagtggaaaaccgaaattttattacaccccggcacagcccgttgacagatcttacttcgacatcagcaaacgggatagtctccctcctgtagagatcctgtattcttaccaggaccaaaagccagatatgctcgacgctgtgattaaaagtggtgcaaaaggtattatcattgccggtagtggtaacggtaatgtttccaccagaatggaagctgcaattaaggcattaagcgagaaaggtattccggtagtgatggcgacaagaaccggctctggctatgtgagcagcaagtcgtttgctattggcgcaggcttcctctccccacagaaatcacgcattctgctccagctggctttagccagtggtgcggatctcaaacagatagcggcatattttgacagccagcgttaa

SEQ ID NO: 378415 - DNA, 1275 bp, Salmonella enterica
atgacaaccgtaaataaagatactttagtcgcgtggcgacgtgagttccatcgttatccagagcctggatggggggagtttgttaccacagccaggatcatcgaactacttgaattgatgggacttcaaatcttaacgggcaccgatattattaatccgcagtttgtatgcgggcgcaatccggttgtagttgagaatgcaaaacaggctgcccgggaacgtggtgttgacgatacgcagctggctcgcattggcgaatacaccgggtgtgccgttgtgtttgatactggtcgtcccggcccgaccgtcgcgctgcgttttgagattgactgcgtctgtgttcaggaaactatgcgccccgagcatgtgccaaataaagaaaactttagttccactaacccggggcatatgcacgcctgtggtcatgacgggcatacagcgattggcctgggggtagcgcgttggttgatggaaaacaaagaattaccgctgaaaggagttatcaaacttatctttcaaccggcagaagaaggtgttcgaggtgcgcgtcctgtcgctgagagcgggattcttgacgatgtggactattttgcttgtggccacctgggttgtgacatccccagtggcgtagtggttgtagcgccagaacgttatctctccacgctgaaaatggatttacgatttaagggtgaagcggcccatgcaggtatggcgccacatgccggaaagaatgcactgttagctgcctgtaacgcgacgctacagattatgagtttgcctactcatggtgaaggcatgaccagagtgaatgtcggtatgctgaaaggcggggaaggacgtaatgtgatcccggcgtttgctgaaatgcaaatcgaagtgcgtggtgaaaacgaaaaaataaacaactacatgaccaaagaagcgttgcggcgcgcgcatggtgtggcacagagttttaatgttgagctggaaactgaagtgatgggggaagctgtcgattttgtcccggacgaggaaatgtcagctcttgtggcttctgtcgcgcaagacattcctggtgtaaaggaagtgcgtccgacaatgaattttaacggtagtgacgatgctactttgttaatcaaacgtgtacaggcccacggaggtaaggcagcgtacttcattattggttctgaccttaaggctggccatcaccaggccgaatttgatattgacgaaaatcagttgtggaccggtttttccatgtttactggccttcttaaacatttatcaacatga

SEQ ID NO: 378416 - DNA, 1368 bp, Salmonella enterica
atgactgtgataataatcagtttaatagtgctggtactggcaggttatgcgatagcgaagaattatgaagcgaagttagtcttgtttgtcgctggtattgtactgatgctgtgtgcggcaatgctgggattacctgttctggatattaagcaaagcaccggcaatgtgtggttagatccactcaaacagatacagacaggctttatcaaacagtttggtggtgccggtatcatcatcatggttctgttcggcttttcttcctatatgtcgcgtattggtgcgaacgatgcggcggtacatctggtttctaagccaatatcaaaaattcgctcgccttacattctggtacctattgtattctggcttgggacattattgtcgcttgttattcccagtgccgcttcactggctgttattttaatggcgacactctatccgatattgcgcgcggcaaagatgtcatcaatgacttctgctggcgttattgctacgactgcaaccatcatgccgactcctttggggggagataacgtggtagctgcaagattgttgggctttgaacatgttgttgattatgttacccagcaccatgcagtcatctccctgccagttttacttttgatgggggttgcacactatttttggcagaaatatatggataaacgccagggggcagccgcgtttactgacgtggatgagagccagtttcatgacagcaagcagcttcctccatcctggtatgcattatttccactgatccctttgatacttattatcgttcttggtttattcttccgtcagattaaggtcgggctggtcgagatcacgcttttttcctttgctttggcgttcgtaacggaagtgattcgtaaacatgatgctaaagcgcagatggctgaagcagtttgtttttttaaaggtatgggggatggattttcgcaggtagtggtgttgatagtcgctgcaggtacgctggttgctggcctgaatgcaatcggaattattgatttgatttctggtgtggtaaaaaacgtgaataacgctggtatggggttgatgtttattttctctggcctgaccgcaattatcacatttattagtggtagtggtaatgctgtattctattcattcatagaaatcattcccccaatcgcagaacaggctcacgttgacccgattatggtggcgttgccgatgcaattcacttcaaaccttgtccgggctatttcacccgtttccgctgtcgtcatcatcgttgcatcagtaattaaagcaagtcctgtcgacgtagtgaaaagaacagcgatacctttagctgtgggaactatcgcaacactcatcgcttctttcatacgttattcgctctga

SEQ ID NO: 378417 - DNA, 921 bp, Salmonella enterica
atgaaaaaaaactctgttgttgggattatgctggccttatgtgctgcatttttgtggggaactgcgggaacagcgcaaagttttgttcacggtgcaaccgcgccttactggataggtgccttcaggctgatgattgcctgtatgttctttcacctgctttttttctgtcgttcgaacagcactaaaaccacagtggctaccgtatcgaacagtagtcttcagatcagcagaacgaaatactggtacttcatctgtatagctggcgtaagtatgggagtatataacctggcattttttgctggcattcaggcaacgggtattgcgacaggaacagcaacaactatcggcagcgccccaatttgggccggtctgatgcaagctattgtaatgaaaagacccccgtcgaaactgtggtggcttggcacactatgcgcaaccgcaggtggcagctggatggtattttcacaaagcgaaagctggaaaatcaataatacaggtctgctaatctgcctgagcgctggattttgttatgcactgtatacagtatgcagtaaaaaactggtgagttttgcttcgccactgactatcaccaaacatacattcagtatcgccatttttatcgctacatcagttgcctggttgctggcgggaacgccaactctcactctgattagtatcggtgtcatactttatcttgggttgttaaccaccggtattgcttatcttctctttacccaggccctcaggcatatcagcgcatccactggcgtagctctgggtctgatcgaaccgattgtcgcttttatcctggcaattgttgttgcccacgaagtagttaacaggtttgcggttattggattgtgtttgattctggctggattatggttagtgctacgttcggaaggacagcaaaaaacgtaa

SEQ ID NO: 378418 - DNA, 522 bp, Salmonella enterica
atgaaagacatcacagataatgattttgttgataatctgatacaagagtggctggatgcgttccctttattgaatttgagtggtttgcctgttatcgcgcggatcgtacgcatgagccattacatttcccaatttgtagattcaaacttagcccgttataacctgaacgtcggtgagtttgaggtattggctgctctggccaggaatcccgaccgacaactttcgccaaaagaacttcagaagaaaatcctgatctcatccggtgggttgtctaatcgaattaaccgtcttgaggaaaaaaaatacattgtcagaatccctgatccgtcagaccgacgaggtgttatcgtcaggatcacccctgaagggagaaaacttacccttgaagctgtcgtaacgcatgttgcgatcgaagaggctcttatccaggggcttgatattgaggatcgggaacagctggctggactgcttaagaagctgatcaaatcgcaaaaaagtgaactcaacgaaaataatgagtaa

SEQ ID NO: 378419 - DNA, 228 bp, Salmonella enterica
atgaatcgagagattcacgtccggttgcgtgagggcctgagggtgaaattcccttgggctactcgaccagctataaatttcgtgaaaagaagattagtgacgaatttgttccagttcgccagcggtcaggtcggtcatgttcatgaagctgaagaggccgaggccattcttcagcaccgtacggactattttcagggcagcctcgcgttcgcctccgaagttatttag

SEQ ID NO: 378420 - DNA, 1248 bp, Salmonella enterica
ttggacaaggcaaagcctttcagtatttccaagacaattgtctgggaggcatataagcgcgttaaagcaaatgcgggcgcagcgggagtggatcgtcaatcgatcgaggagtttgagaaggacctgacaggtaacctatacaaactctggaatcgaatggcatccgggagctattttcctccaccagttcggcgggtggatattcccaagagtggcggcggcacccggtcgctgggtattcccaccgttacggatcggattgcccagatggtcgccaaactggttctggaaccggaagtagaaccctgcttccaccctgactcctacggttaccggcctgagaggtctgccatcgatgctgtcggcgttgcccgtcagcgttgctggaggtatgactgggtcgtggacatggacatccgggcgttcttcgatagtatggatcacaacctgctcatgcgagcggttcgtaaacatacctcgtgccagtgggtgctgctctacatagagagatggcttaaagctccagtgcagttgccggacggaaccgtgcatccaagagatcggggcacgccccagggcggggtcataagtccattacttgctaatttgttcctgcattatgcgtttgacctgtggatgcaacgcaaccatccggataagccgtttgagcggtacgccgatgatgtgattgtacattgcaggtcgttgggagcctccagaagtcttatgcgagaaatcgaccaacgtttgtcggagtgtgggctgaccctgcatcccgagaaaacaaaggttgtctattgcaaggacagaagcaggagagccgactacccggttatcagctttgattttctggggtatcggttccagccacgctgtgctaagcggcgggacggttcactgtttctcaactttctgcccgcggtaagcccaaaagctgccagaacaatgcgtgggaggattagaagctggaagatacatcggtggacacagttaacgattaaggaactggccaatagctttaatcccgtcctgcagggctggataaactactatgggaagttctataaatcgaagcttgcaccgattttcgaccagcttaactattcccttgtccgttgggtcagacggaaatacaaacggttaggtagcacctcgcaggcaacaacatggttaaggcgcgtggttgcgcaattaccaaagttgttcgcccactgggctattactcatgccggaatagcgggacgatag

SEQ ID NO: 378421 - DNA, 513 bp, Salmonella enterica
atgcctgcacatgccgtaccaattgatgtaaaagagcaaggagtcatctggcttttgcctccctatagttggtctatcagacatattgcccgtaagctggatctaagcccttcagtaattgcaagatggagacttgaactggtgcagaaaggtttgttgcccgaaaacgagaaaatctcttccgtaaatggtgatgagtggactccggaacgtcgattttcagttgtacttgaaacagctacattatctgaaatggaacttgctgattattgtcgtcgtatggggctatttgtcgagcaggtcaaagagtggcgggtaatctccattaaggctcatgaaatgaaaatgactgaaaatcgccgagccgacagggaattgcgtgaagccaaaagtaagttacgggatcttgaaaaagaacttcaacgtaaagataaagcgctggcagaagctgctgcacttctgatgttgagggaaaagttcaatgccctctgggacaacagcggggaagactga

SEQ ID NO: 378422 - DNA, 1014 bp, Salmonella enterica
gtgcggcagaaaattatatctctggttagtgaagctatcagaaatggagcccgcaaaacccgggcctgtcagtgtattggcgtttctatcaggactcttcagcgctgggttgatggtgaagtgatcaacgcagatcaaagacccaacgctgcgaaccggataccccgaaacaaattgtcggaagcagaaaggcagcaaattctggagctttgcaattcgccgaaatttgcttcactgccgccaaatgttatcgtgccaactctggcagataaaggtatttatattgcttctgaatcaacattttatcgaatattaaaaagtgccaaccagttaacccgaagaacccgtgaaggccagtacagacgtccggatgctcttaaagctacagcgccgaatcgagtctggagttgggacataagctacatcccatcctggatcaaaggccagcacttttatctctatatgatcgtcgatatttatagtcggaaaattatcgctgcagaaatattcacgagtgagtcaggtgaaaatgccgcagaactactgcaacgagcggtctggaacgaaaaatgctcatcacgaaacattgttctccattctgataacggcggaccaatgcgtagttatacgttgctggcaaaaatgtatgctctcggtgtactaagctcctactcccgccctcgcgtcagcaatgataacccttactcagaatcgttgttccggacactcaaatattgtccgtggtggcctgagaatggctttcgcaccatagatgatgcccgggcatggataaatcgcttcgtaaactggtacaacctggaacacaagcacagtgggatcaaatatgtcaccccggacgaacgccatcgggggcttgatgtaaaaatactggcagccaggaagtctgtctatcgacaggcccagaaacaacacccagaacgctggagtcagcaacttcgcaactgggactacatacaagaagtttatttgaatccagaaaaagaagtggcatga

SEQ ID NO: 378423 - DNA, 531 bp, Salmonella enterica
gtgaagcgctgggctcgcctgtactgccctgacgttattcttggcgtttacacaccagatgaacttgaagagcgacaagaaaagattgtcaatcccgaccagggtactcaaaacatcaccatgcaggacattaattctgagagtgtatcaactacagccagcacacaggaagcggctaccaacgttgaagctatggctgatgagttacgtaaccgcattgattcagcaaatacactggaatcggcaaccgccgtcggcaacagcataaacgaggctaagcctcttcttggtacgaccctccataccgaactaaaaaataaggccccccgccgctatcacatggttaagcatcgtgatctggttgagacagctattaattctcttccgcaaccagatgcaccagaagcaactgcatgtttcaaagcagttgaaaaggctctcacaatggcaaagcgtcatttaggcgacgaactctacgataagtaccgcatcaatctcaacgatatgaaaccagaatacatcactgcataa

SEQ ID NO: 378424 - DNA, 306 bp, Salmonella enterica
atgaataaatggaaacgagccgaaatactgatagttcgtcagtgcgccggaaaaatgaaagtagcaactatcggtcagttgattggcagaacaggcggcgcggtacgtgcaaaagcacgggagttacatatcagtttgcgcctgcgaggggactatcaccagtcagttaaatatccaggttgcaatgtcgagatggcgcgggaactgcataacaaaggcgcccgtcgccgggatattgccgaaatgctcggaatgccactcggcatggttaaccaatatgtctatttcgacaggaggattggctaa

SEQ ID NO: 378425 - DNA, 144 bp, Salmonella enterica
atgagcaagcctaaaactcatactggcgtcatcgtcaccaaagacggtgaaaaaacagtaaaaatacgtgagacagcaacaacctggtgtgtcggaccccgcgagacatacgacaaatttaccgggcgtcgtgcaggcgtatag

SEQ ID NO: 378426 - DNA, 1233 bp, Salmonella enterica
gtgtgtcggaccccgcgagacatacgacaaatttaccgggcgtcgtgcaggcgtatagcgcggggtatccagcgatttgtcatcgacattgaacagccgtatatcgtgccattcattgtgaaatgcaatcacaccagcagcaagagtgaatacgattgttttcgcggtcagggtttaccggagccactacagacaatcacaaaaaaacacggttatgccgtggcagtccctcatcttacaaaattccgtaccggcgctacggggcaaaatgtcaccgaccccgcgcccaccatcaccgcaggtacatcgacgcgaccgggtggaaatggtcatgccctgggtattgttgaggccgcattaacaccttttctggctggaaatggtggcagcgagtaccaggcaaaaccgagaccgctggataaacccgcgcataccattctgaaacagtcccgcgcctgcctggtcgccccggtcattacccgccagttcggagccagtatcggtcatcgggcagacgaaccgggcgccactgtcaccgctggcggtggcgggaaaagccagttaacgaccgccacgcttattcagatgggctatggagaacgtcccggtcaacagcctcgcgtactccagctcggaaaaccgctgggcacggtcactgctggcggcggtaagtttgctatcaccagcgcattcctggcgaaacactacggtgggaattatacggggccaggtgtaggactggaggaacctgcgcactcaataacaacggtcgatcatcacgctgttgtatccgcgcaccttatggtcaataacacaggacatgctggtggcgctgctgattcacctgctcacaccgtcacggcaggaggcctgcatgtaggtaatatcgagaccagccttgctgtcaatgagtacgacgaagaacgcgcacagcaggtactgtcgttcctgcggaaatattgcggagaagactgcactggtctggtcactgtaggcggcgtggtttaccgcatcgtagatatcggaatgcggatgctgcaaccgcgcgaactctaccgcgcacagggatttccggactggtacatcattgagcatgattttcgtggtgtgaaatatgcgaaggacaagcaagtagcgcgctgtggtaatgccgtaccaccacagtttgctgaggcgctggtgcgtgcgaatctgccggaattgtgcgtcaacggggaggtaattgcagcatga

SEQ ID NO: 378427 - DNA, 417 bp, Salmonella enterica
atgaagaagtctgtctgtatgttatgcggcgccccggccacccagctttgtgacgggatcatcggctgggatgccgatggggacaaacacgggcacatgacaaaatgtcgtggcatgttcacctgcgacgcaccagtatgccggagctgcgctacatggcatggcaacatatttttcgatggaaagatccggatgatggatacacgcgacctttgtccgctgtgtcagaagctacacaaagcaggtgaacacatacgcgttgcagaacacaggaagcattctgcactaccgcaaccgtgtcttaccaaagagcaggctgcgattattcgcgccgcacattgggctgggttcgctaacagctataccagaagcatagaaatactgaaaggtggcgggcagcaaccctttgatttttga

SEQ ID NO: 378428 - DNA, 234 bp, Salmonella enterica
atgtataaattcacattgtcacctttggaaatagcagaaattactggctatcagcgttacacccaccagcagcgacaactgcgatgtcacggaatcccatttactacagatgggaaaaacagaccgattgttttacgcaaacacctgacaccaaacacgactgaattaccaaaggttgacgagtatgttgaaactgaacccaacttcgatgccatttatgggaagaccacgtaa

SEQ ID NO: 378429 - DNA, 1062 bp, Salmonella enterica
atgttgaaactgaacccaacttcgatgccatttatgggaagaccacgtaagaatccgaaagataaccaactgcccccacgtgttaccagaaataagtacagttacgtctggaaaccgaagggaacgaaactcagcataacattgggaaaaattagtgataccaccatgtctaaaatctggcaacgctatgaagaagaaaaggcaaaacgtcatgatgtgatgacgtttgcgaaattatggtcgaagtttctggacagcccaacattcaccgaacttgcgatccgtactcagaacgattatcgacagcaccagaaaaagctgctggcggtatttgggaagatgaaagctgacgatatcaagatagaacaggttcgtatttatatggacaagcgcggagtgaccagcaagaaccaggccaaccaggaagtatcgagcatgtctcgcgtatttgggtggggttttgagcggggttatgtccgtaataacccatgcaaagggattaggaaatttactctgattgatcgtgatgtctatattcccgatgaggattacctggcaatttatgaacatgctcgcgtagaggttcaggttgcaatggaaatatcgtatttgtgcgcggcgcgcgaaggtgacgtgtttgatttaaagattccagatctccgagctgatggtattttcattgagcagaacaaaacaggcaaaaagcagatcaagaaatggacgccacgtttgcaggcagccatctccctagcgagcaagcattttgcgaacaagtccgcagccggttacgttattccctcgcccagcggtggaaaaatgaataagaaaacgttcaacacctggtggaataacgctaagaaggccgcagccttgaaacttggcaggccgattcaaggaactttccacgatataaaagctaaggcaatttcagattatgagggaagcagtaaagagaagcagctattcagcggccacaagacagaaagccaggttgtgacgtatgatcgtaaggtcaaaatttcgccaacgctggacgttccgatgatgagtaaggagaagtga

SEQ ID NO: 378430 - DNA, 261 bp, Salmonella enterica
atgccagttacgttaagttttggtaatcatcataactatgaaattaatgcttcacggctagcccgtttgatgagttctgacaaagaagaagcgctatatatgggggtatgggatagatttaaggacaacttcaggacacaaaaaaacaagaggcgctggaggcattatatacactcatccatggatgtagacgtgaaaatcaagctgaacttaatgttgatacagacggcatggataagatacatgcctttgtacaattaa

SEQ ID NO: 378431 - DNA, 2094 bp, Salmonella enterica
gtgaataacgaaatcattgtggataattttgctggtggtggtggtgccagtaccggaatagaaatggcgatcggtcgcagcgttgatattgccgtcaaccacgacccgaatgctatcgcgatgcacacaaccaatcaccccgacacgctgcattattgtgagtcagtttttaccgttaaacccaaaatagtgaccgctggtcgtcccgtcgcgctggcgtggtattcccctgattgccgccatttctccaaagcgaagggcgcaaaacctgttgagaaatcaattcgcggactggcgtggattgagcttcgctgggggctggaggtaaagccgcgggtaatgatgctggaaaacgtgggcgagttcagaacgtggggaccgctgcttgccggggaaatgcgtcctgaccctgagcgagtcggtgaaacattcaaggcgtttgtcggcatgctgactaccgggatatctccagaacatccagcgctgacagaatgctgtgaatttctgaatatttcgcttgatagcgaggatgccacacggctggtaaacggtctgggttacacggttgagtatcgcgagctacgtgcctgcgattatggtgcgccgacaatccggaaaaggtttttcatggtggcacgttgcgacggtcagccggttgtatggccggaaccaacccacggcgatccgaaatcagaagcggtgaaatcgggtcgcctgaaaccctggagaacggcggcggaatgcatcgactggtcaataccggcaccgtcaattttcgagcgcaaaaagccgctggctgaaaatacactcagacgtatagcgcggggtatccagcgatttgttatcgacagtgaaaagccgtacatcgtgccattcattgtgaaatgcaatcacaccagcagcaagagtgaatacgactgtttccgcggtcagggtttaccggaaccgctacagacaatcacaaaaaaacacggttatgccgtggccgttccccacctgacaaagttccgtaccggcgctaccggacagaatgtcaccgacccggcgcccaccatcaccgcaggcgcatcggcgcgaccgggtggaaacggtcatgccctgggtattgttgaggcagcattaacaccttttctggctggtaatggtggcagcgagtaccaggcaaaaccgagaccgctggataaacccgcacataccattctgaagcagtcccgcgcctgcctggtcgccccggtcattacccgccagttcggggcaagtatcggccatagggcagacgaaccgggtgccactatcaccgctggcggtggcgggaaaagccagttaacgaccgccacgcttattcagatgggatatggtgaacggaatggacaatcaccccgcgttctccggattgaaaggccacttggtacggttacagcaggtggaaacaagtttgcgatcacaacggcattcctggcgaaacactacggcgggaattatacggggccgggcgtaggactggatgatccagcgcactcaataacaacggtcgatcatcacgctgttgtatccgcgcaccttatggtcaataacacaggacatgctggcggcgctgctgattcacctgctcacaccgtcacaacgggaaatcatcatgcaattctggcatcccacctggttaaattgcgcggcacctgccgggatgggcagtgcgttgacgcgccgatgccgacggtcacagcgggcggcctgcatgtaggtaatatcgagaccagcctggctgtcgatgagtacgacgaagaacgcgcacaacaggtactggcgttcctgcggaaatattgcggagaagactgcactggtctggtcaatatcggcggagtgatttaccacatcgttgatatcggaatgcggatgttgcaaccgcgcgaactctaccgtgctcagggattcccggactggtacgtcattgagcacgactttcgcggcgtgaaatatgcgaaggacaagcaggtagcacgctgcggtaatgccgttccgccgcagttcgctgaggcgctggtgcgtgcgaatctgccggaattgtgtgtacagaaaagcgaagaagccgcgtga

SEQ ID NO: 378432 - DNA, 258 bp, Salmonella enterica
gtggaaaaaatattgtgttacgccttaaaccgcatcgttgaactggaaaatatgctgctgccggcaataccggaaaccgtctggcctgctgaggtggagcttatattttcccgtactgaacgggccggggatttgccattgcatcaccagcacagactgaagcaccacgttaatcgtatgtggttagagcgcctgcctgtcccgtcaatcgttaccgccgctgaggcgttgtgtaaggaaatggagaaatacgcgtga

SEQ ID NO: 378433 - DNA, 354 bp, Salmonella enterica
atggaaagtaatactgaaaacgaactggcaaacgtggtgatgtttccgtcgaaggatgaagagcccaaagatattgccggttatatctatgagcgaggtgaatattgtcaccacccctctatttatgtgaatgagcatgatcgtcagtgccgttgccagaaatgcggtgcagtgattgagccattcgattatctgcttgacctggcgaaaaagcgtacccgaatggcaggggatgtggcagcgctgagaaatgaggagagatatcgcagggagaatataaaaaagctgatacagattgagaaaaatgcgaaagccagaataaggagaatggataaaaaacaaaacaccgaatag

SEQ ID NO: 378434 - DNA, 1266 bp, Salmonella enterica
atgaccactattaccagagaacaggcacaaaaaataattgatgctgccgacgaggtcatcactgcacttgctggtactaacgatgattttcacccggacaacagcgaaaagatgtgtgggttatgggatgatctgaacgacagatatgcgccgcctgaagttgtgcgggaacttgcgcgggctatgctggcatcgatggacgctgagccagccggataccacgtcatcaaagagtgcggaaaggttggctgtagtgttgcaacgcttgaggaagccgagaaaacgcgagacttctggaataaaaagtggactatcaggccgtatttttacaccgccccgccagcgtcagaacgcgaacgtattcgccgtgaacacgctgaatggtctgatgacacgttcggcgatgtcggttcagttggtccgctgaagcacctttccaaagaagctatcgaggcggctgctgaacctgacgacctgagcgaatgggctgatatgcaattcctgttatgggatgcgcagcgccgtgctggtatcagtgacggtgaaattaccgcggcgatggtaaaaaagctggcgataaacaaaacccgccagtggcctgaaccgaaagacggcgagccacggctgcacatcaaagagcagccagtgccggtaatgcctcctggattgcatcctgacacgcaaaagcttgtggccgacttcagcactgatcttgcagagaagctatataaggcgcaactgaagtatggttatgacgctgactggaaacaggataactggtcgacgcagtgcctggcgcattttcatcagcacatagccaaaggcgacccgcgcgacgttgcggcttgctgcgcgtttatgtggtatcacgactggaagacggagcctgcgacagcgccgttaatgccggaggaatgtccagcggatattagcgttctgatggcttcgcattctgatgcacttttcaacgacgatgatgctcaggagatatggaacgcctgccgcgctgtcatgcttcagaatcaataccgcgatctgtcacaaccagtagatcctcaaatttccgaatacgagaaaataatgctgcgtgctggctgggttatggtgcccgtcgaaccaacggacgaaatgatagcggcagcgatggaatgcgatgatgtggttttcgacagtaaagatccaaccgcattctgcgttcagtatcgggagatatatatcgccatgacgacagaggctcctcaaccggaaacttcagatggaaagtaa

SEQ ID NO: 378435 - DNA, 417 bp, Salmonella enterica
atgaccactattaccaataacaaattaccagaatggcgaacagcgctggataagtgcgtagaaaattatcaatccaccagggcgtggtatgaagaaaaccgagatagcccggcagcgctagacgatatggaaagagcagaagatcagtttgctaactttgtaaggaaatgcggtttcagtatcgtcctgggcttgcttgatgaaatagacgagctacaggatcgccgcagggctgataacgatgagccgtttggtttcgttactaaaagatgcgccgagcacatgcatgatgacgaccgcgacgaaaataactggatgtggtctatctcagcagtagtcattggatgtaatccaaagctcaagcatgaggttcctgtttacctgcacccagcctcatccggcaaggagggagcatga

SEQ ID NO: 378436 - DNA, 474 bp, Salmonella enterica
atggaatcgcaagctattctggatatgtgctgcggctctcgcatgttctggttcaataagcgcgatgaacgcgccgtattcgccgatatccgcggcgaggagcatatattgtgcgacggtcgcagtctggttatcagtcctgacctcattgctgattttcgtgcgctaccgtttgctgattcgtcttttccggttgttgtattcgacccaccgcatcttgagcgagttgatgataacgcctggatgggtaaaaagtacgggagactgaataaaaaaacgtggcgttctgacctccgcgccggattcaaagaggcattccgcgtattgcggccacacggtgttctcattttcaagtggaacgaaacgcagattccggtaagccagattttggcgcttactgacgtgaaaccaattattggccagcgcaccggcaagaacgataaaacccactggattatttttgtgaagggctaa

SEQ ID NO: 378437 - DNA, 246 bp, Salmonella enterica
atggctattttcatggaagtgcgctgtgaggggctcggtgatattgatggctgtttctctagccagaacgccggttcaataacgtcagcacgtgaaagcgttaagagcgtttctatagcgctgaaatttcttaaagatgattcgctcaataacggctggatgctgcataaaggtgcgctttattgcccggtatgcgccaaagcaaaagcatgggacgccgctggcatcaaggttaaggagtcgtga

SEQ ID NO: 378438 - DNA, 204 bp, Salmonella enterica
atggctaagccgttaaaaaaattcacagtagtccttaacactgaccgtggctattacgattttcaggttaaagcaaaagaccatcacgatgctcaaattgctgctaaagaaaacttcgggcatggggaatgtgatgacgaagattggaacgcttcgactgcggttgtcatcgttgggtggcctgaaatatggatgggagactaa

SEQ ID NO: 378439 - DNA, 651 bp, Salmonella enterica
gtgagcaacatcgacaaacaggcgctgcgtgaagaattccagtacatgcaagaccattacagcgacccggcagaccgagaccgtcagattatatatatcgcggcagaggcgctgctggacgagaatattcaactccagcgggaaaaagacgcaacagaggccgtattgtcagccatgcatgatgatatgcggcaggcgcgcgaacaactgaaagctgcagaacacacggcggcggtagaccatgaagcagcgtgttctttggtcgaagaaaacgaagaactgaaacggcggattgcagaactcgaacgcagcgagactcagcttatcaatgagcgtgatgatgccgaatctgctttgaacgatgcctacaaagccgttatgggccacgcaccagaatggagcaactggtttagcttcgagaatgcgatagatgaaattgagttagcgtgcgagctatggcgcaaccagaccgatgacgttatccagttccgccagcgtattcaagaactggagaaaaagttagctaatcccgttttgctgccaaaaacaaacggctactggaatgagcaagaaaaggcgtatgaagaggccattacgctcgctaagcgtcaggttcgtctggctggattcagcgttgagggggatgaatag

SEQ ID NO: 378440 - DNA, 243 bp, Salmonella enterica
atgaaaattgaatatcaggacggcggagaggaatcgcgccttcttataaccagttggttttttgactggagggagcataaccgattggtggatgaagttctgttttgcgcacccagattgcgggcagtggatgaaggttttttaaggaggacgacagtcatttccggtgcaacagcctgggttatgtgtgcagaagtcacgattgaggaaagcgggtatgaggtcaggaggattggtcagtga

SEQ ID NO: 378441 - DNA, 396 bp, Salmonella enterica
atgagcagaaattacacacacgaagagcgggaagagatccagaagcgcttaacggagctggtaagaaagaacggtcgtatgacgtttggggaactgcggagggtaacagggttaaccgtttttacagctcgtcattatctgagtgaggcggaacgctgtggggatctgtatcaggcgggcagaagtggcattttcccatcggagcgagacttccggatctggaagcgaaagcaggacgacgccagggtagagcgttttctgaatgccaagttggtcgccggggaaccttacgacaggagccggaattgcatctgtaaggaatgccggaacagtgacgtaatgcagcgcatcctggcattttatcggggatatcaacagggagtgatcggcaaatga

SEQ ID NO: 378442 - DNA, 2193 bp, Salmonella enterica
atgaaaaatattactcaactggtttttaagcctaaaaaaagcgccattgcaaaaggtgttgcccggcctggaacagcctggtttgataacgacgatccagacgagattgacgctttagcaacgctggcaatcaaagcagcgggattcaagagaagcgatttttttaagcccgttcgtgtcgatcacctggttgttgacgatatgccagcggagggggtttttgatactgcgttctgtgaccgctacaaactcgcagaagacggtaaaagctggctgctgcctgcgacacaacctgagtctaccgacagcgatacgactgataccgataatcagaggcagggtaatgaaaacactaccagcatcaccgattccggcgataccgccagtgccgccgttaccgattccgaaaccactgttgataccgaaaccagcgtcagtgacgaagctgatacagattccgccagtgatgtgaacgttaacgtcgaaccgatggctgatgttgaaaagggaatggactggccaatgaaagatttatcgctgccggttcgctggatagcacagaagggaatggacagtaaagtgcttttcctcaagccagcagagcgggaacgactgacgaaaatactggaagcggatgacgagaataacagccaacatctgaccaatattaaggcggtaactacagacgagctggctcctgagatcgacaaactgacgacgtaccatcttcaccgtctggtaactgcgtttgacaaagtatctgaaaaagttgaacgcatggggccgttcctggctaagaggtttgtccaggcgtggcttgatactgaatatatcgatcaggggattctggttaacgagtggtgcgcaggaagacgtgtatcccgtattgaaacacagaaaaccccagcagccgaagcagtggagacagcatacccgcgtcgtagtgaagcacctacacacaggactattaatactgaaatagcctgcgccctgataccgggagctgacccttgcaacctacgttctgtattaaaacaggctcaggatatcatgcgctcagaccgggaggactggaaacgctggtcgatcacactcggtattatccctgaaatcaagtcatacagtcgtcagactatttttgacgtggtacgcaaagcccctgccgctgttcataacggtagtccggagctgcgccgcacctggtgtgaaagttttctcgcggttcatggtgttcgcgatccggactggtacgagcctgtatcagacgaagcgccaaccacccatgaagaaaactcaaagagagttcgccaggcgggtaagcgcctgcgtgatattcaggcagggatatttgatgatgacgaagcgcaacagcaaccgacaggcgcactggcagatgaaccgccagcgcctgaagcagtggaacagaacacaactgaacatcatccggacccgcagccgctggagaatgagccacctgtaagccagacagaagcaggctaccagaaaatacgggcagaactgcacgaagcacgtaaaaacattccacccaaaaacccggttgatgttggcaaacaactggcagccgcgcgcggagagtttattgaaggtatcagcgaccctgacgatccgaaatgggttcgtgacgactacagcgcctcaaatgagggcgaaaaaacggaagtggctgctgacgacgccgctgatactgctgattacgttgaccattcagaagaattttcgagccagcctgaaccagaaacgagccattctgaaccagtcgcagaccagatcgaaccagcagcaccggaaaccgaaccaggaagccagaaacccgaaccagtaaccaaagttgccgatgatgtttttgatgtatctgcattctttgcggatgcctcaaagcagggtgaaaaaacagaggttacaccgccaaataacgatgaccgttcgcaggaatgtgcagaagaaaaagcgacgaatgcacctgccacaacggaatcattactgcacgaaatagtacgtttgcagtcaataaataaccagttactggaagcctgcacagcccatcaggaacgggcagaaacccgacacgaaagatttctggaggcgcttttctgcgggataacgtgctttacatcctgctggttggagggtgagagagaagtgaaatttgaagagggaacgggtgattcatga

SEQ ID NO: 378443 - DNA, 225 bp, Salmonella enterica
atgtggagaaaattatttcaggaagcgagatccgccagtcaaaaaccagcaacaccagagcagaggttagtgatgctggctgatctggaaaataccgtaaacagagcggaccgtaatacgcgacacaaccagaaagcagagtttaagaggtgcataacgggctggattgaagcggggaaaaggcaggccatgagtgaaataaaacagcgggagaaaggcgaatga

SEQ ID NO: 378444 - DNA, 192 bp, Salmonella enterica
atgaaaaattttacctggcctgaaaataacgcagtgcgcatgtttcgttattaccagaagctaacggcattacgttctgaacccaataaaacatttagtcttgatatttatcggttcagtaatagcgatgagggcgtaaagcagtgcaagagtaataatttaagcgtcctgtgtggggctgcggaggcgtga

SEQ ID NO: 378445 - DNA, 198 bp, Salmonella enterica
atgaaaaaagacgacttaaagaagttcaggaaaggtatcaaggacgctcagcgcatgctgggaatggccaacaagcgcctgaacgaagggcgctattccgcggcggaagagttcatacggggcgagtctgccatgctacagaagttggctgatgaactgcgtgacgttattgaaatacagcagaccgaaaagcaataa

SEQ ID NO: 378446 - DNA, 228 bp, Salmonella enterica
atgtcttctgaagataatcacaccctaactcttgaagatcgcattaacgcaatggatcttgtaatacgtcatatgtttgaagtaatgacacccacaaaaatccaaaaattctctaccataatcaacttaacgttaaataaattacgtaaggataaaaatagcgatccagaaaaaataaaaggacttgaaatggctcttaagcatatgggtgtatatattaaatcctga

SEQ ID NO: 378447 - DNA, 285 bp, Salmonella enterica
atgtttaacgtaaaacgtaatggcgcaagtgttgaaataaccgatataccgcaaagcatcccgtttagcgtgtttaaagacattgcagataagaccggggcaactgaaacgctggtggcttatgtcaaagacaaagattgctacgaggtggttattcgtcatgacagtgtaaatatggctggctatgttgcatggctggcaatagagacagaacaagaatatgggcaagctatgaaaaaggccgcaggtatagcgacctgtttttcagtttgtatcaggatttaa

SEQ ID NO: 378448 - DNA, 285 bp, Salmonella enterica
atgcgggaagaacttaaccctattgaaaacacgctggttcagtaccccattgatggggtaacacctgcaaaattcggtgaactgattggcaagtccgccaacgccatcgaaatcatgattaagaacgaaaaactgccatacgtggaaatgcgcgatccggcaaagcctcgcgcacgagccgaaaaactcgtttacctgcccgcctacaacgaaggactgaaaaaggcgtactacagcaaacccaaaggactggttagcgcatggcttgagtggttggggctttaa

SEQ ID NO: 378449 - DNA, 549 bp, Salmonella enterica
atgaatataacggagaaaattaaggcaatcagaaaggcggaagggctaacccaagcaaccttttgtgaaataagcaaaattcctctaagtaccctgaaaaattatgagggtggtcatgctgaacctagtgttaacaccctattgctcctgaccaccaatccccgctttaaaaagtatgcactctggctaaccactggcgaaacagcgccagaagtaggccaagtagcccccttatctcctatagatcgagggataaaattacgcgccataagaaaggccgaaacccttactcagcagcagttctctgatttgacggggatagcgcttggaacaataagaaactacgaagcaggccaatttgatgtgggactaaaaaccattgatatggttttagctgtggaacgttttgaaaaatacatgatgtggctgatgaagggaaaaaccaatccgggactaggacaaatcgccccgcctctctcccctgatgggtacgatcattcggaagcagatcaggtttcaaccgaaaccgaccaaaaatctcaccgttaa

SEQ ID NO: 378450 - DNA, 324 bp, Salmonella enterica
atgtatattccaattctggttcactcatacaaaaaaagcgccttgcggcgctttttttctggcgataacttatttgctgccagggatgctgaagcgtttgttgaaacgctcaacacgaccaccggtatcaacaacacgctgcttaccagtgaagaacgggtggcatttgccgcacacgtccaggttcaggtcgtgacccacggtagagtgggttttgataacattaccgcaagaacaggttgcagtaatttctacgtaattcgggtgaataccttttttcatggggaacctcagtgtaaggccgcgtcgctcttccagccctaa

SEQ ID NO: 378451 - DNA, 321 bp, Salmonella enterica
atgaaaaaatcactacttttgataatctgtttatctggttgccaaagtgccttaaacgccactcatccagatattattgggtatacaaacaaaacagtgaaacagtatatgtcttgcatagtggataaatattcacctttagggttttccttatctcaagtaacaattgagggtggtgaatccctccgtttgtctggtggcgttgttgtacttaatgttacgcaggcaggacaaggatctgagtttaaattatataaaacacacactcctatagagttgtatcccaaggctatagacctttctactaccgattgtcgctaa

SEQ ID NO: 378452 - DNA, 375 bp, Salmonella enterica
atgagcagattcacaactccggcaattctcgaaatgctgggccattatttatggcgcgtacacgagccgtttacgttttacctcagcgatgataacagcgatgtgatcgaggttccggcaggcttcgtcacagacctcgccacaataccgcgcatattctggtcactgatgccgccagacggcaaatacgctaaagcggccattattcacgattacctgtacgacaatgcgctacgcacgaagcgggaagccgatcggatattcctggatggaatgacggtgctgggtgtgccgcgctggaaacggacgatcatgtattgggcagtgcggttgtttgggcggggaaactacgaaaaacgtattaagattgcgtga

SEQ ID NO: 378453 - DNA, 579 bp, Salmonella enterica
atgaaaatactggcagcaaaagagggtacttacactgaaagcgggatgattggtgtcatggtacattttgaaggattcgctgatttcattccattcaccgcctctccggatgataccgaagaacacggccgccagctctacgccgacctcaaagccgggaaatacggccccgttactccctttaccgtgacaccagaaatgatcaccgcagcgaaacaggcaaaacacgctgaaatcaacgcgtggcgtgatgcacaggaaaacggaaatattccttttaccctgaatgatcaaaaatgggactgcggtaaagcctcacaaacccgccttgcgcctgttgtggctgttgccaaatcaggcgcactcccgccaggtttcttctggacggatgccgataacattgatgtgccaatgacagcggacgaactcaccgcgctggaggtagccatgcagcagaacatggtgctacagggctttaaaatccacgaacgccagcgccagatgaaagaggaagtggacaaattaacggactataaggcgattcagacttacgccgtaggctggccggaaggaaattaa

SEQ ID NO: 378454 - DNA, 369 bp, Salmonella enterica
atgataatcacaggaaaaagcttgtcgcttcccggcgtaatgccgacagaacagcaggggaacagaagtgatggcggacccaccactgtaaaaacagacggcatcaccattaccggcgatggtaacaccaccccgttagagctggggccgggagaaaaagatagtatcggaggttatgttctggcgagatgcccgtatctttcgggcctcgattatggaactcttattgcaggcggatggttatcaccagcaacatacactcttacctacggaatttcatatcaaggcactttatcgggaacataccggttttgttgcatggcgggaattgccgccccgagcctgtgcctggttcagcgcgtggcataa

SEQ ID NO: 378455 - DNA, 234 bp, Salmonella enterica
atggcaacaacagctaaaacgattggccgggactggcagcagataacggacggcacgcagtctgtactggttcagataacaggttcggcggatgtctgtgacaaccctgtaaaaccgggagacgaccagcccgcgcatagtttcggtaatacagaactgaccatcacgccgccgacagtcatgtggatacgttcgtcatggtttgagggcagtgtccgtgtggtcgtgtcgtaa

SEQ ID NO: 378456 - DNA, 522 bp, Salmonella enterica
atggcaattggttcaggctgggttggttcgcaggctgtggcagaaacagggcagcggtggatgtctgctgcggggtcggcgttaagagccccggcgccgttctggatgagcgcgcttgtcggaaagtcggtaatgggtgttgcatcatatgtcaattctgatggtcaggggtatgacactcttaattacataatctacgatgctatgtatgttgatatcactctgacagcgccattttccggcacggttgcaactaacaacccaaaccttgtggtatccacttctgatgtactctttaaggataacacaacggcgggagtgacttacgggacaagtatcacagcgaccagcaggcaaaggttcttcattggtctcagatttgatatgagtaagccgaacacggccagatacatgccagacacccagtggcagctattgctgaatggtagcgtggtagcaacatatacatcaaccttcatggcgtaccgtacgtttgacacgggtgctgaagaagacctgtaa

SEQ ID NO: 378457 - DNA, 2196 bp, Salmonella enterica
atgccaataatctcaggcgtcttaaaagatggcgcagggcagcctattgccggttgcaccatccagctaaaggcagtgaacaccaccagtgcggtaattatgaccaccacagcgagagtgggcgcaactgctggcgaataccgtattgataccttacccgcccgctatgaagtgacgctggctgtggaggactaccgaccgcaaaaagtgggtatcatcgatgtttacgccgattccccggatggttcgctgaatgattttctgacagcaacaaaagtggagtacctgacgccggatgtgatgagccagtttaagttactggcgcaacagtccagggaggccgcagaccaggcaaacgtcgcatctcagggggtatccgcgataaaggacgccgcagaaactgccgccagtggagcagcgttgtcagaaaaaaatgcagcaggttcagcgctggcagccaggacaagcgaaatcaatgctgcggattcagtgacaaaagcagcggcatcggcagccgcagcgctcgccagccagaacgcggcaaagttatccgaaacgaacgcagggcaaagcgcatcagatgcggcgttaagtgtgactaaagccgctgatgcagcactccgttccggaaagtctgcaacagacgccgcaggtcatgcaactgacgcacaaacagcagcaacaaatgcagccaccactgcagcagccgcgaagggcgacgcaacgaaagccgcgctgtccgcgacaggcgctacagcggcaaaagatgcagcggtcgctcaggtgacgggttttgatacgcatgtcagccagcaaataacggttatcacacaggcagcaaccaccgccaccacaaaagcgaatgcggatatcgatatcaatcgcaacaacgcaatactggcgattaaccagaagcaggcagaagcgaccagtgccattcaggcgagtgttgatgcggccgcgttaagtgagcgcaatgctcttggttctgcgacagcagcaaaagcctgccaggtagccgccactacttccgcatcaggtgcgaatacatctgcaattgcagctcaggcttcagcgacagcagcaaaagccagcgaggacaggtcggtactggcggaaatccacgcgggtgggtcagcaggttcagcatcaacatcagcagcggcagcgaaggcgtcagaagatgcagccggagtgaataaaatcgcaacggaactggcccgttcggcagcacaggccgcgctggaagaagcgaggctgatagccaaaactccgggaccagttggtccgcaggggatacccgggcccgttggcccacagggtattcagggtctgaagggtgatacggggccagcgggtccacggggcctgacgggtccggtcggggcgcagggtccggcaggattgcccggggcaaaaggtgatactggtccggtgggtcccgcaggaccgcaaggtattcagggtataaccggcgcaccaggaccgcaggggttaactggtcccgcaggtccacaggggttaagaggattaacaggcgctcaaggacttaaaggtgataccggcgcacccgggccaacaggttctgtcggagctacaggtccgcagggtattcagggtctgaagggtgacacggggccagcaggtcccgctggcgctacaggtccgcgaggattaacgggtttaacggggccagctggcgcaccaggaccaaagggtgatatcggtccggtcggtccgcaagggctcacaggtccggctggtccttctggtccatccggtcccgttggtccacaggggccgcgcggttttaccggaccggctggcccggcaggtccgacagggtcggtcagtggaacggtgtatggtgatttgacggtgacgggtaacacttacgtcaacgacacctatattcgttctgaccgccgcagtaaacgtaacttccgtacaatggataacgcgctggacagggtggataaactgaaaggccagttgtacgaggttcagactggcggaaagttcgtacgttctggcggtcttatcgcgcaggatgttcaggctgtgctgcctgacctggttacggcagataaagacagcgggcttctgcgtctgaattataacggcgtaaccgggttgctggttgaggccgtgaaggaattacgggcagaactgcgacagttaaaaggagttgcgtaa

SEQ ID NO: 378458 - DNA, 153 bp, Salmonella enterica
atgaagccacaaaaactggcgctgttagcgctaatcgttgtcagtatcacgcttctcggcgtactgttgctgaataacaaaaccctctgtgacgtcagcttccgaagcggcggaacggaggtggtggctcacatggcctacgcatccaggtaa

SEQ ID NO: 378459 - DNA, 753 bp, Salmonella enterica
atggcgtttggtatttatctcgaagacgagtacggcaacccctggtgctgggacggaacccgtaattttcagcttatagagacgcacagctataacggtgttactacggggagcaattacgataccgggatcagtgcgtcacgtccgtgttttttgttctggcaggtgacgtggacgccggatattaccagtattcccatgatgttctacgggaagaacgcaggcggaaactggtattaccggtttgataaagatgctgacagtccgggctgggacagcaacgtgaatgttaaaatctttatcttcagtaattacgcgccggtactccctcattatggcatcgctatatgggatgagcgcgaggaactggcgttaaccagtgaatcaaaactactgcgaatagccggaaccctggactgtcgtgttattggtgagcgccgggcaatagcaggtagttacgcgattatgccgatgagaacaggcaatgcaatgtttaacaacctggggctggatgcggtgactggagatctgtcggatgaagcgtcggatgtggattttggtacatcggcgcacattgaaggcggcatcactgtgctgacaaacggactggcaaaaagtggcgatccgaacagttgggggcacgtcagtatcaggggagggcgttattcctggtttgaattgctgtatgggccggaaggtaaaaacattattaacacgccgataccgtatatcaatgccgctgaatatatttag

SEQ ID NO: 378460 - DNA, 357 bp, Salmonella enterica
atggaacgctacggaatacaggtgtgggatgagaacggcaagtccaccgccacggggatcacgcctgttcttatactcgattattttaaggtagtccccggacaggtatccggaacccgtttttatccggagttgccggcaggcgcgagaattaattttttcgcgtttccgtctgacggaggctcaggcgggggagggatcagccggacaaatcgaataagaggggtacgtatcaacgggaaccaggtaattattgaagagctacccaacccgcaggccgggagagaagcgctgccgtgggacatgagtattgattcggagcttgatgtggtggtctacgtggagaaagtttactga

SEQ ID NO: 378461 - DNA, 3210 bp, Salmonella enterica
atgtcaaaaggaggcggtaaagggcataccccctatgaagcaccagacagcctgaagtccacacaattactgaccaccattgacgccatcagcgaaggaccgataaaggggccggtgaacggtatgcagagcatactggtaaacaacacaccactggtggatgcggatggaaattacaacgttcacggtgttactgtcgtttatcgcgtgggcgaacatcctcagacagcgctggaggggtttgaagattccggcgcggaaaccctgatgggcgtggagttaaaacacgacagccccattacccgtacgatcacctcaaaagaaattgaccgcctgcgttttacctttggcgttcagtcgttagtggaaagcaacgacaagggcgaccagaacgaaagcagcgtcaacatgcagatccagtttcagataaatggcgtgtggcaactggtgaaggatatctatattcacggcaaaaccacgacgcagtttctggcgtccgttgctgtcagtaatctgccgccgcggccgttcaatatgagaatggtgcgtatcactgacgacagcacaaccagtatgttacagaacaaaacgctgtggtcgtcgtacactgaaattatcgatatcaggcagacgtaccctaatacggctgttgtgggtctgcaggtggatgcggagcaatttggcagccagcaggttacggtcaattttcatctggaaggccgcgtgctgctggtgccgtcaaattacgagcccgtatcaagaacttatgccgggttatgggacggtacattcaagcctgcgtacaccaacaaccccgcctggtgcgtgcttgatttactgacgcacccccgctatggcatggggcaacgtatcggtatttctgacgtcgataagtgggcgctgtatgccatcgcgcagtattgcgatcagatggtgcctgacgggttcggcggcatggagcctcgtatgcgctgcaacgcctggctgacgacgcaacgaaaagcacatgatgtactggcagacttttgttcgctaatgcgctgcatgccggtatggaatgggcagaagatgacttttgttcaggaccgaccagcagataaggtctggacatataccaacagtaacgttgttggcgggcagttcaaatacagctttagcgccctgaaagaacgccacaatgccgttgaggttcgctatgtcgatccgatgaatggctggaaaacatctacagaactggttgaggaccacgcggcgcaggttcgttatggtcgcaatgtactgaaaatggatgcgttcggctgtacatccagggggcaggcacaccgcatggggttgtgggctatccagactgagctactggaaacccagaccgtggatttttcagtgggtgcggaagggttacgccatacggttggcgatgtgtttcaaattcacgacaacgattatgccggcgcttccattggcgggcgaattgttgccgtggatgtggcggcgcagacgctgacgctcgacagggaggttgaaataccggagcgcggatcggcaacgttgagcattgtcggcagtgacggcctgccggttatcatgacggtgatatcacatccggagccggataaaatcacggtcaatgtgttgccggagggaataacggctggcggtgtatgggggcttaaactcccgacattacgcagtcgcctgtttcgctgcgtagtgatccgcgagggtgaaggcggcacgtatggcattaccgccgtgcagcacgtaccggaaaaagaagccattgtggataacggggcgcattttgatctgctgtccggcacacttaacggcgtgaccccgccagcggtacagcatctcgccgtggacacttccgcagacagcagcctttaccaggctaaggcgacatgggacacgccacgcgttatcaagggtgtgcggtttattcttcgtcttactgttggcgcgggaacggaagaagaccccacccgtctggtgacgaccgcgacgaccagcgagaacgagtatatcttccatgaacttccatacggacactatacccttaccgttagcgccatcaacggctatgggcagcagggcgatccggcgtcggtggagttcgatatcgacttacctgaaccgcctgattttatcgaaatcacgcctgcctactttagcctcacggttgccccgcgccagaaagtctaccatccggaagtatcctttgaattctggttctcggaaaagcagttactgagtgaagatcaggttctggcggaggcgcagtatctggggcgcggcagcatgtggataaaagacggtctggtattgctcgggacggattactggttctacgtgcgcagcgtgaatctggttggcaagtcggcatttgcggaagccagcggccaggtaaaaagcgatgccgaaggttttctggagctgatgaaggggcaaattaccgccaacctgcttaaccgtgaatttctcagcaccatcgagaacgacacggtgcgccgtgagtttgaagccgcgttgcggatatcagaaaccaacgtacagcagcaactggagaccctgaaaagcaccgtcaatgtgagcgtggccgccgaactggagaccatcaaacggacggcagcaaatgagcacaacgccgttgcgttacagatgagcacgctgcagacacaaatcagtacggatattaccagcaggattgaggcattacagcgggccagcagcaccgcagaaggctcgctgacggagaaactgacgcaactgagctccacagttaacgggcagggggcaaccgtccaggaaatcagccgggcgcaggccatgctcaacgacacggttgccgcgctgaaatccttccgtgttcagtaccaggcgaacggtaaagcggctattgccggtattcagttgtctgccactgctgtacaaagcgagatcctgatgatggctgacaggttcgcgtttctgaatccttataacggttcggtcgtgctgccgtttttggtgcagaacggacaggtggttctggctgatacgtttgtgaagtcgctgaacattaacgatcgcttcgtggtggatactgcgggcaacgtgcaaatcagggacagcgcaagaaacgttggcatggtgataaccaacagggcgattaaaacgtttgatgactacagcagaaagcgggttcagcttggcgatctactggcgtaa

SEQ ID NO: 378462 - DNA, 597 bp, Salmonella enterica
atgagtgaaggctggtatcagatacgcattgccggagaagatgtatcggaagagatgctctcagcaaagctacatgagccattaccaccaggtgcagtgatccacattgtgccgcgcatggagggggcaaaaaatagcggcgcgtttcagattattgccggggccgcgctgattgccgcctcattcattccgggacttaatgttgcggtatgggcaggaatggcggcgacatggagcagccttgccttctctatcggtgccagtcttatgctgggcggtgtggcgcagatgctggcgccaaagcctcatgctccctcaatccatcatgccgacaatggcaggcaaaacgtttacttctccagtctggataacatgattgcgcagggcaacccgctacccattctctacggtgaaatgctggtgggttcaaggcgtatttcgcagtcgctgagtacgcgggatgagagttcgccggataagattgtccattatggaaggaaagggatctttggtggactgtcggggaaactggaagacaaggctaacgcggcgctgacggcgcagggcatcacaaagcccagggtactgatccggtaa

SEQ ID NO: 378463 - DNA, 738 bp, Salmonella enterica
atgattaacgatgacattctggcgcatgcccggcagtgtgcgcccgcggagtcgtgcggctatgtggtcagaacaccgcagggtgagcggtattttccctgcgaaaatctgtctgctgaacccacgatgtattttcgcattgcgccggaagcgtacctgaaagcacaggcagccggtgaggttatagcgctggtacacagccatccgggcggtaaaccttatctgagcagcggcgatcgtacgctacagttgcagacggcgcttccgtggtggctggtatgcggagataaaattcataaattccgctgcgtgccacatcttacaggccgtcagtttgagcacggtgtaatggactgcgggaccctggtcagggatgcataccatctggctggcatcgaacttaccgattatccgcgtgaagatgactggtggagtctcggcaaaaatcactaccttgacaacatggagcgggaaggattttaccggataaccccggatgaggtgctaccgggggacatgctcttatgttgctttgcttcatcggtcgccaatcatgcggcaatttattgcggcaacggtgagcttcttcaccatgtgccggggcagctcagtaagcgggaggtttacacagaaaaatggcagcgacgaacacactcgatatggcggaatcgccagtggcaagaatctgccttcacggggatcttgaacgatttggccgccgcttcagcctcagcataa

SEQ ID NO: 378464 - DNA, 696 bp, Salmonella enterica
atgcaggacataccacaggataccctgaacgaaaccaccaaatctgagcagcctgcgaagctggacttgtgggaaatcgatcttacccccgtgggtgggcagcgttatttcttctgtaaggaaccgaacaaaaaaggcgagccggtaacgtggcaggggcgcaaatacgaagcgtacccgataaatgcgggtgatttcgagatgaacgctaagggaccggatgccagacctacggtcattatctcgaacctttttggcctggtaacagggatagcggaagatctgcaaagtctggtgggtggcgtggtggttcgccggcaggtgtacgagaagtttcttgatgcggtgaactttgatggcggtaatccggatgccaacccggaacaggaggcggtggcgcgttacagtattgagcagctatcagaactgaccagcctgaccgcaacgtttgtccttgcttcacccacggaaacggatggctccgtttttccggggcgcatcatgctggcagaaatttgtacgtgggtttatcggggagaggattgcgggtataacggtccgccagtcgccgatgagttcgacagaccgaccgcaaatccggctgaagacaggtgcagtaaatgtcctcacgcgtgtaaaatgcgcagtaacatcgccaactatggcggattcctttctatcaataaactttcatag

SEQ ID NO: 378465 - DNA, 330 bp, Salmonella enterica
atgagaacttttcactggaaagttgatcccgaaatgggcgtggattcagaaccacaggtgtcggtggtgaagttcggtgacggatatgagcaacgccgcgcagcagggataaataacgatctgaaaaagtacagtgtaaccatccgggttaaccgggaggacggtccggtacttgagggctttttgtcacagcataacggcgtgaaggcgtttttgtggacgccaccttacagataccgtcagatcaaggttgtctgccggaaatggagcgtgaaagccgggctgctgaagacgaccttcactgcgacgtttgagcaggtgatttcgtaa

SEQ ID NO: 378466 - DNA, 3096 bp, Salmonella enterica
ttgagccagaaagtcggtgatatcgtcatcaacatggatgttgatacagctaaagtcgctgccggtctacagacggccagtaacgggctgagtaagctggtggacaacagcgatctggtggagaagcgcatacagcactgcatggaatccagcgccagaagtgtggccgcgtcggcaaaaagcatcgatatagccatgtcgcagtcacaggttgccacgcgggcacagagtgatgctatggcacaactggcgcgtgaagtggacgaagccagggagaaggcggttgcgctcaaccagaaattgcgggcggaagctgcacaatcagccgctgttgctcaggcacaggatctggcggcggcggctttttttcgccagctagacagcgtaaaacaactgagcggtgggctgcaagagctgcagcgtattcaggcgcaaatccgccaggcaaaaaacaccggggatatttcgcagggcgattatctggcgctggtatcggaaagcgccgcaaaaacacgcgaactggctgatgcagaagcgctggccacgcagaaaaaagcgcagttcattcggcgcctcaaagagcaggctgcagcgcaaaatctttcccgtactgaactgttacgcgtcaaagccgctgaacttggcgtcagtaatgcggctgatatctatatccgcaagctggatacagccgcaaaatcaacccatgcgttagggcttaaatcggcaatggcccgccgcgagatcggcgtgctgattggcgaactggcccggggtaactttggtgcgttgcggggcagcagtatcacgctggctaaccgggcgggctggatagacaagttgttcagcgcgagaggtcttgccgttggtgggcttgtaggcggtgtggctgctgcagtgtacggactcagcaaggcttacctggaagggcagaaggaaagcgaggagttcaataaacaactcattctgaccgggaactacgccggaaaaactaccgggcagcttaacgagatggcgaagtcgctcgccggtaatggtgttacacaacatgatgccgcgggtgtgctggcgcaggtggtggggagcggggcatttacgggtccggcagtggatatggtatccggaaccgccgccagaatgcagcaggccgtggggcagtctgttgatgagacggtcaggcagtttaggcgcctgcaggatgatccggttaacgcggcgaaagaactggataaaaccattcatttccttaccgcaacacagcttgagcaaatccgtgtgctgggcgagcagggcagaactgccgacgccgcgaaaatcgccatgtccgcttattcggaagagatgaataagcgcatgacggatgttcacgataacctcggatgggttgaaagggcatggaacagcctgggggatgcggcgaaatgggcatgggatcggatgctggatatcggtcgggaagactctctcgatgaaaaaatagcgaaattacaggaaaaaataaaaaacggcggccagcagattggcaaggcgtttattcctgttacacagcaggacagggataaccttgctgcgtggcaggaggaaaagtttcagaaaaacctgaaggatgcaaaggataaggccgaacgtaattatcaggaaacacagaaactacgtaacaaggaaaacgccgctcttgatcgggaaaatgaaaccgaggcgatgcgccacaccagggaaattaaccgcatcaatgcaatgcagtacgccgatgcgtcgaagcgtaatggtgccattgagcgtgaaaatgagcgtcataaaaaggcgatggagcgccagacgaaaaagccaaaggcttaccataatgacgaggcaagccgcttacttctgcagtacagccagcaacaggcacaggttgaaggccagatagccgctgcgaagctctcaacgaccgaaaaaatgacggaggcgcataagcaactgctggcgtttcagcagcgcatcgccgatttgtccggtaaaaaactgacggcagatgagaaaagcctgctggcacacaaggatgaaatagcactggcgttacagaaactggatatctcgcaacaggatctgcagcatcagaatgccctcaatgagctgaagaaaaagacggttcagttaaccagccagcttgctgaagatgaagctaaagtccggcagcagcacgcactggcactcgccacaatgggtatgggtgacgagcaacgcggacgatatgaagaacgcctgaaaattcagcaacagtatcaggataagctggagcagcttaaacgcgacagccgggcaaaagggacgctcgaatcagaagaataccgacaggcagaacaggcactgcaggacagtctggatcgtcggctggctgagtgggcggattacaatgcgaaagttgatgcctctcagggcgactggacgcagggcgcgtcgcgggcgctcgataactttctggcgcagggaagtaacgtggcgggcatgacagaaaatgtctttgcaaacgcctttaacggtatggccgacgccgttgcgaactttgccacgaccgggaaatttaacttccgcagcctgacggtatccattctggcggatctggcaaagatggaggcgcgtatcgctgcctctcaggcgctgggagggatatttaagtggggaatgggactggctggggcgggagctggcgcagcaggaacgggcgcaaatgccattcagagttacggtgcgaatttcagctttaatgctaacggcggcgtttaccagtcgtctgatttgagccgtttttccggcagcgtggtcaacagacccacgttttttgccttcgctaagggagccggtgttatgggagaggctggcccggaggcgatacttccgcttcgccgtggcgctgacggtaagctgggggttgtggcgtctggcggcggtggtatgaaaatgtttgcaccgcagatcaatatagaagttaacaacaccgggcctgagttaagtccgcaggtgcttaagatggtctatgacgtgagcaaaaaggccacgcttgacgccatgcagcagcagggacgggatggcggcagactgagcggggcatatcgctga

SEQ ID NO: 378467 - DNA, 330 bp, Salmonella enterica
atgaataatgagcttcattttgtccggcaactggcccgggagttccggcggcctgactggcgccggatgctggccgaaatgagttcaactgaacttggtgagtgggctgatttctttcgggaaaacagtttcagtgatgccctgctggatgctgagtttgccacactgaaggtattgataaccgggctggcgaccgggagcactgttgcagcagagggctttagtctggtcacgcctttgactcctgaaccagacaggaacgaaagcgatctcattgaggctgcgacgggtattttgggaggggtgagatttgagccagaaagtcggtga

SEQ ID NO: 378468 - DNA, 399 bp, Salmonella enterica
atgtttttaaagaaagatacccttaattatggtgatgattctgttgagctgcatgagctttcagggttacagcgtatagagtacctggagttcatccagaaacgcactgcgaaatatgacacggatatggaaggcgcaacggaagcggataaacgtgtggcttatatacaaatggcgctggagattaatgcctggctggtatcccgctcactccagaatagtgatttgacccaggatgcggacactctttatcagtcagtacagatgcggtggtcctatgaggcactggacgctggtgcggaaatggtgttgacactcagcgggctggctgtgactgagaaaggtaaggcaggcaattcaggcgaacagcaggaggatatgacgccggaaaagtcatga

SEQ ID NO: 378469 - DNA, 741 bp, Salmonella enterica
atgacagtacctaatccacttgcgccagtgaaaggcgcgagcacaactttctggatgtatagcggctcaggcgagccgttttctaatccgctcagcgataataactgggctcgccttgcgatggtaaaagacctgcagccgggggagctgacggcagacgcggaagataataattatctcgacgatgtgaacgcggactggaaaagtacgacacagggacagaaatcagccggagaaacgacggtaacgctggcatggaaacccggtgaagatgtacagaaaaaattgctggcgttgtttcagtcaggcgatgtacaggcctggcgcattaaataccccaacggcgttgtggatgtattcaggggatggataagttcgctgggcaaaaccgttcagagcaaggacgaaatcacccgttcggtaaaaattaccggagtggggaaaccttatatggcggaagaggatgcgccggaggtggtgaatgtatcggggatgacagttgcccccgctaacgccacggtcagcgttggtgccacaacaaacttcacgtttacggtaaaaccggacaatgccacagataaaacgctgcgtattgcaacctcagatccgacgattgccacggttactcaggctgataacgttgccacggtaaaaggtgtgaaggctggcactgtgaaaattattggtctgacatcggacggcaattttaccgccattgcggatattgccgtacaggcgtaa

SEQ ID NO: 378470 - DNA, 402 bp, Salmonella enterica
atgacccggcacagcgcaatacggcaggccattattgccgcattaaaagagaatgatgatggcgccaccacgttttttgacgggcggcctgtcgtggtggaagaggatgagttaccggcggtggcggtgtatctgagcgacgcgcagtgtaccggcgcagatgtggatggcgatgtctggagtgcggtactgcatgtggaagtttttctgaaagccgcacagccggatggtgccctggatgaacagatggaaaaccgtgtttacccggcactggcgaccgcgacaggactggctgacatcatcacgataatgtcagcccggggatatgactatcagcgggacgatcagatggcaatgtggggatcggctgatttgacttacgacattacctataccatgtag

SEQ ID NO: 378471 - DNA, 567 bp, Salmonella enterica
atggaggttaaggggctgaaggaagctatatcggcactgaaggaaatcgacaagggatatgtaacccgggcaaaaatcagggctgttaaccgggtggcaaaacgcgtggttagcgtgtccgttcgatccgctgccgcgcaggtggtggccggagataatcatcaccaggggattcccgtcagaaccatcaggcatcgcgctaaagtcaggctggccagagcggacaagccttttgccaacatttacgtgaactgcaatccgctgaccgccatcaggttactgagttcgccaccatcagctccggtgaagggaaaaaaaggtaagccgctacgtatcggaaaataccgttttgaccgggggtttattgcgcaggctccgaacggattctggcaggtgtttgagcgcgagggggaatcaagatatccgctgaatgtggtgaaaatcccggtatcagatgcgttacaccaggcatttaaaacccagaccgttttgcagatgaaaacggaaatgcccaaagagctggcgcatgaaatcagttatgaactgaggagatttactaaaaaatga

SEQ ID NO: 378472 - DNA, 258 bp, Salmonella enterica
atggatgcgctgacagcaaaacgttttggagtgacggtaagtatcaacgggaaagactgcgtagcggtggaatcagatttcctggcggagttcggcccggttgaaggtaatggaaaaaatctggtgattttcacgcgcggaatgacaccgcgtaagggggataccgtggtgtttcgtggtcgcacatataccgcaaacagaatcaggcgttttaacggtaagccacagataacactggaggagagcgatggaggttaa

SEQ ID NO: 378473 - DNA, 324 bp, Salmonella enterica
gtggctaagaattacgtggaagacggcaaaacgattgaaattgtggcgaccacgccactaaagagcggagacctggtgcaggtcggcgacatgttcgctgtggctgttaccgatgttgccgccgggagcgtcggaaccggtattgcagaaggcgtgttcagcgtaccaaagctggcaacggaagatattgcgtccggaaaaaaagtgtatttgaaggatggcacagtacagacaactgcgaccggaggagtgccgtttgtcggcgtggcatgggcgtccgctgtaaacggcgatgagtctattccggtaaagctcaatggctga

SEQ ID NO: 378474 - DNA, 846 bp, Salmonella enterica
atgtcagaaaacactaatgctaaccctgaagtcctgactgatcataccgatatcattttttccaccagcactgaacgtatcgttaccgggcgtaacgctgcacttgaacagatcagaaccgtgactgagctgattgcagaaatatcggcgctgaccagaagcatcggcggcaaaaccgccctggactggggcatgaagcaggattttcgctgcggctgctggctgctggaaaaaccagaaaccgcgatgaaagccatcacccgcaatctcgacagggagatatggcgggacctgatgaagaaatcgggaatgttgtcgattatggatgctcaggcccgtgaccagtggtacagaaaccttgaaagtgatgatattccggccatcagtgaagcgaatattctcagtacctttgagcaactgcaccagagtaaggatgaggtgtttgaacgcggcgtaatcaatgtgttcaaagggttaagctgggattataagtcaaattcaccgtgtaaattcggaccgaagatcattgtgaacgggctggttaaatacgaccggtggggatacagcctcaactggggctggcagcgtgatcggttagcagacctggagcgtatgctgatgctgctggacgggaagcccgtccctgataatcgtgccgatgtgacccgacgcctgggcgatcacattcatgagaacagaggaagtaacagttacgaggacgggatgtttaaaatcaaatattttcagaagggaactacccatattaccttcagacgaccggaactggtggacaaactgaacgatatcatcgccagacattacccgggaatgctggctgcgcaataa

SEQ ID NO: 378475 - DNA, 195 bp, Salmonella enterica
atgccattaaccactgaagaagggctgcagatcctgatctgctggctgcaggacaatattgactgtggtacggaaatcatcttcgataacgacgatactctcaacgattcagcagcactcctgccctctgttgaacaggccctgaacgaggtccggatggtgcactacctccggcttttactttctccgcagtaa

SEQ ID NO: 378476 - DNA, 342 bp, Salmonella enterica
atgaagctgtccatgaccgtggaagccggtgcgattaacgtccgggccctcaacatgggccggatcgtcgtggatatcgacggtattgaactcgccagcctgatcgacgtggtctgtgataacgggtattcacttcgcgttgctgacgagcccggaaagctgattgttgaagatccgcttccgcctgtcgcccgcgttaacggcattcagtgcagcaccgcatatatcacggaggaagacaatgctctgctgtttaccctttcgcaccagcatgaaggctttggcgaccaggaatggatttcgtacaccggatcgggttatctgctctacctgggcgcgtag

SEQ ID NO: 378477 - DNA, 378 bp, Salmonella enterica
atgcagattttaccctcactcccgcccggggcgacttcgtcacaccccacgcctgtcggcatctggcagtccctgctgtcgcatctgctgcaacagcattacgggctgacgctcaatgacactccgtttgctaacgacggcgtcattgagcagcatatcgacgccggcatctccctgtgcgatgcgctgaacggtatcgttgaaaaatatgacctggtccggactgaccgcccgggattcagtattgcggtgcagtctccgttcattacccgtatcgatattctccgcgccagaaaagcctgtggcctgatgaaacgtcgcggctaccgggccgttactgacatcaccaccggcagatacagcggggtggcacgatga

SEQ ID NO: 378478 - DNA, 648 bp, Salmonella enterica
atgagccgggtcatttccaccacggtgtatctgtctgatgaactctcagagtctgcccgcgagaaggcacgcgcctggtactgcgaggagggtgggctggagtatgagtggtacgacgctgtttatgaggatttcaccctgatttgcaacatcctgggggtgagactcaaaacacgtaccttcaccaccaccggcggcagatcccacgaaaaagcctgtatctggttttccggtttctgctgtcagggggacggagcctgctttgaggggatgtaccactatcagcccggagccgcacaacacatcagacagcatgcacctcaggacgaagcgcttcaccgtattgctgatgagctgcaggcaatccagcagcgtaacctctggcagcttcaggctgatattcagcatcaggggcgctattaccatgaatacagtatgcacattactgttgagcgtgactcccccaccggccagcaggccaccgaagacgcagacggtgtcctgggtgacgcgttacgcgacctggcccgctggttatatctgcaactggaaacggaatacgactggctgacctcaccggaagccgtggatgaggcgcttatcactagcggttacaccttcaccgaaaccggccagcgcttcggttaa

SEQ ID NO: 378479 - DNA, 372 bp, Salmonella enterica
atgacaaagaccacaaccacagtacatgacctcacgtctccctggtggggactccgccgcgatatgtccccgtgttttggcgcacggctggttcaggagggcaaccgactgcattacctgtccgaccgcgccggcatcactggtcagttcagcgacgcggatttacgccacctggaccaggcctttccggtactgctgaaacagctggagctgatgctgctttccggtgagcttaatccccgccatcagcactgcgtcaccctgtatgcaaagggactggtatgcgaggccgactccctgggctctcacggctacatttatgtggcgatttaccccggagactcccctgaaaccggaggtatggcacgatga

SEQ ID NO: 378480 - DNA, 369 bp, Salmonella enterica
atgtcagataatcctgaccgcaaacaaccggataatcactcagtcccctgcatccggggccgtctgctgcaggacggcggtcggttccgtttacagaccagcagggacgatatcagagcggtattcacggaggaggaagcccggtggctggagcagaccttcccgctgatattacagcagatggtcacgatggtgtcccccggctcaccggaggcacagacaccacatgtctttcaccacaacgggctgacctgtgaatcagaacccggtccacagggcgctgtcagcctgatgatttacccgacacctgatgaatcacccgcgtcagaggagcccttaaatgacaaagaccacaaccacagtacatga

SEQ ID NO: 378481 - DNA, 222 bp, Salmonella enterica
atgaaaattatcagcaaacgccgggcgatggcgatataccgccggcatccgcagtcccgtctgtttcgcttctgtaccgggaaatatccgtggtccggcagcgtctgtcactggtacgaccgggacgtacaggatatcagcggcgtactggccgtgtacgctgaacggcgccgggaccgccacggcccgtacacccgcctgatgtgcgtcaccctgaattaa

SEQ ID NO: 378482 - DNA, 291 bp, Salmonella enterica
atgaaaaacgatgaaacgcaggttatacccgctgatattttcagtggcgtgaccgttcttcgcctggagaacggggatgaagcagtttatatacacggccttttcctggagtgtgccgatatcgcgcagggcgacaggcctctcacggatattgctgcacgcctcgccgggcttctgaagataccgttcagacagataacgctacctgtcccggaggatgaggagtggtgctggaatgatattgttgatgccctgctgaaaagtaccggctcaggcgggcccgccgtatga

SEQ ID NO: 378483 - DNA, 480 bp, Salmonella enterica
atggaacaacaactccccctgtttgccaccacattaccggcatccgcacaacagaccatccgggaagccttaaccctgctggaaagccagttacgcgagcccggggcggcatttacctccagccatgctgtccgggactggctacgcctgcaactctccacaccggagcgcgaagaatttaccgtgctcttccttgataaccagcatcgccttattgctcacgaaacacttttccagggcaccatcaatcatacgcaggtccatccccgcgaagtggtgaaggccggtctgaaacataactgcgccgctgtcattgtggcgcattgtcatccgtcggggcttgccgaacccagccaggctgaccgtcatataacagagcgcctcagacaggccctggaccttgtggacatccgcctgctggatcacctggtggttggcggcatggagatcgtctcgttcgctgaacgcggctggctttaa

SEQ ID NO: 378484 - DNA, 477 bp, Salmonella enterica
atgaccacagcacataacccgaccgacacttccgcccctgaacttatccctgttcctgatgaaaccctcatcaccgccacgcccgtaccggatgaggaccgccctgatttctggccccgctacttccggggcgttccacagtggatattactggagccccgtatcttcgcatggactgaccgcctgtgtgcggattaccacggcggtatctggcagttttatacgctgagcaacggtggcgcgtttatggccccggaggcggatgacggggacgccccctggtcactgtacagcgtcatgaacggcaacagcgcggacatgggccctgaggctgccggaattaccgcctgcctgctggagtacagccaccatgcctgccgtaccggtagcgacctgatgaccgcgcactaccaccgcctgcgggattatgcccttaaccatcctgaatgcagcgccatcatgcatatcaccgactga

SEQ ID NO: 378485 - DNA, 384 bp, Salmonella enterica
atgggactcgatttatatttcattaaacgtccggctgaaaccacagcagacaccacccgccgggagcaggacgaagccgtcgggtattaccgcaagttcaacgccctgctcaactggattgacgccaacgccggggaggtggagaactgcactgatgtccccctgacccgccaggacctggaaaaactccgggccaccctcagcaacctcacgccggaaaactgcaacgacctgttcccgaccaccgaaggcttcttctttggttcgcaggagtacgacgacagttactggtctgacgtggaaaacctgaagctgtttgtacagcaacaactggcatcgtttgatttcagtgcccaccatctgtgtttccacgcctggtggtga

SEQ ID NO: 378486 - DNA, 264 bp, Salmonella enterica
gtgctgacgtatcgttttggtgaagagcaccagcctgtgaccgcatcgcagatactgacgccacgacgttatgaagaccgacagaacgacctgtggtcggttttcaatcgctgccaggaaaacctgctgaaaggtggtctgcccggacgtaccgcgaaggggaaacgcagccatacacgcgccgttaaaggtatcgacggtgacgtcaggctcaacctcgctttatgggtgatggcggaacaactgcaacaggcgctgagctga

SEQ ID NO: 378487 - DNA, 561 bp, Salmonella enterica
atgcaactagccagccgtttcgggcggattaaccagatccgccgcgaccgccccttaactcacgaagaactgatgcagtacacccccggcgtgtttggcgaggataaacacacctcccgctcagagcgctatagctatataccgaccatcaccctgctgcaaaatcttcagcgcgaaggctttaaacccttcttcgcctgccagtcccgcgtgcgcgacccgggacgacgggactatacaaagcatatgttgcgcctgcgtcgtgctggtcagataaccggccagcaggtaccggaaatcatccttcttaacagccatgatggaagcagttcatgccagatattgccggaattgttcagagcagtctgttgtaacgggctcgtctgcggacagtcgttcggtgagattcgtgtgccacatcgcggcgatgtgatctgtcaggttatcaaaggcgcttatgaggtacttggtgtgtttgatcgggtggacgaaaagcctgaagccatgcagtcgctgttacttcccctaccggcacagaggcgtttgcgaaagccgtgctga

SEQ ID NO: 378488 - DNA, 171 bp, Salmonella enterica
atgcaacaggaaacaccaccattaccggactgcaccctggatctggttgtcggagccgtcggaatggtgctgatacgcagtaacacgattttcgtccgggcgctgggtgtggccatcaccacattctgtaccctccacatactgaaaaaaatggcagaccttgcagattag

SEQ ID NO: 378489 - DNA, 804 bp, Salmonella enterica
atgcataaattaattgctttatcactcagctcagtagcgctgcttatcccatcaatatcttctgcactgacggtccatggtgaggttcaccctgaacgttatacctttttccttactaaagaagggagtgagcaactgaagcaggcgaatgatctgctggcgaagaatccccaggcctatacgctgaacgtgaaccagaccggcatccagccctttgacgccgttcgctgggacggaaagcccgtgaaagctgtgacctgcgtcctggtggatggtgtcgctttcggaaaacgctcaacctggtcacagtgtaaagacgaaagtggcgctgaatactttggtaatgccgggtggccggtacgtgactatgtggcaaaaacgtgtgaggtgggtaaatcagactgccctgtttatcttgtattccagacagatccaccgactatgagaaacgatatggtcaaatttaaccctgcaccaaagaactttaatgcttctgcagacttaacggatgaaattaaaaacaacggatgtcagatggctgacaattcctttgaatatgcaaaaagcagtacccgctgttccgcaatcaacaccgtacgttttatccgcaaacaaaatacagaagccacttatgaggctgatctcaccaccacttctggtgaaaagctgactatgaccatagggtatacctacggggatccgggcgctaaagagccgggctggcgcaccatttcagtccctaacggcggcattattactgacatccgtaaacaggggcagtggctccctaatggctacaaataa

SEQ ID NO: 378490 - DNA, 234 bp, Salmonella enterica
gtgcgaaaaaccataacggcactgcttgtcagtgcagctttattcagtaccgctgcccatgcagtcatccaagaccaacaatgggaagactggtacggcaacatcagtgccatggagtttgagatcaacactcagaatactgccggcgaagtgctcacactgacctgtacaagcggaaagctggctgttgcttatagcgtacccgcagaggagactaccgcgtttcttccttaa

SEQ ID NO: 378491 - DNA, 636 bp, Salmonella enterica
atgaaaccatacatcagcaaattgcatggtccatgcaaccagcatcatataaatcgtatccatgatacgttaagtaaatcgcttagtacacatccaaggacgtatgttcgaagaatagatttaagaataccagatgtgtgttatgaacaataccgtacagactctacactgataactcgttttatggaatcactgaagtctcagattaaacagacacaaaagagaaagcgaatggaaggcaagcgagtacatccttgcaatgttcgttatgtctggtcgagagagtttggtgatgaaagaggtaaaaaacatttccatatcgccctgatgctgaataatgatgtgtactgcagtacgggtacttactgccctgtcggtgatatgtatatacataacctggcactgatgataatggaagcatgggtaagaacattaaaccttcatacacagcctgattatcaacagtattatacgcaggtacattttgtgccggaggggagcatcatgctggatagcaatagcaggacctttgagcttaattatcgccagatatttcagcatctggaatacatggctaaactccacactaaagaccgtactgacggacagcgtaattttggttgtagtcagtcatga

SEQ ID NO: 378492 - DNA, 1548 bp, Salmonella enterica
atgagctatttaccgttgatgcctggattccagcatcataccattcctgtgccagccatccctgtatgggcatttccccctgtaatgcaaaatgccattaatcatctgcaggatggggggaggattcctgtggaattagccatcaatgtaactttagccgctgtagcagaggcctgtcagtcccatgttgaagtgatcaatccctttacgaatatgccggacccctgcgcactttacatcatgacgctggcggattcaggtacagggaaatcgaccgtaaacaaacagctcagaaaaccatttgacgaactgaaagctgagctggataaagcttttcaggagaaattgtctgcatacgaacgtgattatgccgtctgggagactaaactccaggctcttaaaagcaacctgcgtaccgcagtcaaaaaaggcctctccgccgacgacgctgaagctgagctggcatcatatactgacatgaagcccggtaagcctgttgtccccacccttgcctacaacgatgtctcggtagccgcactcattgaaggattgagtgaacatccagcaggttccctgatatctgatgaagcaagcagcatttttgaatactgtgtgaaagataatccggcgttctttaataaagcctgggatggcgacctctatgaacacaaacgtagcaatcaggctccccgcagtttcaaaccaacactgacgttatctttaatgtcacagggagctctgttttacagtttcatgaaaaagaatcaggacaagcttttaaacagtggcctgttagcccgtttcctgtttacgaatatcaactcaaacactgcagttcttacaggccatcgttatcgtccgaatacatcttcctgtggtgaaactgcattgaccagttttcatatccagataagtaaattgctggaaaagcagaagcaagaaatcctttcaggcaaaattgagaagaaaaaactcagactgtcccctgaagctgtagaattctgggagaataaacgtgatatctggattgctttgccagtgaatgacccgcgctggcgctgtgttgattacatgctgcagaaagctaacactaatacactacgtattgccggattgattcactatttttccgaccaggaaacagacattattccactcagtgttgtccagaatgcatccattatcatggagtggtatctcagtcatgctgcaacctggttttatcagttcactgatgaatataagtttcaacaggacgcacgtgaactttaccagtggatttatcagaaattcatttccagtggagggattccattcaggaaaaacgagttaatgaaatacggcccgaacagactccgtcgcagcgataaactcgagccattgctgaatagcataatcgccactggtgttattatttgcatcaaaaccgaaccacattcagcagaatatattacccgacatatcggaaatggttattacgcttcagtcattgagtccccggttaatacgcatttaatcgcacagcaaccgcttaaacagattaaataa

SEQ ID NO: 378493 - DNA, 207 bp, Salmonella enterica
atgactgtatcaacagtgaaagtactacgtttacctgatgttgtcagtaaactgggtatcgcccgttcaactatctacgactggttgaatgtgaaatcaccacgccatgacccggcattcccgaaaccttatccactgggcaggcagtctgttggctggattgaatcagagctggatgaatggattatacagcgccggacagtatag

SEQ ID NO: 378494 - DNA, 696 bp, Salmonella enterica
atgaagagaagtgaggctggtgctatttttaacgaattgaatgacgcttttgagctcaggcttgatgagttgaaaaaagaggggaaagtcccgactggaaaatatcgggaggaggtactgagattttgtggagagagagaagaggaatatggcattgaatattttctggaagaaagtacacagtttctgaaaagtgagactgcatttatcagggttgacgccgttttgcagggacgatttgataagtatctgtacatgtcgttatgttattaccatctggcctctgtggtgtcagacagagagcgtataaccgatggatgtaagtatcttcagtatgctatgtatttttatgggaaatggcagggaagcagggaatataaagagtgggctggagaaaaagaaaaaaatgaaaaggacaggcttgaaaatgccagagcaggaaaagaagaaaaatacatccctgttaaatgtgaaatcattcgccttttacactccaggaagcccatgggtaaatggagttcagtatcgaaagcaatagagggaatacagcacgatttagatatattcattacaaatgaaccaaaagacaagccttccggattagagccggacaatctggacagaacaataaaaagctggataaagaaggaccgttatctggcatttgcattttctgaagctgttacaaaaaaatga

SEQ ID NO: 378495 - DNA, 366 bp, Salmonella enterica
atgattgacattttaggtccagagaagcgcagacggcgcagcgttcaggaaaaaatcgccattgttcagcagagctttgaacccggtatgaccgtgtcgctggtcgcccggaagcatagcgttgctgccagtcagttgttcctgtggcgcaagcagtatcaggaaggcagtctcaccgccattgctgcgggtgaacaggttgtacccgcgtcggaactggcatctgcgatgaagaaaatcaaagagttgcagcgtctgctgggcaaaaaaactatggaaaacgagctgcttaaagaagccgttgaatatggccgacaaaaaaagtggatagcgcacgtgcccttgttgccggaggatggcgaataa

SEQ ID NO: 378496 - DNA, 816 bp, Salmonella enterica
atggcccgtcggtcgaaggactggcaggatcgtcgacgcaagcgcaagcctgatgatactgaagtactggcccgtattcatactgttatcggggatctgccaacgtatgggtatcgtcgggtgtgggcattgctgcgcagacaatcagaaactgacaatatggccgttatcaatgccaaacgtgtgtaccgtataatgcgtcagaatgcgttgctgcttgagcgtaagcctgcaataccgctctcgaaacggtcgcatacagggaaagtggccgtcggggaaagtaatcagcggtggtgctctgacggcttcgagttcaactgtgataatggcgacaaactgcgtgtcacgttcgcgctggactgctgcgatcgcgaggcactgcactgggctgccagtaccggtggatatgacagcgaaaccgtacaggacgtcatgttgggagccgtggaacggcgcttcggtaacagcctgccgacatctcccgttgagtggctgacagacaacggttcagcctaccgctcacatcagacgcgtcagttcgccagaatggtaggacttgagcctaaacatacggcggtacacagtccggaaagcaacgggatgtcagaaagcttcgtgaaaacgatgaagcgcgactacatcagtatcatgccgaaacctgacgggttaacagcggtaaagaaccttgcggaagccttcgaacactacaacgaatggcatccgcacagtgcactgggatatcgttcgccacgggaatatctgcggcggcgaaccagtaatgggttaagtgataaaaagtgtatggaaatatag

SEQ ID NO: 378497 - DNA, 918 bp, Salmonella enterica
atgctggacaaaactgttttttttatgcatgtcgtacgctgtggttcgatatctgaagcggcaaaagaatttcacattactgctgcaacaggtagtcgctggttaaaagagttagaggagcaattaaacgttcccttgcttatttcaaccacccgcaaaagccaaccaaccgaagccggaatgctgttatatgaacgttttcattcggcttattcagacattcaggatatttataaagaagtcgagacctccaacaacaccgatcgtggccttatctcaatagcttcaactcctcttttttcgcgaaatttcctttcaaaaatcatcggcgagtatctctttatttgtccggaagtgagttttcgtatcgaagaaacagcctatgttgatgaaaagaaaagcgatattgatttttatattcgcgccggggcaacctatcgcgggcatatggagccagacagccagttaattaagaaggccctctttaactatcctctggttgtatgctgttcacccagctatatcgattcatacggtgaaccgcagtcgcccgaagagcttaagttccataactgcatttatactacaacactggtgggcggaaaccggtggcagtttgacatggatggtgatattacgaccattgagatagccaagactgtagagattgagaatagcgagtttctcaaagatgtagctctggccggtggaggtattgcttatctcccgctcccgttggttaaaaaggcgctggagaaaggagaacttgtttctattctggataaccatatcaaaagtaaatttgaaataagcctttggtttcgttcactaaaagtgatgccatcacgatgccttaaattcaaaaatttcctggtcaagaggactctggaaatcaaagacatgatccatttctcctga

SEQ ID NO: 378498 - DNA, 720 bp, Salmonella enterica
atgcataataaaatttgtattgtcaccggtgcggcacaaggtattggccgaaaagtcgtagaacttttttcgcaggccggtgcggctaagatttatgcttgcgatattaaacatggtaataatgaaaaatttaaaaatgttatcccggttactctcaacgtttgcgaccgactggccattcaggaagcggtgagtaaaattcaacagcaggatggtcgtattgatgttctggtgaataacgcgggtattacccgtgacaatcttattaataaaatgaccgaacaagactgggatctggttatcgatattaacctgaagggcgttttcaatatgactcaggctgttgcgccagtcatgatggagttcaatgcgggctctattatcacgatgtcttccgttgtggggaccgacggtaatatcgggcaaagtaattatgcggctacaaaaggtggtgtgattgcaatgacgaaaggttgggctaaagaatttgcccgtaaaggggcaaaagtgcgcgccaactgtgtcgcacctggtttcgttgtcacgtcgatgaccaaagacctgccggaaaaagtgattgctcacatggttgccaaaactccgctcggtcgtatggcaacagcggaagatattgcaaatggtgttctgtttctggccagcgagaaatccagctttattaccggtcagacgttaaagatcgatggcggactggttatctga

SEQ ID NO: 378499 - DNA, 1209 bp, Salmonella enterica
atgaaaaaagtctatatcgttggcgcgaaacgtaccgcgctggggtcgttcggtgggagtctgatgagtgttcccgccagtgacctggctgccaccgccatttcagctgctatcgttcagagtaaaatcaatcctgataatattgatgaggttatcgttggcaacgttctggcagcagggcaggggatggggccggggcggcaggcggctgtaaaagcggggatcccttttcaggttccggcgctgacgctgaatatgatctgtggcagcggcatgaaaaccgtcattgatggcatgctaaagatcaaaagtggtgatatggacctggtcgttgccgcaggcatggaaaacatgtctcaggcaccgtatctggtagacagccgtacccgttttggtatcaggatgggcaaccagcagatggctgattcactggtagctgatgggttaacggatgcgtttaaccgttatcacatgggagtgacggcagaaaatattgctaagaaatatgccatcagtcgcgaagagcaggacatgttcgcccttaagagtcagcaacgtgcgtcgcaggctgtagagcaaggccgtttcgatgatgagattgcttccgttaccgtaaccagcagaaaaggcgaaacgcagtttgcgcgagatgaatacccgcgtaaagatacatctcttgaacagcttgccaaactaaaaccggcatttgacaagcaaggtacagtgactgcgggtaacgcctccggcatcaacgacggcggtgtcgctctgatcctggcgtctcaggaggcggtagacaagtggcacctcgagccgctggctgaaattgtcgcttgcggacaggggggtgttgacgccgctgtgatggggctggggccggtgccggcaattgctgatgcacttacccggggaaaattaacccttcgtgatattgaactgctggaaatcaacgaagcctttgccgctcaggccattggtgtgatgcgtggattgtgtgctgaacacgatgtcgacgccgcgtggtttgaaggacggactaacgtgaacggcggagccattgcgctgggacatccgttaggtgcatccggcggacgtattattgtgtcactgctctatgaaatgattaagcagaataaaaaaacaggcctggcgtcactctgcattggtggcggtatggggactgcaatcattatcaaacgcgcacaataa

SEQ ID NO: 378500 - DNA, 1335 bp, Salmonella enterica
atgactggattaatcctctctttggttttacttatttatcttatctatcgtggtgtccccgtattaattgtctcaccattaatggccatgcttgcggtactcatggggtcagaaatacccgtgctctactcctggacgggcccgtttatgcagtcggtggtgggatttgttgccgcctattttccgatattcctcgtaggggcgatattcggcactttaatgaacgccagcggtgcagcattaacgattgcgcagtttatttcccaggcaatgggaccgcaaaaagcgatcctcgcggttattctcgcctcatttttactcacctacggtggtgtatctgtttttgttgttgtatttgccgtcttacctatcgccagaaccatatttatcaacagcgattaccctcgtcgtttgctgcccagcgcaatttgtgcgggatgtttaccggcctatgtcgcgccgggttcggctcagtttattaacaccatcccaattccagtttttaaaaccaccatctattccggtatggatattggcatcattgggacactggtttggctggtcattggtgtgtggtatatgactcgtctggtacgacaggccaaaagcaaaggggaaggctacggagaagggctggaaggtgagaaaatcactgctcagggaagtattctggttgccatgacacctgttgcaattgttattttcggtaatattttactcacgcaatatttcgagcttgatcatgtcattctgcattatgcgagcgttggcggtattcaggggatttggcccattacggtttcgctgtgtattgctattgtcgtgacactggtgctttatcgcaaagagattgggaacacgacccgaactctggctcagggggcgaatgactcgctgacccccatctttaacactgcaacccaggtaggctatggcggtgtggtgaaaatgttgccggtatttgcggtgatcaaggccgcagtgtttgctatccctggatctgcaatgattgcggcttctgttggaacagcagtgctggccgggattgtgggttccacttccgggggcgttgggctggcgatgctggcattcggtaaagaactgatggcgttatcggttgaacataatattccggccgggttgatgcaccgcgtgattgttttcagtgcctcgaccttcgatacgctacctcattctggtttcattattacattacttggtgtctgcggcttaacacataaacaaagctataaagagttgtttattgttacctgtattttccctgtattcgcagtggtcgccatgatcgcttacgccacattctttttaatttaa

SEQ ID NO: 378501 - DNA, 1557 bp, Salmonella enterica
atgcaatctgtcaaacaaattacggcaccgcaggcagctgatttaattcaggacggcgataacgtcattttgggtggttttattggagcagtcgtaccggagtctattgaaaaagcgattgaagacaaatttctgtctacagggcatccccgccatctgggacttatttttgctgccgggcagggcgatgcaaaagagaaagccaataatcgcctggcacatgaagggctggtgagccgtgccattggcggacactggggccttattccacgtctgcaaaagctcgcgaatgaagggaaaataacgggctataacttacctcagggcgttatttgtcacctgttccgtgacagcgcggcaggcaaaatgggcacctttacgcacgtggggttaggtacgtttgtcgatccccgtgttgaggggggaaaaatcaatgccaaaacaacacaggatattgtgacgtataccgaagtgaatggcgttgaaaacctcttctataaaaaaatcgacgcaaacatcgctattctgcgtggtacgacagcagatacacggggtaacattacaatggaagacgaatgcctgatcctggaaaatctggcagcagcacaactggtacataaccaggggggaaaggtgattgtccaggtgaagcgcattgtcccggacggttcgctggatccgctacaggtgaaaattccgggtatttttgtagatgccattgtggtggctgagggtgaattacacatgcagacctttgccgaggcgatgaacgaaaattatgttggtcgcggatcacgcacaggagataaacgtaagccccgttcgctggatgtcaagaaaatcatcgctcggcgtgcggcaatggagctgaaaaagaatgcgattgttaactacggcattggtgtacccgaagttatcgcacaggtaacggatgaagagcacgtgacgcaggatctgattgccacagtggaacccggtgccattgggggatcgccagcgggtggtctctcttttggtgcttcggcatttcccgaggctatcatcactcaggatcaaatgtttgatttctatgatggtggtggtctggatcaggcttttctgggactggcggagacggatgcaaaaggcgatcttaatgtttcaaaatttggcgtgaaaattgcgggctgcggtggatttattaacatcacccagaacgcaaaacaggtcttcttctgcggctcgtttaccgctggtgaaagtgatattgtcgttaaagacggtaaactcaatatccggcgcgatggccatatactgaagttcattaagcaggtacaacaaatcacattctcttccgatacggcacgtaaaaataacaagtcggtatattacattaccgaacgagcagtatttaaattgactaccggtacgattgaactggtagaaatggcacctggcattgatttgcatagagatattcttgataaaatggaatttatgccgaagatcagcccgtcattaaaaaatatggatgcgcgtatcttcagtgaacagccaatgcagttaattttgaaataa

SEQ ID NO: 378502 - DNA, 423 bp, Salmonella enterica
gtgtcttatacaattaacgatatgtttattggtcaaaaggcctgttttgaaaaaacaatcactgaaagtgatgttctactgttttcaggtatttccggtgatatcaatccggttcatatcaatgacgtggtggcaaaggagagtatctttggcaggcgcgttgcgcatggtgttctggtgtcggggttgacctctgctgtactggggatgcaattacccggtgagggaaccatttatctggggcaggatagtaaattccgtcgaccggtttatattggtgataccgttaaagctacctgtgaagtgatagaactgaatacagagaaaaatattgtcagattagccaccacgacgacgaaccagaataacgaaattgttattgaaggcattgccgtggttatggccccgaaaaaaagagcatag

SEQ ID NO: 378503 - DNA, 1200 bp, Salmonella enterica
atgattattgaacctgttattaatggtgtagtggccagaacggcccatcctgagggctgcaggcaggcggttaaaaatcagatttattacagccagcatcataagcaaattcagcatggccccagacgtgtattaattctgggcgcatcctccggttttggcctggcagccagggtcgcgctgacatttggtggtgcgaagtcggatactattggtgtttcatttgaacgggggccgggcgaaaaaggggtggggacggctggctggtacaacaacgtttatttccgccagcaggcagaggcggaagggtgtatcgctcataatattgtgggtgatgccttttctgacgaagtaaaaaaacaggtcatggcgcttatcaatcgtgattttggcggccaaatcgacctggttgtctacagcctggcaaccggtatgcgccccgaccctaaaaccggtgaaatgtggcgttcctgcctgaaaacggtgggaaaacctttcagtggtaaaactgttaatctggaaaaggattgtctggataccaccgtgctggatgtggcgaataacgccgagatcctggcgacggaaaaggtgatgggaggtgaagactgggaggcgtggatccactggctacagcaccataacgcgctggcgaaaggggcgaaaacggtagctttttcctacatcggacctgaaatgacatatcctgtataccatgatggcactttagggctggcgaagaagcatctgtctcagacggcagagcgcctgaatgcgcaactgtctgccgataacggcggagcatgggtgtcagtttgcaaagcgctggtcaccaaagccagcgtctttatccccgcattttccccgtatgtgctgtgcctgtatcaggtgatgaaacagatggggctgcatgaaacctgtattgagcagatgcaacgtctgttcaccgataaactctatgcggggggagaggtatcggttgattcttcccggctcattcgtgttgatgaccgggagttacgcccggacgtacagcatgcggtgagtgagttgatgaccacgctaaacgacgacaatttcacgcaggttggcgattacgcggggtacaaaaaagagttcctgcaactcaacggttttggtttcgataatgttgattaccagaagcacattgagttgtctgacctgatggcgatgaaaccgtaa

SEQ ID NO: 378504 - DNA, 2160 bp, Salmonella enterica
gtgtcacgtaccatcatgttaattcctgcggaacccggcatcgggctgaccagcgtcagtcttggggtgatccgcgcaatggagcgtaaaggcgtccggttgagcatgtataaacccatctcgcatttccgtgatggtcatgtcgtccccgcccgaactaccgggattatacgcgcaggcactggtttgcctgcgggtgaaccgctgaaaatgagcgaggcggaacactggctttccggtaatcagaaagacgttctgatggaaacccttgttgcccattatcatgccgcaagtcagaatgccgaagtggttctggtggagggacttatcccgacacgtaaacatcagtttgcgcagtcgctgaacgtcgaaattgcaaaaacgctgaatgccgaaattgtgctggtgatgtcgcacgagcgacaaacgcccgcacagttgcatgaacgtatggaactggtacgcagtggtttaggtagagcaaaaaacatgatctccggagtctttatcaataagataaatgcgccgctggagggaggcgaagcgattcacagcgatatgtcatccatgcaaaacggcctttcgcgatcgctggagtggcgtaactttatggccagactctgttcgaatagccccatccctgtgctggcggctattccctggagcgttgagctaattgccgtgcgggcaatagatatagctcgctatctgaacgcgcagatactcaacgaagggaacatcgaacatcgtcgtattcgttcggtttcattctgtgctcacagtattccgcatatgctgaaacatattcgtcctggtgcgttgctggtcatttccgctgaccgtcctgaggtgctggttgttgcgtgcctggccgcgatgaatggcatggaaataggtgccatcctgctgaccggtgcttacgggatggatccacgtgtcagcaaactgtgtgagcgagcgttcgcgactggcctgccggtcttcatggtgaacaccaacacctggcagacctctctgagcctgcagagcttcagtctgggagtgccggttgatgatcacgagcgtatcgataaagttcaggaatacgttgcgggctacatcaatgcagactggacagaatccctgaccgtgacctccgggcgcagccatcgtctgtctcctccggccttccgttaccagctgaccgggctggcgcgtaaagcgggcaaacgcgttgttctgccggaaggcgacgaaccacgaattcttaaagcggctgctatctgtgcagagcgcggcattgcgatctgtgtgctgttgggtaacccggatgagatcacccgtgtggcggcgtctcagggccttgaactgggcgcaggcatcgaaatcgttgaccctgaagtggttcgggaaagctacgttgcgcgtctggttgagttgcgtaagagcaagggcatgactgaagccgttgcgcgtgaacagctggaagacaacgtggtgctgggtacgctaatgctggaacaggacgaagttgatggtctggtttccggtgttgttcataccaccgcaaatactattcgtccaccgctgcagctgatcaaaacagctccgggcagctctctggtgtcttctgtgttcttcatgctgctgcctgaacaggtttatgtttacggtgactgtgcgatcaacccggatccaaccgcagaacaactggctgaaatcgctatccagtctgctgactccgcgattgcgttcggtatcgacccacgcgttgccatactttcctaccccaccggtacttctggtacaggtaacgatgtagagaaagtccgtgaagcgacccgtctggcacaggaaaaacgtcctgacctgatgatcgacggcccgctgcagtacgatgccgcagtaatggctgacgtggcgaaatccaaagcgccgaactctccggttgcaggtcgcgctaccgtcttcatctttccggatctgaacactggtaacactacctacaaagcggtacaacgcactgcagaactgagctccatcgggccaatactgcaaggaatgcgcaaacctgtgaacgacctgtctcgtggcgcgcaggtcgacgatattgtctacaccatcgcccttaccggtatacaggcgagctttaagacgccttttatactcgtcattaagtga

SEQ ID NO: 378505 - DNA, 534 bp, Salmonella enterica
atgacgcattgtcagtcacctcccgttgacactcatgccgggaattcgggaaccctttgtaaaatccttcaacaggcaaccgaccagtatccacgtctggcggcgtttctgctgccgctgccggtcccggagctgcattttcacgatgttgtttatcaacaggtaagggaactggccatcagtcgccggctgagcggcagacctgtaccacccaccgtgctgcgctggatgtgggaaaagaaaaacgtccccggtcagtcgtgcaggcatctgttgctgatgaaccaggataccttctgccatccccattacgacaaaccaccgggcctttgttttgaaacgatggagtcattgctgcgggatacggttagtacgataaatgacgtctggcacccccaaccgccggggataaccgtgctcagggtggacagaacccacctggcacaggcagacgtgcagtacagccgtctcagggaatgtgccctgtcgctggttcccgcagccactgccctgagtgaacgtatcagcccctga

SEQ ID NO: 378506 - DNA, 612 bp, Salmonella enterica
atgaatacacaacaggttaatttttcttcactttattttggaacgcccgtcgcgattgtatccagccagaacgctgacggaacgacaaatctgtcaccgatatcttcatggtggattctgggtaaaagcatcatttttggactcggtaaatcaggtaagtgctatgagaatttacaacagaatgctgatattgtactgaacattcccgatgccagactatgggaacatgttgaggcgatggctgatataaccggaaaggaacatgtacctgatattaaacaaaaaattggatatcgttctgaaaaaaataaatttttatgtagcgatctgacagaagttaacagcctggatgtcggtcccggaagaataaaagaatgtccggttcagattgaagcccgggttgtcagatgtatgtccctgggagagtacacggaagagatggtctcaatggaggcccggataatacgcacccacgtttctgaaaaattactgtattgcaatgatggtaaaatcacatttaacgtcgaagagtggaaaccattatattatatttttcgccattatttttcatcaggagagcatttagggaaaaacttcagatgccatgaatga

SEQ ID NO: 378507 - DNA, 1455 bp, Salmonella enterica
atggcagataatgaagtgtggtatcggtgtctgaatcgtacacagtggagggcattttttgccgcatggctgggctacctgcttgatggttttgacttcgtactgattgcgctcgtactgacagaaatacagggagagttcggactgacgacagttgaggcggccagtctgatttctgctgcgtttatttcccgctggtttggtgggctgatgcttggtgcgctgggggacaggtatggccgccgtccggcaatgatcatcagcattgttctgttttctctcgggacgctggcatgtggtctggctccgggatacaccgttatgtttattgcccggctgtttatcggtatgggaatggcgggtgaatatggcaccagtgcaacttatgtcatcgagagctggccgaagcatttacgtaacaaagccagcggatttctgatttccgggttttctgtcggcgcggtgattgtggctcaggtttacagtctggtcgtcccgctatggggatggagggcattatttttcatcggtattctgccgattatttttgcattgtggttacgtaaaagtattcccgaaacggaagactggaaaaaaagaaagtcagaaagtgtccccgtactgacgatggttgatgttttataccgtggtgagtaccgggttgtgaatattctgatgactgtcgttgccgcagtcgctttatggttctgctttaccggagaactgcatagtgcagtgattatctcagggctgggattaatatgtgccgctatttttatcagctttatggtgcagagcagcggaaagcgctggccgacaggcgtaatgctgatggttgtcgtgctgtttgcttttctgtactcctggccgatccaggcacttttacccacttaccttaaaactgaactgggctattcgccatccactgtggcaaacgttctttttttcagtggttttggggctgcggtgggatgctgtgtcggtggttttcttggtgactggctgggaacccgtaaagcctatgtatacagcctgctggcatcacaattcctgattattccggtatttgccattggtggctccagtatatggcttctcggatttttactttttttccagcaaatcctggggcagggtatcgcgggaatactgccgaaactgattggcgggtattttgatacggaacaaagagctgccggactcggatttacctataacgtcggggcacttggtggcgctgctgctcccgttattggggcacttatcgcggaacgcctggacctgggaactgccctgggatctctttcatttggtcttactttcgttgtgattttgttgattgggtttgatatgccgtcacgtgttcagcgctggttacacccggatgcgatacgtacacacgatgccattgatggtcgccctttcagcggcgcaataacgcgtaacgtgaagtaa

SEQ ID NO: 378508 - DNA, 720 bp, Salmonella enterica
atgaatcagttaaaggcaatggcatcgggagccgttttattattgacggcagtacccttaacatcttatgcactgacatttgatgcccgtggaggataccgtagcggtagtcatgcatatgaaacccgtcttaaagtcagtaatggatgggaaaatggatggtggggcagtctggaaacggatagctggaatggcgttcataataattcgaatgaagttatagggttaagttataatgagctggaaacaaattatactataaaactcgatgataaatggtcgctgaagcccggaatgctgacgcactggagtaaagccggaacccgtttcggaccctatctgaaactttcttatgacgtgaatccggatcttaatcttggtatccggtaccgctatgactataacgtatatcgctcaaccgaccttgacggaaataacgcaagggccaatcagcaccgctgggatggttacgttacttatcgtatcaatgatctgtttacggcggcgtggcagacgacagtttacacttatcagaatgattttcattataacaatcataaaaagtgggcgacagaaaatgcgtttgtcctgttatataaaatgtcaaaaaatatcacgccttatatagaatatgattacctggatcgtcagggagcctataacggaagagataatattcctgaaaacagttatcgtgtcggcgtgtcattcaatctgtaa

SEQ ID NO: 378509 - DNA, 1077 bp, Salmonella enterica
atggccgcatcttttgcggctggtgcatcggtattgcctccactccctgtcccgtttaaaagtggtacgggagtcattgacgggaaagttatctatgtgggcctcgggagtgcccggaaaacatggtataagctggatacgggatcaccggagaagaaatgggaacctgttgccgaatttcctggtacaccgagagaacagtccacatccgctgtcatcaatggaaatatttatgttttcggtggtgtggggaaaaatgagaacggtcttacgcaggcatttaatgatgtttatatgtataacccgtcagaaaatgtgtggcgtaaactgatgtcccacagcccgctggggatggtgggacatgtgacatgggtacatgatggcaaagttttcaccacaggaggcgtaaatcagaatatctttaatggatatttcagcgatgttgccctggcggacgggaataaaacgttacttgatggcattaacaaaaactattttggtaaatcagcaggtgattacctgtacagcaatacaatcctgactttcgatccggattcatcacaatggcattattacggaatgttacccttccacggaactgccggggcaactcccgtagttaatggtgacagcatcattctgattaatggtgaagttaagccgggtctcagaacggatgaggttattgccgggcagtttaaaaataaaggactggtctggaagaaactctccccggtgtcttcacctgacggtgtggcggggggctttggcggaatgagtcatggcgatattatttttgccggaggtgcttatttccccggagcaaggaataattacagccaaggaaaattttatgcgcaccagggactgaaaaaaacgtacagtgacaaagtttatctgtataaaaaaggaacatggtcagatgtaggtactttgccggaaggaattgcgtatggtgtgtcactgccctgggaaaatggtttactcatgattggaggggaaacggacgggggccaggcaacaacaggttctgtatggcttggggttaataacagtcatctggaaattaaaaaataa

SEQ ID NO: 378510 - DNA, 2106 bp, Salmonella enterica
atgaaaatcaacaagctgatattattcggattttttattactccttattctgatgcttcaacaacgatgggaaaattacctgttaatgatggatggcacagtcctcaacagatcttttcacagcatcaaaagacgagtacgaatgcttaccgaattccggcgatcacggccacgactcaggggacggtaattgctgtaagtgatgccagggcagatggtacaagcgatattggtttaaataaagatgtgcatttcggatacagaatatctactgatggaggaaatacctggagtcatgaacaggaaataattccggatattaaagggaaacatcaaatttcagatccggctattgtacataatactgatacaggcagcacattcctttttggattttacaatgacaggtttattacagcgaaacctgtcagtaataattctgatttttttatgtttaaatccgatgacggaggaaaaacctggggtaagggagtaagcctgtataatctggctcctcctggatataagtatattttacagggacccggttctggaatgtattataaaggcactgtttatattgcggctcaggcatggcataatgataaggataatataaacgggggaacaacagccacttccgggtttatttactcaacggataacgggaaaacctggtcttctgcatggctgcgtcccgacagtcagattaacgggaagccgggaactgatggtttgccggatatcacttctgaaagcagtattttccatcatgatggatacatctatttgtcagccaaacctgaaacacggcgggaagttgaaaacaggattgtatacagaactaataataatggggaaacctgggagagagtgaaagaggattttctgcctgataatgtctcacgtgcggagaccagttcactctctcttgacgataacgtctatctggttggttatacaacacagacaaagagagctggccgtgatggtgtctggatcacaacaaatactggccggagaattcaggtttttgatgcgccggttaacggttatacttcactggcgcaggacgagaataatctttatattttatttgaaggtcagggggatatgtattttcagcgatatgatatttcttccagggattatgcaaatttgaatgctgtcatcctgagccggagcgatgatttattctatatccaggataaactgagagggaatacctcatatataaagggatcttatggtaagaatgattcatccggcgctgagttattttatgcgagtgaccgggttaagtttggtatatttcattcaaaacaaactaataacagtaagcatgtttacgggactgtcaactattctaatgatgatacatcatttttactgtctaaagaccacgttgtttttcccggtgataatatttttgtcggatatcagaacagcgatattgattatgtgaataaatcgcataatgatgtttcgtcctggcttgctggttattctttgtcacatgattttgactggttgacttatggtattaaattaaatggtatttacagtcgtaatgatttttcacgaaatcattacgaaggtctgggtcgtacagccacatttgattcttatagtctggcgattaaaaatcaattatccagagagtttcattttacagggaatgtaaaaacaaatatagaaaccggattaaataccacttattttaatcattccggttttactgagaaaggtgggaatggctggaataatgtcacgcttgataattcagggaactggtcaaatcaaatttatgcaaatgctgaaattagtaaaatgtttgatatttaccgcaaaacagaactgacgctgaccgccagcgttatgtaccagtacgagttaatgaattctgactcatgggctgaaaattataccgttctcgattctcaccgggtaatgcctcccccggtaaaaaaacacagaggcgggttaacgaccggatttttaaacgctgcgcttaatataaacagacagactgatattgttgccggggtatctttaaataccgatggcgataatatggtggggggagcgataacctactctttctga

SEQ ID NO: 378511 - DNA, 360 bp, Salmonella enterica
atgatcggtgaagcagcaaccagtctggcgaaggtggaagaggccagggcccggacgggagtgtttatccttgcaaccaacgatcacagtacggagctgacggtggaagaactactggcaacttacaaggcccaacaaaatgtagaacggggcttccggtttctcaaaagcccggagttcctgacgtcatcgctgtatctgaaaaagccggagcgtattgaagccctgctgatggtgatgacctgtagcctgatgatttacgctgcgctggaataccttattcgcaaaggtctggcatatcaggaacgtgacgttcctgatatgaagaaaaggccgacacggaagccgattacacgttag

SEQ ID NO: 378512 - DNA, 264 bp, Salmonella enterica
atggtggagcctcagagtcattgttgtcgttcagtgctcggggcgttagattacagtaataacacgttgttttatcagacagaatcaggaagtgtcactcgcgatgatgtgatcgattttttggagcaagtagccagacagggcgatgaacgtctgacaattttagttctggataatgctccggttcaccgtggaattgatgacgagaccagagagaggttgtttttcgagcacaatatgtgcctgcctacagcccggagctga

SEQ ID NO: 378513 - DNA, 855 bp, Salmonella enterica
atgacaacagcaaccagcctgaacgagctgcagcagcaaatccgcgatcgctacgatagcctgagtaagaggctgcagcaggtgtcccgctatgtgctggataataccaatagcgtggcttttgatacggttgccgtcattgctgaacgagccggagtgcctccttcaacgctgatccgcttcgctaatgcctttgacttcaccggcttcaacgaaatgaaacagctgtttcgtatgaacctggtggaggaaaccgccaactacagcgaccgcgcgcgcatgttccgtgagatggaaagcgaaaccgtaccggaaaccccgctcgatatcctgcaggagttcgcccgttcgaatactcaggcgctccagcagctggcagcccgtgccgaacctgaaatgctggaacgtgccgtacaattactggcagaagccgacactatctacatcgccggtctgcgtcgttcgtttagcgtagccacctatctcacctacgccctgagccatcttgaatgtcgccctattttgctcgacggaatgggcgggatgctgcgcgagcagatcaatcgcatcaaagcgcgcgatatcgtcgtgtcgatcagcttctcaccttacgcggaagaaacggtgatggtcagcgaaactgcggccaatgcaggcgcacgccagatcgtaattaccgacagccagataagcccgctggccacgttcagcgatctctgctttgtggtgaaagaggcgcaggtcgacgcgtttcgctcccagtcagcgacgctgtgcctggtgcagtcgctagtggtggcgctggcctaccgtctgggtgacgggagtaatgaacgcggtcattctgtcgggtaa

SEQ ID NO: 378514 - DNA, 1506 bp, Salmonella enterica
atggagacagtagcgaattttacccacggcgaatgtgtcaccggttcaggtcagcgcgttcaggcaatcttcaacccggccaccggcgagcagatccgccaggtggtgatgagtacgacacaggaaaccgagcaggccattgcggcagcgcacgacgcattccccgggtgggctcgccattctccgttaaaacgagcgcgagtgatgttccgctttaaggcgctgctggaagaaaacatggagaggctggctcgcatcatcagcgaagagcatggcaaggtattctctgacgcagttggtgagttgacccgcggcctggaagtggtggagtttgcatgcggcatcccacatctgcaaaagggcgaacactcagccaacgtaggtaccggcgtcgatagccattcgctgatgcaacctctcggggtttgcgtcgggatcacgccgtttaactttccggcaatggtaccgatgtggatgttccccatcgcgctggcaaccgggaataccttcgtgctgaaaccctcagaaaaagacccttctctcgccctggcactggccaaactgctgcaagaagccggattgccggacggtgtgttcaacgtcgtgcagggggacaaagagtccgttgacgtgctgttaactgacccgcgcgtgcaggccgtgagctttgtcggctctacgccgattgcggaatacatttatcagacggcatcggcccacggtaagcgttgccaggcgttaggtggcgctaaaaatcactgcattttaatgccggatgccgacatggatatggcaacgaacgctattatgggggccgcttacggcgcggcgggtgaacgctgcatggcgctttcggtcgtgctggcggtaggggacaaaatggcagatgagctgtgctcacgactggaaaaacagattgcggcgctgcgtgtcgggccggggcttgatcagacaccggaaaacgaaatgggaccgcttatctcctcggtacaccgtaataaagtgctcggttatatcgacagtggggaatcgcagggggccagcctgcgcgtggatggtcggcgttttagcgttaaaggccatgagcagggctattttgttgggccgaccctgtttgataacgtcacgccggagatgaccatttataaagaagagatttttgggccggtgctttctgtggtgcgcgtagcagattacagcagtgcggtggaactgattaaccgtcatgaatatggtaatggcacggcaattttcacgcgcgacggcggctgtgcgcgtcgcttctgtgaagaagtgcaggcgggcatggtgggcgtaaacgtgcctattccggtgccgatggcgttccacagttttggcggctggaagcgatccatttttggtgcgcttaacgttcatggtaacgatggcgtgcgcttctacacccggatgaaaaccgtcacctcacgctggccggagatgctgcaggacacaggggcagcgttctccatgccaacgctgggctga

SEQ ID NO: 378515 - DNA, 1926 bp, Salmonella enterica
atgcaaaccgaacgtatgaccacggctcaggcgctggtcaaattccttaatcaacaatatgtcagtgtcgatggcgtggaaacgccctttgtcgagggcatcgccaccatctttggtcacggtaacgtgcttggcattggccaggcgctggagcaggcacccggtcatttgcaggtgatgcagggatgtaatgagcagggaattgcgcacatggcgaccgggttcgccaaacagcatctgcgccagcgtatttttgccgtgacgtcatcggttgggccgggagcggcaaacatggtgaccgccgcggcaaccgcgacggcgaaccgtattccgctgttgctgttgccaggcgatgtctacgccagccgtcagccggacccggtattgcagcaaattgagcaataccatgaccttggcatcagcaccaacgactgcttccgcccggtctcgcgttactgggaccggattaaccgcccggagcagttaatgagcgcgatgataaacgcgatgcgaacgcttactgaccccgcagacactggcgcagtaaccatctgcctgccacaggatgtgcagggagaagcctgggattatccgcagagtttctttgcgcgccgcgttcatctgattgaacgtcgaccgcccgacccgcagcgtctggcgatggcgcgggcactgattgcccgcaaacgccgcccgctggtggtatgcggcggcggggtacgctactccggcgcgcatgaggcgtttcgtacgtttgttgaaacgctgcaactgccgtttgccgaaactcaggccggaaagggcgcactggttagtgaccacccacttaacctcggaggcattggggtaactggcgggatggccgccaatcagctcgcgccgcaagccgatctggtgatcggcatcggtacgcgcttcaccgactttaccaccggttcgaaagcgctgttttctcatccggaggttgagttcctgctgctgaacgtggcggagtttgacgcactgaagctagatgccaccgcgcttatcgccgacgcccgtaccgggcttacggcattaactgaaacgctgaaagactaccgcagcgattgggggaaggaggtcgcgcaggcgcaagaggcctggcgcgatgagtgccaacgtttatgggatcgcgactggcgtcccgacgacgaacctgaagtggctgggcatcttgacgctcagctggtggaatatggcgacacgctaaacacccggttgacccagacgaaggtgctgggacttatcaatcagcacattgaagatagcgctatcgtcgtgggggccgccggatcgctgcctggcgatttacagcgtatctggcaggtcaaaaccccggacagctatcacctggaatacggttactcctgtatgggctatgagattgcggctgctattggggccaggctagcgaagccgcagcagcctgtatatgccatggtgggggatggctcgtacatgatgctgcattccgagctacaaaccgccgttcaggaggggataaaagtcactatcctgctgtttgataacgccagctttgggtgtattaacaacctgcagatggggcacggaatgggcagcttcggtacggaaaaccgccaccgcaacccgcaaaccgggcgattggatggaccattggtgaaggttgattttgccaaaaacgcggaaagctacggctgccgggcatggcgtgtacatgacgagcaaagcctgctggcggcgctggaagcctcccgtgcgcattcggggcctgtgctgctggatatcaaagtcctgccgaaaaccatgacccgcgactatgcctcctggtggcgcactggcgatgcgcaggtggcagaatctccgtcggtgcgaaaagcggctgaacagacgtttgagcaggtgaaaaacgcacgtcagtactaa

SEQ ID NO: 378516 - DNA, 1023 bp, Salmonella enterica
atgtttaacattgctttactgggcgctggccgaattggccaggtacatgcagctaacattgccagtcacagtgccactaccctctggtccgtcgtcgacccgaatcaggaatttgccacccgtcttgccacacagtaccaggctcgtctgcaaagcctggatgaggcgatgacggaccctaacgttcacgccgtgctgatcgcctccgcgaccgatacccatgcggatctgattgaaatggccgcacgccacggcaaagccatcttctgtgaaaagccggtccacctggatctggcccgcgtacgcgactgcctgaaagtggtcaaagagtacgacgtaccgttgtttatcggtttcaaccgccgcttcgatccgcagtttcgccgtgtgaaaactgacgcaatggccgggcgtatcggtaagccggaatcgctgctgatcatctcccgcgacccgtcgtcgccgcctgcggaatatgtgcgtgtgtccggcggtatgttccgcgatatgaccatccacgattttgatatggcgcgctttatcatgggcgaagagccggtttcggtgtatgccctgggcagcaatctggtagatccggcgattggtgaagcgggcgatatcgacaccgcgttcatcgtactgaaatatgcctccggcgcgatggcgaccatcgtcaacagccgccgttcttcttacggatacgatcagcgccttgagctgcacggctctgaaggactgctgtgcgcgggcaacattctcgaaaatcaggtgcagcactacgcgaagaccggctgcaccagcgcgttacctgaacacttcttcctgcagcgttataaatcggcctatgccgcggaatgggaacactttgttgccgtaatgcgcggcgaagcggtccctgattgcagcggggacgatggcgagcgtgcgctgtatctggcggataaagcgctggagtcactgcagagccaacgtgaagttctcctcttattgccaccacaacctaccctacacagagagacataa

SEQ ID NO: 378517 - DNA, 930 bp, Salmonella enterica
atgaaaaaactgatcttagctgtcctcatcgccatgacatccggggcagccattgctgaaaacgagcaaattgttttcagtacgccaaacctggcgatgccatttgaagttcacatgcagcgcacggcggtgaaagccgcaaaagagatgggcgtgaatttacaggttctggacgggcagggtagctcgccaaaacaggtcgctgatctggaaaacgccatcactcgtggcgcacagggctttattgtttcaccaaacgatgtcaacgcggtgtccagcgcggtagatgaaattcaggatgcgaaactgcccgttgttaccctcgaccgctccgttgacagccagaaaaaagtgccgcacttcggcgcgaacaactacaaaggcggtcaggcgattggcgactttgtcaaaaccaaattccctgacggggcagacattattctgctgaccggccagccaggctcctcctccagcattgaacgtactaaaggcattcgcgacagcctgaaggcgggcggtgaaaagtacaagatcgttgccgatcagaccggtaactggatgcgttctgaagggatgcgcattgtcgaaagcgttctgccttcgttgccgaagcgtccgcaggtgatcctctccgctaacgacgatatggcgctgggcgcgattgaagcgttacagggacaaggactgaaaccgggtgaagttctggtcacgggcttcgatgccgtgccggaagcactggcgcgtgtgcgcgacggctggctggctgtgacggcggatcagcgtccaggctttgcggtgaaaacggcgatgagccagttggtgaataacgtccgtgagaagactgcgatcaccggggctgactacccgccaacgcttatcaccaaagagaacctgcagcaggccgagcgtattagtgaggccggtaactaa

SEQ ID NO: 378518 - DNA, 1548 bp, Salmonella enterica
atgtcgcaacccttactgaaagtgactgacctggcgaaaagcttttccggcgtttgggcgctgagtagcgcacagctgaccgtcggagcaggcgaaattcatgcgctgttaggtgagaacggtgccggaaaatcgaccctgttgaaagcgctggcgggcgcacagccgcaaacacgcggggatatttggttcaacggcgaaacattgccggtagaagactctccggttgagcggcagaacaagggcattatcacgatttatcaggaatttaatctgctgcccaatatgaccgtcgccgagaatatgttcctcggacgcgaaccgcgcaaacgcaatctgattgttgacgaaaaggcggtaaatcaggaggcgcaggtgattctggattacctgcaactgaacgttgcgccaaccacggccgtggcccgactgagcgtggcgcagcagcaaatggtggaaattgcgcgggcgctgacgctgaacgcaaagctgatcatcatggatgaaccttccgccgcgctgagcgacagcgaagtggaaagtctgcaccgggtggtgcgggaacttaaagggcgtggcgtgagcattatctacgtcacccatcgcctgcatgaagtttttcaactctgcgaccagttcaccgtttttcaggatggacgttttaccggaaacggtgcggttgcacagaccaccgtagaacagctgatccgcctgatggtggggcgcgatgtggcctttaatcgccgcccggccagcgaaactcaccatgaagataaacctgtgcgtctggcggtgaaggggcttagccgcgaaaaaccgccgctggatccgcatggtatcgcgctacacgacattagcttccacgtgcatgctggagaagtattaggcattgccggactggtgggtgccgggcgtaccgaagtggcccgctgcctgtttggcgccgacggttttacttccggcagctttgaacttgatggtgtgccatatcagccgcgcgatccgctgtttgcgctggatcaggggctggcgctggtaccggaagatcgcaaaaaagagggcgcggtgcttgggctgtcgatccgcgacaacctgtcgctctccagcctctcgtcactactgcaatggcgctggtttgtgaatacccgcaaagaagatgccctgattgagtcataccgccaggcgctgcagatcaaaatggtcaacagcgcgcaagaggtgcgcaagctctccggcgggaatcagcaaaaagtgatcctcgcgcgctgcatggcgcttaatcctcgggtgttgatcgtggatgaaccaacgcgcggtatcgatgttggtaccaaatcagaagtctatcaggtgctgtttgatatggcgaaaaagggcgtggcggtgatcgtgatctcctccgatctaccggaagtcatggcggtttcagatcggatcatcacgttgagtgaaggccgggtgactggcgagatccacggcgacgacgctaatgaagagcggctaatgacgatgatggccatcaaccacaacgccctgaatgcggcataa

SEQ ID NO: 378519 - DNA, 1029 bp, Salmonella enterica
atgacgcagattatttctaaaacgcaggttccagccaaacgcggcggacgtcttgatcccattgccttttttgagcgctttggggtactgattttcatgatcctgctgctgattttctttcagttgcagaacagcaattttctttctgaacgcaatattttcaacattctgaccgaagtctccatctacgggatcatggctgtcgggatgacattcgtcattctgaccgccgggatcgatctgtcggtggggtccatcctggcggtttgtgccatgaccgccgcgtatgtgattaagggcgacaatttcaccactgtcgacccgaacgcctggggcggcatgagctggttgattggccttggtatctgtatggcgatgggtaccgcgattggttttctgcatggcctcggcgtgactcgcctgcgtctgccgccgtttatcgtcaccctcggcgggatgaccatctggcgcggcctgacgctagtgattaacgacggtgcaccgattgccggtttcgacgcgggataccgctggtggggacgcggcgaactgctcggtatctccattccaatctggatattcgcgctggtagcggtaggcggttatctggcgctgcataaaacccgctgggggcgcttcgtgtacgccattggcggcaacccggaagcggcgcgtctggcaggggtcaacgtgaagcgcgtgctggtgagcgtctacgtactgattggctgtctggcggggctggcgggcttcatcctcagcgcgcgtctgggaagcgcagaagcggtcgccgggatctcgtttgagctgcgcgtcattgcttcggtggtcattggcggcacctcgctgatgggcggctacgggcgtatcggcggcaccattatcggctcgatcatcatgggcatcctgattaacggtctggtgctgatgaacgtctcggcttactaccaacaaattattaccggcttaattatcgttctggcggtggcgttcgatacctacgccaagagccgtcgcggcgcattgtga

SEQ ID NO: 378520 - DNA, 1134 bp, Salmonella enterica
atgaaagaagttcgtattggattgattggcaccgggtatatcggcaaggcgcatgccattgcctatgctcaggccccgacggtattcaacctgcgcggcaaactggtgcgcgaaatggtggcggaagtcacgccggagctggccgccgagcgggcgcaggcgtttggcttcaaccgctcaaccggagactggcgtgcgctggtggccgacccggccattgatgtcgtggatatctgctcacccaaccatctgcataaagagatggcgctggaagcgattcgccacggcaagcatgtgtactcggaaaagccgttggcgctgaacgcccacgacgcgcgtgaaatggttgaggctgcacagcgggcaggagtgaaaaccctggtggggttcaactatatgaagaacccaacggcgcagctggcgaaagagatcattgcgcgcggagaaattggcgaggtgatccatttctacggcacccacaatgaagactacatggccgatccgcttgcgccgatccactggcactgttttaaagagaccgctgggcttggggcgctgggcgatctggcagcgcatatcgtcaatatggcgcagtacctggttggggatattcatcaggtctgcggcgacctgaagatcgtggtgccacagcgtccggcgaaagtcggttcctcgcaaatggtgacggtagaaaacgaagatcaggcccacgcgatggtgcgctttgcaggcggtgcgcaaggggtgattgaaacctcgcgcgttgcctgtggccgcaagatggggttgtcgtatgtgattaccgggaccaaaggaactatcagttttacccaggagcgcatggccgaactgaagctctatctgcatgacgatccggccaaccgccaggggtttcgcactttactggttggtccggcgcacccggactacggcgcgttttgcatgggagccgggcatggtatcggctttaacgaccagaaaactgtggaagtacgcgacctggtggacggcattgccgccgatgcgtcgatgtggccggactttgaagaaggctggaaggtgtcgcgcgtgcttgacgctatcgcactctcgcaccatgaaggccgctggctgaacgtgaacgacattgtctga

SEQ ID NO: 378521 - DNA, 1905 bp, Salmonella enterica
gtggaaaagcagtttgatgtgatatgcatgggccgcgtggcggttgacctctacagtcagcaaattggcgcgcgcctggaagatgtgtcgagctttgccaaatatcttggtggttcgtccggcaacgtggcttacggtacggcacgccagggactgcgttcctcaatgctggcgcgcgttggcgacgaacatatggggcgtttcctgcgtgaagagttaaaccaggtaggttgcgataccagccatctgatcactgataaagaccgcctgacggcgctggtgctactcggcattaaagaccgggacaccttcccactgattttttaccgtgataactgcgcggatatggcgattaccgccagcgatgttgatgaacagtacatcgcttctgctcgttgtcttgccatcaccgggacacatctttctcatccgcaaacccgcgaggcggtgttgacggcgctcgcttacgcccgacgtcacggcgtgcgtacggcgctggatatcgactatcgcccggtactgtgggggcttacttccttaggcgacggcgaaacgcgctttatcgccgccgaacaggtcacccgccagttacaggaggtgctgcatctttttgatgtgattgtcggcaccgaggaggagtttcatatcgcgggcggcagtaccgatacgctgcaggcgctgtcgcaggttcgcggtgtgagtcacgcgacgctggtctgcaagcgcggtgcgctcggctgctcggtgtataccgacgccatctcgccccggctggacgatggcctgacggtcaccggcgtacgcgtagaggtgctgaacgtgctgggggcgggggatgcgtttatgtccggtctgctgcgcggctatctcaacgatgagggatgggagcaggcatgccgctacgccaatgcctgcggtgcgctggtggtgtcgcgtcacggctgtgcaccggcgatgccgagcaaagttgagcttgatgattatctttctcgcgctgcagaggttccgcgtccggatctcgatccgcatctcaaccatttgcatcgcgtgacgactcgccgccgcacatggccggagctatgcgtaatggccttcgatcaccgtagccaactggaagagatggcgttgcagtgcggcgcgtctttgaagcgtattccggcattgaaacaacttattttgcaggccagtcgtgaagcggccaacagtgccgggctggagggcaaggccgggctgctgtgcgatggcacgtttggtcaggatgcgctgaattcgataaccggagagggctggtggattggtcgccctatcgaactgccgggatcgcgcccgctggagatggaacacggcaatataggctctcagctcatcagttggccgcaggagcatgtggtgaagtgcctagtctttttccatccggaagatgcccacacgttgcgtctggaacaagaacagaaaatcgccgaggtttaccgcgcctgttgccagtctggtcatgagctgctgctggaggtgattttaccggccagtatgccgcgtagtgatgaactgtatttacgcgctatttcccgcttctacaacttagggatctaccccgactggtggaaactcccaccgctgacttctgctggctggacggcgttgagtgacattatcgaacggcgcgatccgcactgccgtggcgtggtgatcctgggtctggacgcaccggcagagcaactgcgtgctgattttaaagcggctgcgggtcatggggtggtgaaaggatttgccgtgggacgcacgctgtttggcgacgcttcccgcgcgtggttgaaacacgatattgacgatgcgcagttggtggcgcgcattaaagataactacctgcagcttatcgcctggtggcgcgagcgcggacaagcataa

SEQ ID NO: 378522 - DNA, 891 bp, Salmonella enterica
atgacggtacaattaggtattaatccactgacatggacgaatgacgatcttccttcactgggcgctgagacgtcgcttgatacgtgtctgagcgagggtaaagaggccggatttgctggtttcgaactgggcaacaaattcccgcgcgaggcgcgactgctcggccccattttgcagcgtcacggcctgcaactggtttccggctggtactccggacgtctgctggaacgtagcgcggaggaggagattgctgccgtgcaatcgcacctgacgttactgcgtgaactgggagccagggtgctggtctttgccgaagtcagtggctgcattcacggcgagcagcagacaccggtacatctgcgtccgcgcttcccgcaagagcgctggcaagagtacggtgaaaagctcaccgagtttgcgcgctacacccagcagcagggggtacagattgcctatcaccaccacatgggaacggtgattgaatctgctgaagatgtggataatctgatgacgcataccggtgatgaggttggcttgttgctcgataccgggcatttgacctttgcgggtgccgatccgttggctgtggcgcagcgctgggcatcacgtatcaaccatgttcactgcaaagacgtgcgtgccgacgtgctggcggatgtcaaaaaccgcaaaaccagcttccttgatgcggtgctgagcggcgtcttcaccgtgccgggagatggtagcgttgactatccgccgatcatggccttgctgaaggctaaccagtaccaggggtggctggtggtggaggcggagcaggatccagccatcgcgcacccgctgacgtatgcgcgtttgggctataacaaccttagccgtctggcgcgtgatgccgggcttatctga

SEQ ID NO: 378523 - DNA, 819 bp, Salmonella enterica
atgtcacgtttattatctcgctggcagcacccggacgcgcaggggcgtacgcagtcagtgacgccggaaagcgccggttggggatatgttggctttaaagcgtatgaactggaagaagggcagcagcttacgctgcccgccgtcagcgaagaacgctgtctggtattggttgccggacgcgcgaccgtcaccacgccgggcgcaacctttacggatatcggcgagcggatgagcccgttcgaacggatcaaaccgtgggcggtctatgtcacctctggcgaggcaatacaggttcaggcggtaaccagactggagctggcggtctgcgctgcgccggggaaaggcacgcacccaacacggctgatcgcacctaaggatatcgacggggaagcgcgcggcaaaggtcacaaccagcgttatgtgcataacattttaccggaagataaacccgctgatagcctgttggtggtggaggtgtggaccaacgaaggctgtaccagttcctacccaagccataagcatgataccgacaatccgccgcaggagacctatctggaggagacttactaccatcgcctcaacccgccgcagggattctgtatgcaacgggtgtacaccgacgaccgatcacttgacgagtgtatggctgtctataaccgtgatgtcgtgatggtgcccaaagggtatcacccggtggcaaccctggcgggatatgacagttactaccttaacgtgatggcgggcccggtacgcaaatggaagtttacctgggaagacgatcacgcgtggataaatagcgattatccggttgataaataa

SEQ ID NO: 378524 - DNA, 183 bp, Salmonella enterica
gtgtttctggaagacgtgaaaataaataaacacagtctggataatgtgtcggatgagatgtttactcataatatctatgatccgttcacgtcctggaagcgtgcacaaatgtataaaatgaataatgcctacctgttaggcaataccttttcgcccacaaacatctgcgtcagtaaattgtag

SEQ ID NO: 378525 - DNA, 1239 bp, Salmonella enterica
atgttatcacccggaaaacgtaattatatcctgttaagcattttcgattttctgtatctgttcgcctggtcagcgaccatggcgttttttgttatctggacgacacagcatcttggcatcagcgcaacgcaaacggggttactcttctcaatcaacgcctttattgcgttactgatgcaacctttctttggttttatctctgataaatttggcctgaaaaaaaaactcatctggctcctggtggcgctgttactgcctgttggtccgttctttatttatatctacgctccacttttgaaacataatttctggacgggggcagtactcggcgggatttacctcggtattatctttaactcaggcagcggcgtgatcgattcttatatcgataaaatctcgcgtcgctaccgctttgaatatggtcgtgtacgaatgtggggctcactgggctgggcggcggcggcatggatcgtcggcaggtacattgactccatccccaatctctcgttctggctggcaagctgtgccattgttgtcgccgcaatatgctttatgttgacaaaaatagaactgaccgaagaggaaatcgaaagaaccgactcgctcaaggtgagccacgcgctggagctggcgaaaaacagtcagttctggatgttgttgctcttcaccctgttcgtgacgcaaatctacgatacctacgatcaacaatttgcccagtacttctctatgcagtttccgacgcaggaggaaggtaaccactggtacgggatccttgcctccgtgcaggtatgtggcgaaacgctgttcttatgcctgatgccatggttcgttaaccgcaccggagcaaaatgggcgctggtgattgccgggacgatcatgtcactgcgcatcgtcggttccgccgttcaactgggaccggtatggattgcagcggttaagatgatgcacgcagtcgaaaagccgctgattctggtatcaatttttaaatttatcgctgctaattttgataataagctgtcgtcaacagtatacctgctggtgctgtttgtggcgtctatcgccactacaatctattcgccggttgccggctatctttacgacacgattggttttgccgaaacgtatctgattctgggttctgtcgccggctttttcacccttgtctctgtctttacactacgagagggacgggcagacaacgccataacacagccatcgacggactctgttacagggtaa

SEQ ID NO: 378526 - DNA, 1083 bp, Salmonella enterica
atgaaaaccagagcagccaccctcgcagatgtggcacgtcatgccggagtgtcttaccagactgtctcccgcgtactcaataattcagcgaatgtttccacaaaaacacgcaggaaaattgaactttccattgcagaactgaagtacgttcctgaccgtgtggcacagcaactggtaggcaaagaaagtaaaacactgggacttatcaccacttctctggcactgcacgccccttcgcaaatcgcggcagccgtgaagaaatatgctggtgaacgaggataccaggtactgatatcaatgactgatgacaacagcgccgacaccattcagtacgccattaacgagctgaaatcccagcgggtgaatcgtgtaatcatcaacacgccactggaaacagcagtggcggaaaatctggtggaggaaaatccggacgcgctatgcctgtttctcgacgttgacccatacagccctgtctttaacgtcaccttcaacccggctgaaggcgcgcgcgccagcgtgaagtatctgtatgaccttggtcatcgccagttttgtctgctctccggaccggagaactccgttcccgcccgcctgcgcctggacacctggtgcaataccctacgctcattccagctctctcccctggcggtgcactacggccgatgggatgcacaaagcggttacctggcaacgctgcaaatgctccgcgaaacgccacaggccaccgccctgctgatcgccaatgaccagatggcgctcggcgcactcagtgcgctccatcagcagaaacgtaaaatcccgcaggatatttcgctgatcggctatgacgatacatatgaaagcgctttcttcgagccagctttaacaactgtcgcaattgactttgatttacaaggaaaaatggcagtgcaacaattactgcaaacccagaatacacctcaggcttcacgtgcatcaacaatccttcccagtcgcctggtggtacgtaactccgctggcccgctttacagccaaaagatcgatctggtcaacattgccgatcagcttcgtacactggctaatcaactgacgtctgaaatttaa

SEQ ID NO: 378527 - DNA, 2049 bp, Salmonella enterica
atggacaggcatcttccgttaaatccctcagctccctcgttgcttcatggcgcagattacaatcctgaacagtggctgcatgttccggggattctggaacaggacatcatcatgatgcagcaggcgggctgcaatatcatgtcggtcggaatttttagctggtctgctctggagccgtcagaaggtcacttcacctttggatggatggacagggtactggataagctttgtgaagcgggcatatctgtgtttctggccacgcccggcggtgccagaccggcctggctgacggcgcgttaccctgaaactttacgcgtcagtacggcgcgtataagagcgttgcacggaggacgtcataaccactgtctttcttctcccgtctacaaagaaaaagtgacgctgattaaccagaggctggcacagcgttatgcccgtcatcccgcagtcctgggctggcatattaataatgaatatggcggcgagtgtcactgtgacctgtgccaacaggattttcgccgctggcttcaggttcgttataagactctggatgtgctgaatcatgcgtggtggacagggttctggagccatacctacactgactggtcacaaattgaatcgccatcgccgcagggggaaacgtcgaatcacggtctgaatcttgactggcgtcggtttgtgacagcccaggttaaagagttttatctgaccgaagtcgctccgctgaaagccgaacgcccggagttaccggccactactaattttatgtggtatttcaacgattatgattactggcaactgaaggatgtggtggattttgtcagctgggacagctatcccatgtggcataaacaggaggacgagcgggctgtggcctgtaagacggcgatgtatcatgacctgatgcgcacgcttaagggcaggccgtttgtgttaatggaatctacccccggtcagacgagctggcagccagtcagtaagctaaaaaaaccggggatgcatatcctctcatcgctacaggccattgctcatggtgctgatgccgtgcagtattttcagtggcgtaagagtcgtggtgctgtcgaaaaattccatggtgctgtggtggatcacgtcgggcatctgaatacgcgtaccgggcgagaggtcatccggcttggtgagatactcacagttctcagtccgctggcagggacgaagacccgggcgagggtggcgattatattcgactgggaaaatcgctgggcggtgaatgatgcggcaggtccgcgtaattgtggtattcactatgagcagacggtggtcgatcactaccgtccattctgggaacagggaattgcggttgatattatcaatgctgactgtgatctatccggctatgcgctggtgattgcaccgatgctctatatggtacgtgatggttttgcagaacgagcggaggcgtttgttcgcgctggtggttattttgttgccacctactggtccgggatcgttaatgagaccgacctttgtcaccccggcggtttccccggacctttacgcccgttgctcggtatctgggccgaggaaattgacagcctgagcgatgagcagagtaatgaggtgaaagcgttgccggacagcggtctgaaaggaggatggcgtgcccgggaactgtgtgaagtgattcatccggaaggtgcagaggtgttggcatgttataccgatgatttttatgccggttatccggcgctcacgcagaatcacgtgggtaagggcagggcattttacgtggcatcgcgtaatgatgatgcattccatcaggcgttcactgccatgctggttgttctgttgaaactgccccgggcgctggaaacgacgttacccacaggtgtggtcaccacccgtcgcacggacggtgaacgggagtgggtttttgtacaaaactatacgggataccgtcaggaactcgatctgtcggatgtctggtataatgcggtatccggtgagaagatggaaaaccgcctcacgctggttccccggggctgtgaagttctggtcagaaatctgtaa

SEQ ID NO: 378528 - DNA, 537 bp, Salmonella enterica
atggacgaaaaacagttgcaggctctggctaatgaactggccaaaaatctcaaaacccctgacgatctcagccagttcgatcgcctgctgaaaaaaatcagcgttgaggcggctctcaacgccgaaatgtcccaccatctgggctacgataaaaatcagtctaaactaggtgccaactcccgcaacggctattccacaaagaccgttacctccggtgataatccccagcaactccactctgaagcaggcttcgcagcattatgcggggtgagtcccgttcccgcctcttccggtaaaaaaaatcggcacagattaaatcgcggtggcgatcgtgccgccaatagtgcgctgcatattatcgcgatcggtcggttacgtacggacacgaaaacacaggaatatgtggcaaaacgggtagctgaaggtcactcgaaaatggaagcgctgcgttgcctgaaacgttatatctcgcgagaagtctatactcttctacgtaatcaaaatcgacagatcaatagtactcaaataacgacttga

SEQ ID NO: 378529 - DNA, 738 bp, Salmonella enterica
atggaatcaatgctgaaaagcatgacgagacctgccgacaaggttcacatggtcaggtacgccgatgattttgtgataaccggcagttcgaaagagctactggaaaacagaatcaaacccgcggtaacgatattcttgcgggaaagagggctgacactatctgaagaaaaaaccgcgatcgtttcgatatcacagggatttgactttcttggttttagtattcgtaaatacggcaggaaactgctgataaaaccagcgaaaagcagtatcaaatctttcctggacgttattcgaaaagagatcaaggcaggcgtagccttgcccacagcagcattaataggtctgctcaatcgtaaaataacgggttgggtaaactattaccggcatgttgtggcaaaagctgtcttcagtaaaatcgacaccgccatcttctgggctctttaccgtatgataaggcagaaacacggcaagaaatcaaaacgttggctttaccgaaagtactacggtaatagagggctgcgtcgctggatctttcacgccatctggcgcacgaaaaatggcgaagtcaggaatatcagcctgaaacgagcttctgcgacaccaatcaggcgtcacagacaaatccgttcagccgccaatccttacgatgtggaatacgtcgattactttaaagagcgaatgcggaaatatcctccacagcaggaggttgccgggtcaggaatttatctggctttgtga

SEQ ID NO: 378530 - DNA, 900 bp, Salmonella enterica
atggtaactttatctgcattaatttctgacctggattgcgagttgctgcgtctggggtataaagagtcgacgatggtctggtatcgccagtgttggcgtcgtctggagcaatatttttcggatcggggcattgaggagtttagcctggagatcgcaatggcatgggtcgacaccgcctgtgatttttttgcgaaggaacaggctggcacgcttaaacagaccgacatctatttgtttcgggtcgcccagatgctgggagactttgtagctcacggcgctgtgttgcgtcgctatgatcgccgggccgataagcttacggccgggcaggccgagttgatcggtaaattccaggccgggttacgtgccgggggttgtgcaatttcgacgatacgcacctatgggacactggccggagagtttctttcgtttgtggatacgcgcggtcgacttgctgactgcgatgccagaaccgtcgaggcatttgtcgccaccttgtccggataccaggcaaaaacggtcgaacaaaagctgtgcgcggtccgctcttttctcagatacgcaggtcgccaggggcaggtcaatgccgattttcggcaagtattcctgcgtcatactgcaccgatcgggccgttttctgatcaggatcatctgcaccagattttatgcaaacacgcacgaacggcccatgtgacactgagcgatcagcgtcgtcacggcatgcattcgctgtggcatacactggcgacccgattgatggaagttggaacgccgatcgaagaaatcgccgacattcttgggcatcagtttgtgggcacgacgggcgtgtatttgaagacgtcactggggctgctgcgccagtgcgtacccaaccctgacgccacatacggggaggtcctgtga

SEQ ID NO: 378531 - DNA, 978 bp, Salmonella enterica
atgaacgcacacctgacattaattgatgccgtcgaggcgatgatcgcccagaagcgtacggttggttataaatacgaggctgaggaagcagtcctctaccggtttgttacgttcacacgtagccagtctcccggactggaaaccatcaccgaagtttccgccagtgcctggatcgaggcggctcaaaagcgagcggtcacaccagcaacgttgcagggtctgacttcgccggtgaggcatctggctcagtggctgatactccacaacgttgcagcctatgagctaccgacaggcttgttgcgtcggtctgcggcctacactccgcacatttattccgacgcggaactggccgccttctttgcccagacggatcgctgtcattactgtagcgacgtgccgcttcggcatctggtcatgcctgtcttgttcaggactatctacgcctgcggtctgcgctgctcggaagcccgcttgttgcgcgcagaggatgttgatctggctacaggggtcttgctgatccatgatgccaaaggcggaaaggaccgtcagatccctgtgtccgaatcaattcatgttcggttggcgcactatcatgctcagttcgactggatggggcatgagtggttcttccctggccgacgcggttatcccctgaagcttttgaacgtttacaagaatttccgccggtttctatggcaggcacgcatcagccacggtggccgcggtcacggaccgcgagcccacgattttaggcactcatttgcggtccacaacttgcggaagtggttcgctgctggcaaggacgtcggcgcgatgttgcagatcctgcagacctatatgggacattactccatcgcggacaccgcctactatttgaggctgaccgctgagtcatatccgcacattgtcacgcgactggatgagacgatcggtcacgttgtcccttctctgaagggagaatcacaccatggcaactga

SEQ ID NO: 378532 - DNA, 321 bp, Salmonella enterica
atggcaactgattttgcactgctattgcagcggttccttacaagccacctggcagggctgcgtggtgcttcgcccaacacggtcgcctcctgtcgcgacacgttcaagcttctgatcacctatacgcgtgaccaaaaaacgataccgcctgagaagctcaccctcagttgtatcgacgtcgagatgattaccgggttcctgaactggcttgaaaacaaccgccagaacagcgtctcgacacggaaccagcgcctggcggcgatcagctcgttttacacctggatgcaatcgcaggagcccgcactgatggcgcggtgctag

SEQ ID NO: 378533 - DNA, 558 bp, Salmonella enterica
atgctggccactctttacgacaccggtgccagagtccaggagctggttgacctgaccgttggggatgtccgtctgcaaaaaaccgcagttatcacgttgacgggcaagggtcgcaagactcgtcatgtccctcctggtgccaacacggcagcgctcctggcgaactacttgaccgagttttgcctcgatttgccgggtcgtgatggctatccggtattcttcaaccaacaacacacgaagctcagtcgtggcggaattgcgtggataatcgacaaatatcgagcccgtatggatgcaccatccctcgcccgggtcaaaataagcccacatgtcctgaggcatagcaaggctatgcatttatatgaagctggtatcccacttccatacattcgggatattttggggcacgtcgatctgtcgaccacggagatttacgcgcgtgtttccaccgaagccaagcgtaaggctctggaggctgcatatgtcgatgtcatttccagcgatatgccagagtggaatcaggatgcggggctgctcgtctggctaacatctctataa

SEQ ID NO: 378534 - DNA, 390 bp, Salmonella enterica
atgcacgatcgcgccatgcaggcactctttctgttagcaacagaacccgtgactgaaagcacagccgatcaccattcgtatggttttcggccaaaacactcagccgcagatgcaatagaacggtgttttgtggtgctggcgcaaaggtcatcggcacaatggatactcgaaggggatattaaaggctgtttcgataacatcagccacgactggatgttaaggcatctctgcatcaagcgtaagatactcgcacagtggctgaaggcgggctttcttgagaaaggacagcttttctccaccgtagcaggaacgccgcagggaggattatgttcagctgaacataatcctccttatgaacagtgcaggattatgcacagcgtttgcctgtag

SEQ ID NO: 378535 - DNA, 780 bp, Salmonella enterica
atgctcaggcaacgtggttcactgacggtctggcctgatgaatcagctattgccgcatggaccggcaacacacagcctgaaggtcgtggtcggtcacttcactacaccaatatggctattaccacgatcctgatgatgaaactgccgccccgggatttacagggcttcgttgactcaatttttaagctgatggaactgccgctgtgctgcccagactactctctggtcagcaaacgggcaaagagcgtcaacatcagcataaaaacgccaacccgtggtgaaatctcgcatctggtcatcgaccctaccggtctgaaggtcttcggcgaaggcgaatggaaagtcaggcagcacggggctgataagcgtagggtgcggcgcaagcttcatctggccgcagacagtgagacgcacgagattatctgcgctgatttatcgctctgcggtacgacagatgcacaggcactgccggggctgattaatcagactcacagaaaaattaaagaggcctcagcagatggtgcttacaatgtctgctactgccatgatgcactgatgaagaaaaaaatcaggccactcatcccgccgcgaaatggtgcgcaatactggcccgataagtaccatgagcgtaaccacgccgtggcgaatcagcacctgagcggcagtaatgaggtctggaaaaagaaagtgggttatcactgttgctcattggcagaaacgacagtgtaccgtatcaaaaccccgctgggagcctgcgggactatgacgcgaggtgggtaa

SEQ ID NO: 378536 - DNA, 2100 bp, Salmonella enterica
atgaatgatgaaacattaaaaaaatatgtctcccggttagaaatgcgtatgttcaaacgcgtcccagttatccaccagacggaatcctcagagtgcggacttgcatgtcttgcaatggtttgtgcccattacggtaagagtattgacttaatttccttacgacaacaatttaatctttcttcacgtggttcctcgttagcaagcatccgtgcaatagccatgcagatgggaatgactacccgggcattatcgctggaactggatgaacttgataagttaaggcggccctgtattcttcactggaacttcaaccattttgtaatattggtaagtgtgaagcgtaaaggttatattttgcacgatcctgcaaggggacgaattaccgtcagtaaagaagaagtctcaaaaagttttaccggtatcgcgctggaaatctggccaggaagttcgttcaggagtgagcgtgttaaaaagagactgaatctggtaaccctgataaacagtgttcacgggataaaagggacactgttaaaaatttttgtcctgtcgttagtggtggaagcaatcgggttaattttaccaatagggactcagctggtaatggatcatgcgcttcctgccagcgatcgggggctactgtcactgatatgcatcagccttatgttttttattttactgagggctacggtaagcacttcccgcgcatggatctcattaattatgggaacgcttatcaatgtccagtggcagtcagggcttttttcccatttattgcgccttcctttatcctattttgagagaagaaaacttggcgatatacagtccagatttggctccctgaatacattacgtaccacattcactaccagcgttgttggggccattatggatggaattatggttggtggtctgctaatcatgatggtgctgtatggtaagaaccttacctgggttgtactggggttcactgtagtttatatcgctattcgccttttcacttattcatattaccgacaactttctgaggagcagttgattcgtgaagcacgggtttcgtcatattttatggaaaccctttatgggattgccgccgtcaaaatgcaggggatgacagaccgccgccatactcactggtttaatctgcaaacggatgcaattaacaccggaattcgtgtcactaaaatggatcttttttttggtgggttgaacacgtttgtcagcgcctgtgaacaaacagctgttctctggcttggtataagtctggttatgagtaatgaaatgacgattggtatgtttgttgcctttggcgcataccgggcgcaattttcagaccggatctcaactctggtgggatttctgctccagctcagaatgacgagtttacataatgagcgaatctctgatattgccctgaacgaacaggaatcggtaaaaccagatattccggttccggagaaaatagcgccagtatccctggcggcgagatctcttacgtatcgttacgataaacaatcatcccctgtttttagcgatctgaatctctctatttctccgggggaaagtgttgcaataaccgggccttcaggatcggggaaaacaacattgatgaaagtattatgcgggctctttgaggctgatactggagatattcttattgacgggaccgatatacaacagacaggggtaaataattacagaaaaattaccggctgtgtgatgcaggatgatcgactgttctctggaaccattcgcgaaaatatttgtggattcgctgaaaatatcgatgagtcatggatgattgaatgtgcgaaagcaagttttattcatgacactataatatcaatgccgatgggatatgatacgttgacaggggaacttggcgagggactttcaggtggacaaaagcaacggctatttatcgccagggcattgtatcgaaaaccctgtattttatttatggatgaagcgacaagcgctctggatagtgaaagcgaaaattatgtcaatagcgcgattaaacgcctgaatataaccagagtaattattgcgcacagagagtcaacgatacaatcagtggatcggatattcagcttaggctaa

SEQ ID NO: 378537 - DNA, 1275 bp, Salmonella enterica
atgttccgtaaggaagcacttgaaggccgtcgaatgacatggcggggaaacgctttattactccctggcattccacctttagttgtgacgatagtatgtctgttttttctgttctcatttctgttttttgtgattgcggaggactacacccggagggttactgtcatcggcgaaataacaacatggccgagaccggtcaatatttactccggtgtccagggatttgttgtggagcgatttgtaacggaaggtcaaatcgtaaaaaaaaatacaccgctttatcagattgacgtcagcaaaagtacccgtaatggtgttgtcagtaccagtcatcgctctgatatactgaaccagattcgccaggtggataacattattaccgggcttaaggatagtaaaaaaaccactctggatacactggaaaaacaaaagatacagtatagcgcagcactgcagcgctctactgatatccttcatcgtgccgaggacgggatccgtatcatgaagcaaaatatggataattaccggcaatatcaactccgaaagttaattacaaaagatcaattgacaaatcaggaaactatttattatcagcagcagaacagtcttcttgggctgaacagccagaatgaacaaaatgctttgcagttaaccagccttgaaagccagatacggattcaggcagccgaatttgataaccgaatttatcagatgacgttgcagcgttatgaattacagaaagagctggtaaataccgatatggagagtgccgttgttatccgcgcgttgtctgacggtaaaatcgattcactgagtgtgagtaccggacagatggtcagccccggagacagtctggttcagattttgcccgataacgtcaaacaccactatctggtgctctgggctcccaatagtgccgtaccttatatttccgctggtgataaggttaatattcgttatgaggcgttccctgctgaaaaatttggccagttttccggcgtcattcaatctgtatcacgggcaccggcaacgatacaagaaatgagaacttatcagggagccccccagaataccccctctctgtccgaaccttattacaagatactggtcaaacctgacagacaaagtattacttatggagacagatctcgcccgctggagaatgggatgaaagcacagactacgttatttcttgaaaaacgaaaaatctggcagtggatgttgtccccattttatgacatgaagaacagtacggcaggtcctgtaaatgaatga

SEQ ID NO: 378538 - DNA, 210 bp, Salmonella enterica
atgaaagagttaaatgaacaggaaattcagtttatttcaggcgctggagctgcagaagatgggcaaaaaattgcaggcatgattggtggcgttgtcgacgggataacaggtatctttgggttaaagtttggatttaaagatatttttggttcgatcggtgggttgataggatctatcattgatgttgctaataacaaaagtaagcactag

SEQ ID NO: 378539 - DNA, 192 bp, Salmonella enterica
atgtatgttatgacttgtgaagaattgaaaaatattaatggcggtaaggaggaggacgtcatctttcagcctttaccgggaactaattttccatgtacaaaagatgcaccttttgttcccggtgtaccaggctacaaaaagaatgatgtaccctatgaagctacaaagtccagtacgctgtcagttttgtga

SEQ ID NO: 378540 - DNA, 297 bp, Salmonella enterica
gtgaaagaactaacatataaggcatgtgaaaaaataaatggtacgggtattattggtgctataggaacggttatttctggggctgttaacgttgctaatgctgcgactggaggccatctgggaagtggccttggccaacaatggggggccgagccttattgccggaggattgcaaatggaaatgccaatgatgcgacacctgatgcttataagactgaccctggagccattaagaactacaacgattgtatggcaaaccccacgtcatggggattcaagaaatcaggtccgtggtga

SEQ ID NO: 378541 - DNA, 282 bp, Salmonella enterica
atgtacggtaataacctgcgcgcctcctgccgccgtatggagcaggagggatgggtacgaacgctgcgccccccgaatctacagctggccgtggagctgacgtatgcccgctgtacacttgccatcaccctgctgaccgccgaacaggtgcgagtccgtgcggaacaacgcgcggcgcaggcctccatcacaacggtagcagatgtgccgttggccagaaactcaataagtttggtgcgagtaaactttttgcgcagtaatgccttgcctgatttatcctag

SEQ ID NO: 378542 - DNA, 846 bp, Salmonella enterica
ttgatcaagattgcccgcaacaccaaaaacgcaccgcaaagtatactttccacccagacggttgccttctctcactataataacctttctgcgcaattaccgattgtgccggagagcggaaagctggtgtcaggtgatattaaggaacagactgttcagtgcttaaacaatattaaatccatcctggaaaaaattgatgtaccttttgacgacattgtgaaaatcaacgtctgtatgactgatgccgtcaatattgctgccttcaatgaggtgtataccacctttttccctgactccgccattgccagagctgttgggtatttccctgcccgcagcatcatgatagtgccagcgctgctgatggatgcgctggtgcaggtagaagcagttatctcacacggtgacggtactccaccgcaggttactgcagatcgacatggaattgtcattaagccgtacaactctgctaaagcgccggtagacgcatactccacacaggctgtcgcgttttctcactacagccatattacggcgcagctcccctgcctgcctgaaagcggtaagctggtagcgggtggcgtgaacgctcagacccgtcagtgtctgcaaaacattaaagagatcgtcgaaagtacaggtcattcgctggcagatgttgtcaaaatcaatatctgcctgaaaaatatcgatgacatggctgtggtcgatgacgtgtataccacattcttcccgaccggcacaccagcacgcagaacgctgggtgtatcatggctgccggaagacgtgctgatacagattgaagccgtggtatctcatgctgaaggaaccgccccggataaagtctga

SEQ ID NO: 378543 - DNA, 300 bp, Salmonella enterica
atgaataagtttaaccgtgtattgcccattaataccgacaggggcccaaagagcatcggcccctgttctcaggccgtcgccttctcccattataataatctctctgcacaattacccattgaccccggcacaggggaactggtggccggtgatgtcagggtccaggcagagcaatgtttcagaaatattgaagctatccttgggagcatccatcaccccatggatgatattgttaaagtcactctttttctgaaaagtatcaccgattttgatgccgtcagtcttgtgtacaaaacctag

SEQ ID NO: 378544 - DNA, 1005 bp, Salmonella enterica
atgtcctatagtgttatagatagtgtaaataataagggtttgaaacttaccccaaatatagacactctaatggataattctttggtttttaggaattactataatcatactgcagccacattccgtgggttaagaggacaattaacttctgcatatcaatataaggatggtattggagcacacaatgacggtttttttgaaatatctaatgaaaaagttaaagcaacttttgataaaaggctcgtttctttacctgagatacttagctcatccggctacaaaactatctttttatcatccacggaaaaaaatagtactctcaatgcaatgctaaaaacattgtcttttgatgaagtttatggaatgggagattttgagttctatcaaaacgatcgtatgactgataagcaaacatttttatcacttaagaaacttgttgaaaaaaataaagggaataatttttttatcggtgtttatacttcaggaacacatcatggtatggatagtccaaatttacgctataaagatggtatgaattcatattacaataagttttataactttgatcatcaattaggggagtttattaattatcttgattctaatggtttaatggaaaatacattattgataattacagcagatcatgcaacatttcccactccagcgtttaatagggcattcggcacggatgctaaatattttattgataccatccctcttataatatttggcgcagggataaaacatcatatctatgatgctaagggcgcaaatagtttagcattggctccaacgattctaaatatactaaatattaataaccgccctaattattttctgggatgttcactattagatgttaaatgtaatagccgattttataatatttctgcaattggaaattctttctttatgacaggacctgaaaagtatcctgattataatgttaaagaactgaacgtttctgaagaaatcttgaacttttataatgttagtggttaa

SEQ ID NO: 378545 - DNA, 243 bp, Salmonella enterica
atggattacgaaatcaggcaggaacaaaaacgtaagatagccggtttccatatggtcggcccatgggaacaaaccataaagcagggttttgaacaactgatgatgtgggtagacggaaatcaaatcgtcccgatcgaatggatagccgtttactacgataatccggatgaagtgcctgcggaaaaactccgcttgcgataccgttgtttccgtagcggaaaattttgtcctgccggacaatag

SEQ ID NO: 378546 - DNA, 201 bp, Salmonella enterica
atgagatcgaaaagatttgaagcgctggcgaaacgccctgtaaaccaggacggtttcgttaaggagtggatcgaagaaggcttcattgcaatggaaagcccgaacgacccaaaaccgtctatcaaaatcgttaacggcgccgtcacggagttagccgctcccccttgctcgtcggcatcgcttgcgatcgggaaaaactga

SEQ ID NO: 378547 - DNA, 1230 bp, Salmonella enterica
atgattattcataattatcgaagcattattggccaattttttccgctccagcaggaaaataatgaagtccgtacagcaaatctaacccaggacagacctgtcggggaatttatcaaaatggatgccctgccgggtgatagtaaaagtagcattgagaaaatgacgcaccctctgggagggtacgatgaaacagggagcatgtcaccttatatgatagtgctgcttggcgaccaaagagcgctggattttgccgagaaagtgcttcaggcaccgagacagcgcttgttggacacactgggtatcgatgataataataaagcagatcgccacacccggctacatagcgaactggaatcccttactcgcttctacccaaataatcctgagtttgaacccaaaaagatcacattaaatgaccagccttttatagagcaggagcctaccaaaccttactttgctggacaaagagttatcactcctgatttcaccacgtaccgtgcagagcaagaaaaacaaagaaataatcttttattatgtaaaacgcgagatgatagcgcgctgtatttcaatcaaaccccgatcattgagctaaaaaggtacaacgatgatgtatttgccaaagaaacagcactgcgtgctggcgacaactttttgaataaaacgcaatatttcaccccaatggtcgagtatttaacccagttcagcaaagaaggggatattttggtacaaaacccctttgaaaccagcagcgataaaaatacgccgcacttacaatttattcctggcgatgtccctttgcccctgttctatcaaaactcgcaggtgttgattgatgacaaataccaacaggttgactggcatttacctaccctggctgtgactgtggatagccgacaacatgactggcgagaacagacagaacgggtacagacggtgtgccaggagttgctggctaatcaacacatcagtactacaccagtgctcaggaatctggggaatggcctgataaaaatgtatttgatcttcaaacaggacggtagtgatctggcagcagaaactatgcaacgtgccccaggttggctggagtcctgcggcattttcatttccaatacgccaaaagcagttacgttcaccaccctgggggcagttcaatattatgccccctatggggtcacggataaggaacaactgctgacaagtctggtacaccatctcatcaacagagcataa

SEQ ID NO: 378548 - DNA, 798 bp, Salmonella enterica
atgaaaacctcgcatcaaccattttcaagctttataggtcatctgaacaagtcagtgtacgcaaaaaaaccacttacccattctttatgttccgggcgcgttagtttttcccatataaaagccatcgataagaaaatcgccgaatgcatcaaacatggaatatatatttcagctactgatcagttacagttactgcaactgagagatattatcgtgaaacagaagagtcactgcactcagaaaaaattagcgaaatttgatgaaatattaaaaaatctgccagcaataaaatccgaatcatgcaagatatgggagttaattactgaatatcaaaacatcaacgcaaaaaggatggatctaaagaaacaacgcaatgatagtttccagcgtttgtattcatatttcaatgctatggctgattatgattataatgttccgcccgctgtaagaatgctatttaaaagattaatagcagctaaaaatggaatgcgaatgcttgcagaattccaacatttcacacaaatacataatgttacaatacccattaattgcagcatacctgataactgttcaggaatcaaaaatagacagcaggctcttaccgcacctccatcaatttcattgaactgggctgaaatcagcaataaaattgatgaaatcttcatgttggatttagaactgtataattataaacagaatattgatcagttacagaataaaataaaggaaattgcaggcactttggttgttttaaataatgcagagtacttagaatacctaaagtcaacggctggatag

SEQ ID NO: 378549 - DNA, 1167 bp, Salmonella enterica
atgaccactattaccagagaacagctacacgaacgcgagcaggttcgccgtgaacatgctgaatggtctgatgccacgttcggcgatgttggtccagtcggtccactgaagcacctctcaaaagaagcacttgaggccgctgccgacccatccgatccgcttgagtgggctgacatgcagttcctgctatgggatgctcagcgccgcatggggctttctgatgagtttatcaccagagcgatgattgaaaagctggcgataaataaggcgcgccagtggccggagccgaaagatggtgagccgcgactgcatatcaaagcgcagccagtgtcggtagttcctgatggactgcgacaggcactgagcaacgctggcatagctgcaccagagtcagatgaaatgctggcagccacctgtgaaaagtatattcagatgctggtcacatgggtaaaagaccggaagccgttccagccagcgccggtaatgccagcggagctgcaccctgatacgcaaaatctggtggccgacttcagcaccgccctggctgagaagttgtacaaggcccaattaaaatacggctacggcgctgactggaaaaaggatggctgggcaacgcagtgcctgtcgcattttcaccagcatattgccaaaggcgacccccgcgacgttgcggcttactgcgcgtttatgtggcatcacggctggaaaacggagtcagtatcagggccggtagtgccggatgatggccgcgctgaatttgaggcgtggatgcttaagaagtgggggcgcgagcggcaagaatatgatttcgcaatgggtaagtttcttcatggcgaagactacgctgacagctacacgcggcatatgtggaaggcatggacagaaagccgcgccgccatgcttcagagtaaataccgcgatctgtcacaaccagtagatccgcaaatttccgaatacgagaaaataatgcttcaggctggcaactctccggtaattccggatggttacgcacttgtccccgtcgaaccaacggacgaaatgatagctgcagcgatgaactgcgaagatgtgctgttcaatagcgatgagtcattctgcgtacagttcgggaatatctacgaggccatgctcgcagcagcaccgcagcaggagggaaataacggatga

SEQ ID NO: 378550 - DNA, 474 bp, Salmonella enterica
atggaatcgcaagctattctggatatgtgttgtggctcccgtatgttctggttcaacaaacaggattcccgcgccgtgttcgccgatatccgcgccgaagaacactcattgtgcgacggtcgccgtctggttatcagtcctgacctcattgctgattttcgcgcgctaccgtttgctgattcgtcgtttccggttgtggtgtttgatccgccgcatctggaacgtgtcggtcaaacggcctggatgggtaaaaaatacgggcgcctgaataaaaaaacatggcgcgcggatattcgcgccgggtttaaagaggcattccgcgtattgcggccacacggtgtactcatttttaaatggaacgaaacgcagattccggtaagccagattttggcgctgacggacgtaaaaccaattattggccagcgcaccggcaagaacgacaaaacacactggattatttttgtgaagggctaa

SEQ ID NO: 378551 - DNA, 762 bp, Salmonella enterica
atgacagcactaaacaaacaggcgctgcgtgaagcggcggagaaggcagggaaagataagtggcaggctaagaaaataaatggcgacttctatgtcattcgcagcggtagttacataaagcaatgcggcatcacatcgtatcaacctatagcggagattgatcataagccagtcagggactttgttgccatggtcaacccggcaaccacgctggcactgctggatgagaatcttcaactccagcgggaaaaggacgcaacagaggccgtggcgctggcgctgcgtgatgatatgcgacaggcacgggagcaactggaagccgcagaaaagcggaacgccgaacagcgtgagtattacgagggcgttattgctgatggaagtaagcgcatagcagaactggagaacagcgaaacccagcttatcaatgagcgtgatgctgctgaatctgcgctggcagatatgtaccaggccgcaacaggagagcgtccagaatggagcaatatgtttggttttgctgacgccgttgatgtggtggaagaacgactggcgacgctggaggccaaccaaagccaaaccacgccaacaggaattcagctcatcacagaagccataggtgcgcacggctatatcgttggctgcctgttgcaaggtcgccctgatttggcgctggaagaatcgagaaagtgggtatccgctttcggtcaggcggcggaaatagttagtgcgcaagacgccactggcatcaaggttaaggagtcgtga

SEQ ID NO: 378552 - DNA, 234 bp, Salmonella enterica
gtgaacaatccattttttattaaatgcctcaaagattctgaaggttggtggactgaaggtgaagtgtacccggctcatgtcgttgctggcggctttattcaggttggcgatgatgacgatccgaacggagaagaatggagcgcaactcctatggaatatctggaagacggttcgatcgtttatcagattggtggcattgagggagaggttttattcgaggaggcagcccaatga

SEQ ID NO: 378553 - DNA, 243 bp, Salmonella enterica
atgaaaattgaatatcaggacggcggagaggaatcgcgccttcttataaccagttggatttttgactggagggagcataaccgactggtagatgaagttctgttttgcgcgcccaggctacgggcagtggatgaaggttttttcaggagaacgacggtcatttctggtgcaacagcgtgggtcatgtgtgcagaagtaacggttgaagaaaacgggtatgaggtcaggagggttagccagtga

SEQ ID NO: 378554 - DNA, 396 bp, Salmonella enterica
atgagtagaaattacacacacgaagaacgggaagagatccagaagcgcttaacggatctggtaagaaagaatggtcgtatgacgtctggggaactgcggagggtaacagggttaaccgtttttacagctcgtcattatctgagcgaggcggaacgctgtggggatctgtatcaggcgggcagaagtggcattttcccatcggagcgagacttccggatctggaagcgaaagcaggacgacgccagggtggagcgttttctgaatgcaaagttggtcgccggggagccttacgacagaaaccggaattctgtctgtgaggaatgccgtaacagttacgtaatgcaacgcatcctggcattttatcgggggtatcaacagggagtgatcggcaaatga

SEQ ID NO: 378555 - DNA, 2301 bp, Salmonella enterica
atgagtggtttattaccgtatttcgtgaatctgcgcgccaaagtgaaatccggactgaaagatgttgttttctggataagcgctaaatcagacgccagagcattacgtgaaatggaaaacgcgctggaagacgcggatattaaacgcagtgcatttttcaaagacgccatcattaccggacttcctgtatataacgatctgcctcaagaaggtgaactggatttcacctggtgtgagcgttatgcattcagtgatgacactggtgcctggctaccaatagcgccagcgcagccggaacagtcagaatccgctgccagtgataatgccagcatcagcgaggtacatacagatgaaaacgccaccgatgacaccgattccggcgataccaccagtaccgccagtaccgacacaggagtcgctaccacagccgccaattccgacagtgccaccgataccgctggatctgccaacacagcagccgacaccagtgatgaagtagcgggtagtgaaatagccactgatatagcccactcctgcgatgtgaacgttagcggcgaaccaatgactgaagttgcgaagggcatggactggccgatgaaggatttacccctgtctgtgcgctggatggcgcagaagggtatggacagcaaggttcttttcctcaagccagcagagcgggaacgactgacggaaataatggaggcggacgagaataacaaccagcatctgaccaacattaaggcgataaccacagaagagacggcgcccgatattaacaaactgacgacgtaccatcttcatcgtctggtcactgcgtttgacaaagtatctgaaaaagttgagcgcatggggccattcatggctaaaaggtttgtccgggcatggcttgatacggaatacatcgatcaggggattctggttaatgagtggtgcgcaggcagacacgtatcccgtattgagaaaccgacagcagccagtgtcagcgaagtgccggtaacgcagaaaaccccggcaatcgaagtggcggtaactgcgcgtccgcgccgtagtgaaaaaccgacacaccggacgattaactatgagcttgcctgtggtttctatgaagatctggatctgaataatctgcgtcctgcaatggattttgcaaaacgtatcattgccgaagaccgcggagactggaagcgaatgtcgatgacagttggcatcattcccgacatcaaaggctacgaccgacaaaccattattgacctggtacgtaaagccccctcagccgttcacagtggtagtccggagcttcgccgtacatggtgtgaaagtttcctggcagttcatggtgtacgcgatcctgactggtacgaacatacgcccgacaacgcccccgcaacccatgaagaaaactccgcccggattcgcaaggcgggcaaatcccttcgggatattaaagaagggagattcaatgatgtcgaagaaaaaccgcaaccagcagccgtactggcagatgaaccagcaacgtctgaagcagtggaacaggacacaactgaacatcatcagaacccgcagccgctggagaatgagccacctgtaagccagacagaagcaggctatcagaaaattcgggcagaactgcacgaggcacgtaaaaacattccccctaaaaacccggttgacgttggtaaacaactggcagccgcgcgcggtgaatatgtggaaggcatcagcgaccccagcgatccgaagtgggtacacaacgattacagcgcctcaaatgaaggcgaaaaaacggaagtggctaccgacagaactgaagacaccgctgatgaagttgaccattcagaggagttttcgaacctggccgagcaggaaaacaaccattccgaaccatccacagaccataacgaaccagaaacgccaaaaaccggaccaaaaggccagcaacccgaaccagtaaccaaagttgctgatggtgtttttgatgcgtctgtattctttgcgactacctcaaatcagggcgaaaaaacagaaatcccaccgcccaataatgatgaccgttcgcaggaatacgcagaagaaaaagcgacggatgtacctgccacagcggaatcattactgcacgaaatggtacgtttgcagtcaataaataaccagttactggaagcctgtattgcgtatcagagccgggcggaaaccagacaggaaagatttctggatgcgcttttctacgggataacacgctttgcataccagtgggtggaaggtgaggaggatcgggaatctgaagaaaaattacggggtgattcatga

SEQ ID NO: 378556 - DNA, 243 bp, Salmonella enterica
atgaacgcaccacaggagaaaataccccgcgaatacaccgaaaaagaggaaagagcgcttgaggaaaacctgacgcctgaacagcgccttgtggtgtgcagagtttttaaaagcgttagcgctaagggtgtcagtaattccagacacaataaaagaattgagtttgtggaatatctggaaagttttattaaccgagttgcatggctggcgctgacccagagagaaaaggagaaattaagatga

SEQ ID NO: 378557 - DNA, 573 bp, Salmonella enterica
atgaataacgcaatggttgatattgaaacaacaggcaccgcgcaccattcggcaatcgtatctgctgctgcctcggtatttaatccgttaaccggagaaatctgtgcagaagaatatataaaattcagatggaaagaggactgcgaaatttgtgggggaaaaatagatcctgcaaccgtggaatggtggcttaaaaagtcagcagaagcgcgggcagagttaattacctgcgacaggcagttatctccttttgatgcgctgatgcggctttttgattttatccgaaagcactgcgatgaaggacctgtttatgtgtgggctaaatcgccgtcatttgatttatcgcttatcaaagacgcagccgagcgctgcggcattccagcagaaacgatcccgtggaaattctggaacgaacgcgacgtccggacaattgaaggtgtcggcgctcagttaaacatccagcttccttacaactacaagaatgcaactcatcacgctcttgaagatgtacggggacaggtaagcaacgtagccacggttatgagttttctgaacgaggcggtggaggtgtga

SEQ ID NO: 378558 - DNA, 156 bp, Salmonella enterica
atgaaaaattacacattacctacaaataacgcagtaaggcgctttcgctattaccagaaacttacggcattacgcatgaatccaaaaatgcagttttgtctggaagtggagaagtgcggaggtatgaataaattaacccggagtgtaaataaatga

SEQ ID NO: 378559 - DNA, 198 bp, Salmonella enterica
atgaaaaatcagcagatagaaaaagtcagaaaaggaatcagggcgtcgcaacgtatgcttggaataacaaacaagcggataaatgaagggcgttacgaacttgctgaggcgaacttgcggggtgaagtagcaatactgatcgcactggccgacaggattcgtgaagaaattgaaattaaaagcgacacaaaaaactga

SEQ ID NO: 378560 - DNA, 291 bp, Salmonella enterica
atgcttacctgtgtccggcgcacattcccgaccttgaccgtcgggaactccatcaactccgaccctgtggagggtaaaatggcaaatttatccaactctgaaataaaattacttgcccaggatatgattattagagagttaatccttctacttaacaaaaaggagttaacatatatacaaaacaatcttgataatgcctttaaatatatggattctgatacttcattaaataaccaagacataataagacttaaagaggctgttaatttcatgtttctccatcgtccttga

SEQ ID NO: 378561 - DNA, 603 bp, Salmonella enterica
atgttcaacgtaaaacgtaatggcgcaagcgtggagataactgaaatccccgcaagcattccgttcagtgtctttaaaaatattgccgatgaaaccggagcgactgaaacgctggcatgttacttcaaggataaaacagaatacgaagttattattcagcatacgaatgaaaacatggctggtactgttgcgtggatggcgctggaaaagcgtgatgacgtaataacgggagatgctggcgctgatgttggcgacgcggatatttccaccatcggtaaacgcattggcgttgcgcgtgtaaaacagcacatgagcgctcaggaactggaagatgccattggcgcgccggaaggttcggtattccgttgggagactggtaaaattgtgccatctgcaatggatattgcaatgctggctgatgttttaaaatgtaataaagaatggctggaaataagcagtaaatataaaaatgaactgcccccggatcgcgagagcagaaacatggaagaaactgtaatgatagctatgcgggaagcatcaaggacgatggagaaacatgaaattaacagcctctttaagtcttattatgtcttggttatttaa

SEQ ID NO: 378562 - DNA, 549 bp, Salmonella enterica
atgcaggagttcattgccgataaagagttatctgacgccgatcacataccagagactgtgagcatagatgatgtgccgcctgcccaggatggcgggggatcagttgacgcagtggacgccgccaacgacgacgaacgcgaagaaggaaagcgaaagcgcacgtacgagaaaggagcgaatctgcgatttgatgggccagtgtccgggctttgctcgctggaaagaggtgctgcttatgtaggcttaacgaaaaccgcactacgagcagccattagtcgaggtcaaatgccaggtcataaaacacgtagcaatccagaagatgaaaaatcggatggcacttggtggtttaacgccaaggaatgggatgcactagccgatgaactaccggaacttgagcatccagagtggcatcactggaaagactactgggcgtatagcagacgggctaaaaaattccagaaggtgagcaaggagaattgtttagagattgatgggcggcgcgtttataagccccgcaaatcaaaatttgaacaggccaacaatagctaa

SEQ ID NO: 378563 - DNA, 342 bp, Salmonella enterica
atgagtatctcgtcaagagactattcgcaaaaattgcgaaaagtgagaaaagcagaaggtcttacccagaaagagtttgctgatttaacggggctttctttgagtacgattcggaactacgaatcaggacaaaagacggcaagagctgaaattatggagtcagttttacaagtgcaacgctttgaaaaatatacaatgtggatacttcacgacaagacgttccctcaagccggacaaatcgccccggctctctctcttgatggatcagaaaggcacacggaaagtcaggacttaacccagactacccaaaaatcacgccgatcatcccgcaatgctggctga

SEQ ID NO: 378564 - DNA, 990 bp, Salmonella enterica
atgtcgattaagcaactcaaagacggacgttatgaagtggacattagaccacagggtgcggaaggaaagcggattcgcaaaaagtttaccctgaagtcaaaggcccaggactatgaaaaatatatacagcagaattttcacaataaaccgtggctggaaaaaccagccgataagcgccacctttccgaacttgctgaacgatggtggttgctggatggtcagactcaggcatatggtgaaacttatctccagcgtctgaacaaggttatccgtgaaatgggagatccccgcgccagtgtattgaccaggaaatttttactggaatatcgaacccgtaaactcactgccgggttaagccctcatacggttaatcgtgatttaacggtactatcagcaatgttttcggttctgatacgagcggaagagttctatcacgaaaaccccgtgcatgggatacggaaactgcgggtgccgccatcggatatgtctttcctttccgatgatgaaatagacagtcttttgagccggcttagtggggatgataaacgcattgccatactttgtctttcaaccggggccagatggggtgaggcaaaaaggctgaggggagagaacatcgtcggaaacagggttatgtttacactcaccaaaaccaacaaacctcgcgcagttccgatctctgagcaggcgttaagactggtaaaaactaaaaaaactggtccactgttcaatgttgattacgtgaagtttcggcaaatccttaaagaggttaagccggatctcccaaaagggcaggcgacacatgttatgcgtcatacgtttgcaacgcactttatgatgaatggagggaatataatcacacttcaaaggatacttggtcattccaatatccagcaaacgatggtgtatgcacatttcgcgtcggacttcttacaggacgctatcagtttcaatccgctggctgaaagtgtccataaactgtccatctag

SEQ ID NO: 378565 - DNA, 165 bp, Salmonella enterica
atgccgcctttaaaaaaaattgtgctgctcctgtttttgggggcgatgctagccacggtaacgacacctgcattggcgctggtttgtcttgaggatcaccccgctaaagagtgcgctatatcgtgtgttgaggtgatgtggtttatgtttccgatatgtttttaa

SEQ ID NO: 378566 - DNA, 453 bp, Salmonella enterica
gtgataccggcagccgctttccattcaggaccggacgacagcgccttcaccggggtaccggtcagttgcggggtcggggtggacaatacaggtacgggggatggtgacaccgttgatacgacagccgtgggggcggtgattttgccgctcaggttctttccgctgaacggattacgcccgattgcggtagttgccgtggaaggcgtagacgtggcgtccggagatgttgctgcggacgcgaccacagcagccggggatttattgtttgctgttgccggtgtcagcgacggggaaacagcggcgtgcccgccagtggtggccatctggttcactgttgcagtggaagacgaaggcgaaaccggcggagtattcactgtgccattgcctcctgaaccggaagccgtgagtaccggcaccgccggaagaggatgcgtctcactctgccgcgtctga

SEQ ID NO: 378567 - DNA, 285 bp, Salmonella enterica
atgcaaactacaacccgtaaatctattcgtaataaacaaataaatattcgagcgactgatgaggagcgcgcagtaattgactatgcagcaaagttggtcagtaaaaatcgcactgatttcatcatagagaaagctgtgaatgaagctcagaatatcattctggatcagcgagttttcgttctggatgatgctcgttatcaggcattcattgaacagctcgaagccccagttcagaatgttgagggtcgtcagcggctgatggatgtaaaacctgaatggaaataa

SEQ ID NO: 378568 - DNA, 483 bp, Salmonella enterica
atggaaataaatgttactgcacctgagctgctgaacgaggagcatattctccaatctttcgattgcggaaatgatgtattaagcgactggcttcgccgccgcgctatgaagaatcagcacctcaatgcatcccgtacgtttgtgatctgccttgaatgcacaaaacgcgtagtagggtattattctattgcaacgggatccgtaagccatatcgatttaggtcgcagcctgcgtcataatatgcccgaccccgttccagttgttttattggggcgtcttgctattgataagtgtactcagggtcatcatttcggtaaatggctgcttaatgatgctgtaacgcgagtatctaatctggcagggcaggtggggattaaagcgatcatggtgcatgctattgatgaacaagcgaaagaattctatgaatattttggctttgttcagtcccccgttgcaccaaacacattgttctacaagatttaa

SEQ ID NO: 378569 - DNA, 138 bp, Salmonella enterica
atgtttattgtttatgaatattgcttgtatattaaaaaaagtgcctcccttgaggaaggcactttacccgacacctgcaatatttcaggtgtaaaagcagttttttacgccataatgaaaattaatccattgatttaa

SEQ ID NO: 378570 - DNA, 504 bp, Salmonella enterica
atggcttcaagaggacttaataaggtacagctcatcgggcacctggggcaggatccggaagttcggtatcttcctaatggtaaagcggtagcgaatttgtcactggcgacatcagatacctggaaagacaaacagacgggtgagccgaaagaacgtactgaatggcatcgagtggtactttacgaaaaactggccgatgttgccggtgaatatctgcgtaagggggcccaggtgtatattgagggcgaactgcgaacccggaaatggactgaccagaatggtcaggaacgttataccacagaagttgtggtttccatgcagggcactatgcagatgcttggcagtcgtggcaacggcggtaacgccagtgttggtaatggtcagcaacagggtgggcaggggcaaccccagcaaccggcgggccgtacctacagtggcacacctccgaaacagcatccggcgaatgagccgcctatggacttcgatgacgagatcccgttctag

SEQ ID NO: 378571 - DNA, 219 bp, Salmonella enterica
atgttaaattcaacgaaattatccaccggtatgctggcagcagaatatgctggtttgtctctgcctttaaaggtccttagcagccgtttcggtttctatatcggtacggaaaacgaaatgggtccggtatcccgcgaatccgtggagtatttcaccactgctgaactggctgaacgtgcactcgaacagggttcatggtcacagcgtgaacggctttaa

SEQ ID NO: 378572 - DNA, 465 bp, Salmonella enterica
atgtccggaaatactgacaaaaaagaagtgaactacttcaatttaaatattaacggcctgggatatatcggcaacgttcgtaaaatcgagaacggtaacagtgcttttacctgttgcactctgaacgctctgtgtggaccgaccgataaagctgactatgtgcgctttgatgtcactgttgcaggtaaagacgcaacgagtctgattaaccgttgccagaaagcctgtgatgaagacaagaaagtgatgattgcttttgtgctcagcggtgttaaaccggacattttcaccctttcgaaaggtgagcatgccggagaaaaccgggtcagtctcaaaacacgccttatccgggtagactggattaaagttgacggcgagattgtctacaaagcagaaaaagcaggttctacccctccggcacagaatcagacttcgcagaagcagtacgtggaagactcgttctga

SEQ ID NO: 378573 - DNA, 2025 bp, Salmonella enterica
atgcgccttttcctgtgtgagaaaccgtctcaggcaagggatattgcgaagttcataggtgccggtcagtgtggtgacggttttctttccggcccgggcgttattgtgacctgggcccggggacatctgcttgagcaggcagagcccgaagcctacggcgagcagtacggcaacccctggcggctggatgtgcttcccttcgtgccgcagcaatggaagctggaggtgaaaaaagacggcagggcacagttttcggtgattaaccgtctcctgaaacaggtggatgaagtggtgatagccactgacgccgacagggagggagaggtgattgcacgtgagttgctggaatactgccgttttcagggccgggttttccggttatggctgtctgcactggatgatgccagtatccgcaatgcgctggcaaacatatggccgtctgagaaaacagaagccctgtactgtgctggtgttggccgtggccgggccgactggataaccgggatgaatctgacgcgtctttacaccctgaaggccagggaggcgggtatcagcggggttatgtctgttggccgagtccagacgcccacacttgccattgttgtccggcgcgatcttgaaattgagaattttatcccaaagccatactccgacgttatagccactctcgtttctgacaatattgcttttccggttaaatgggtggcggcggcacagtactgtgatgaagaggggcgctgtattcaggccggaattgccaagcaggttgtggaactgtgccgccagatagcgtcggcgacgatcattgactgccagacgaagcggcagaagaagtccgcgcctcttgcgttcagtctgggttccctgcagcaggcctgcgcggaaaaatttggtatgccggcacagaaagtactggatatagcccagagtctctatgagacccataaactgactacttatccacgaacggactgcagttatctgccggtatcgatgcgggatgaagttcgtgctgtactcaccgcactcatgcagtcggacccgtcactgaagtcacatcctgctctggcgcaactggacatcggtctgatctcacgtatatggaatgataaaaaaatcacggctcaccatggcatcattccgacgaaacaggcgggaatcctgagccggctcagtaccgatgagcggaatatgtatcagcttatacgacaacactatctggcccagtttctgccgcagatggaagtggatacgacggaagcgacatttaacataggcgggcagttgttccgtacgaccagcaatgtggttgtggtggcgggatggaaagcgctctttactgagccttcccagacggcgcaaataccggccgacgggaacgatgataaagagactgtctcacggctgtcgccccttcaggccgggcaaacctgccgggtacagggggcggaggagaaacgtctgcagacaaaaactcctgtaccgtataacgacggaaccctgatagcggcgatgatgaatgctgcgtcactcgttacgaatgcggctctgaaaaaagtgctcaaagagaatgcggggatagggactgaagcgacgcgggcagggataattgatacgctggttaaacgcggatttctggtgagggggaaaaaggcgctgcattcaacaccgacagggcgtgacctggtgaatgccctgccatccgctttaaccagcccaggtctgactgcgttgtgggagcaattactggatgaagttgcggcagggcgggtgagtcttgatgattttatggcgaaacagaaggcatgggtggtacaactggtcagtcaggggaaatcgcagccgctggcaatgcagtctccaccggggcctccctgcccggaatgcggtggccgaacggtgcagcggcagggaaagaatggtgtattttttggctgtgtgaactacccgtcgtgcagagggatctctggaagtggtggcctgatagtgaaaataccaaagagcttgaaagtgaatctacgataa

SEQ ID NO: 378574 - DNA, 972 bp, Salmonella enterica
atgagcgaacatgaaaggaaagaatcatctgtagataaagagcagtacatcactgaaagtccacgtaatgaggtgggtgtattgcattcggaaatgaatattgaactgcatacccgatatgcaatcctcctttgggaaggacagagtatcgagaagaatgaaaaaggccggagtgtccgacaccgacgcatcattggtatgccattctttctgcatctcgtcggcgtgattaaccgggattcttaccgggataatccttttgctgatcagaccatgttcttactcgaagaagaattccggcgtggtatggaggcaattaacgggttgatcaagaaacttgacagtattcttcatgatattccggcccgaatctcattaacagaagttctgtcggtatcgcccgttaatatttcagtgtccagccgaacccctgtaggttatcgttgtgtctggcttctgatcggttttgaccagttggctctaaaagcttttcaggcctgtcactatggccttatttcacgttcccagcgtgatgattttctcaaccagggggctcgttttattcgcagagcttatgggcgcgcactcagctatcgttctttccctgtcactcgccgtgatgtttatgaaaagacggtggacagcctggatgcggtgaaacactttggtcacattgatccggcgataatgctgggggaaaaacgttcagcattctcccccccggttaaccgacgcagtattgatgcgctgaaaaaggggcattttgcagatgaggatccgcctgaaagacatattgtcgcagcagcagataataatgattcctctgaatccggggatgtaccggcactgacgcaggcgcagacagaagaagccacagccccagataacccggcaaatgaactgacggctaacacagttattgatatggatgatttatccacgttgttgcctctgtcttcggagccggagtaa

SEQ ID NO: 378575 - DNA, 240 bp, Salmonella enterica
atggaacagtcacttaagaagcgtattcttaaatatattcgtatcatgcaaccagtcaaactgtccaccctgctgtctgatttgaatattgatcgggagagttattacgctgccacactgtttcttcgtcaagaaaggaaaatcattcaggccggaagatttgggatcttcgccggagacgaggcttatatggaatggcgaacaaaacatggtcgtcagattaataataatattccttaa

SEQ ID NO: 378576 - DNA, 1107 bp, Salmonella enterica
gtgagtgaacacagtcagttggtggaagattttattcgggaaaaaatgttctcaagaacaggagaaactttcttcgattatgaatatgcagaggatgatatttatcaacaactgaatacgacaggcattcgactgatcagcacatttattccgggcaattcaagtttttatcttgtagaaagtcagcaagttcaggctgtagctattcatgacaaccataccgttatggtctacaaaggaatgcttgaatacatctttcgtattgtatctatgatggcaggcgctgaaagtcgtcatagagatcccgccacaaaaagatttatgccttgggaaggaaatacgggcagttggttgcagggtggcgagtttgactggaaaaatgagaaatactggtggttacgggagccagattggcgtcaattttttgataaaatagttgatatgttgttcacattcgtggttctccatgaaattggccatttacataacttacatggcgagagaagaacatttatcaataagggcgatacgccagcagcatctgataaccttttgattcaccgtgctgttgaagaagatggtgataaaattctggttgatcggcttgcaggacatgccagagaaataattgcggatacctttgcttttcagttcatgatagacgaatttaaatacgtcttttttccggaattaaggttacctagtatcgactcggctttacgaagtgctatggaagtggcgaacttcgtaacctgtctctatggcgtagctgcatatttctgggctttacattatcggaaacccatgactaatgactctcagttgaatgactatccatcccatgctttcaggcttgtgagtatcgaagcagcctcattagaacatggcttgggtacaggtttgcatgatcgggccgaagggcaaaggcttggaatagaaaactatttaactaaattgcctattgcctctggtaattctgattttatcgactggcgccggtcggtagactctaaagctagtgaggagcactacttcaaaatctgtgagattgtaaaggactggtcgaatggcttttttggtgttcgcgacgaagactggatgaggtaa

SEQ ID NO: 378577 - DNA, 1128 bp, Salmonella enterica
atgagcattgagcaaactggatttcgagagattttcaacttcgagcaccacctcacctcagaggggaggttttccattggcccctacgaaataactgtcagcaaggagctcattgggggggactttgctcggtcaaaacggttaatttttagtaataccttcgattcttccgggttcaagagatccgtgaaagaggaaccttccagctctggcatttggagcgtaacagctgttgtagcggagcatgaaaaactagatcaagcctccgaactctttcctgacgctccatgggggaatggagcctacgatctatcggtaattctttcgcttctcagcggtcgccatacgctcgttggaaatggtgtcgagccgtacttgcctgtgtcgcctgggtattctatcaccagtaaaaacttcttccgtgccaacccagtggtcgactgggaactgcttcctggtctgcgaaaagcgaaggtgggagaagctatggaagcggtgcttttggcaatgacgaatagcaatgtcggcgtgaaaattgcgatgggatcggctgcgctcgatgggctgtacacccgctggtacagcgactctggctccaacccttatactaagaaagtaaaagaggaggtcaaggctgcgagcgagaaatttaaggagcatctggaaaaagccggtgtgaatcagaatcttattaatgacatcatgccgcgtttgttaaacgttgcgaatgagtcagcgcttgccaagctcgctgcctttttgaaggccggtagcatgtatccagaaattccagatgaggaaacgctgaagcgactcaaatggctgaacgtccttcgtaattcagttgcgcactcaggctcgatcagattggatatctcggaatctcctgaggcatctttacgggtagcgggcgctgtagcacttctgctccaagacatttgccggatttacattgcgaagtacttactcaagattgaagactacggtgttgctaaggcgcagcaggccgtgatggacttcttccagtacgggacatacaagggccaagatatccttaccgaggaccacgaaacctaccaacaacggctgattgaccactacgaagaatttggcagtctcgacctttaa

SEQ ID NO: 378578 - DNA, 192 bp, Salmonella enterica
atgacgtctactatgagcgagaagcggaccaagacctggataaagttagagcacggtgctaatacccaaccacatcaccagcgtggccgaaatgcgttcaccaaagacgggggccacgaccgtcctgcgtatctgggcatacgcatcaaacaaccagcactgatgttatttagccccgacgtagccccatag

SEQ ID NO: 378579 - DNA, 1347 bp, Salmonella enterica
atgcaaacggaatctcaggcctggttgcagtcagaccccgcggggggcggtcaccgtttacctgcagatgacattattgactacacgttgtcgaagatgcaggcgcggcttgacgttgtagccagccagccgggtcaggaacgtaacgggctgctgttcacgggcaacattcacgacgcttatccccgagcgctgatactggatatccggctttcccctctggataaaatgtgctggataatgataaggcagtatgccctccagaacgatggtgccattttcccttcctatgatgatcttcagaaattactttcttcccccggttcaggactggcctcccgggatacggtgagtcgggcgctgacaatgctgcgtttgactggatggctgagtctgtgcaagcgggtacgcgatacggggggacgtgtccgggggaatatttatgcccagcatgatgaaccgctgagcgcgaaggacgccgaagtatttgaccccggttggttggaaatgctgggtaaggcttgccggcacaaatatcgtgaggtcagtaaaaccgcctggcgggttctggaggggatactggatgacccgatgatgcggcaccggcattcgcgtctgatggagatagcagagcggctgacccgaccgtcgacggcccgtgatgttgccagtattcagcagagtccggcaaacggactgaatcatggtgaagcgaaaaatgcgcaaaaatcactgaatccggatagcagactcagtagtgagagtggggatgaaacaccgggtctggataacagactcagtaataaatcagacacttatgacagagtccgtcaagcggactgcaataacgtacgttcttttacacagaaagtgattaaaaaaacgtacgtggactccgtgggatcgacaacgccatccggtggtgctatcccggatgggtttgtgtggcctgatggtctgcagcgtcttttgccagtaaacgagcaggcgatgctggcgggacagttgtaccacctgtatcagaaaaatgctgagctggctgagagcgtcgctctaacggtggtctgcggtgtcagggataggaagatcaataacccggtagcttatctgctgaccctgttgcgtcaggcgcgtgaaggccgattccgtctgtctgaggggggcatgaaatccgctacagcgccgtcatcctccccatcaacggccgttcccggcccggcacagagtatgggcttgaatgataagcagggaggaacctcggcagaagtgtatgtgccggcaccgaaagaagtgctggcggcgaaactggctgaggtccgagctgcattgcagattaatcggcgctga

SEQ ID NO: 378580 - DNA, 255 bp, Salmonella enterica
atgaagagtaatgacgaagatgtgtcgtttcgttactggcggactgatccgcgcagggtggggccagctgcagtcagaaaagcccgtcaccttttggcgcaatatcgtagggggaaaaaggtttacagcgaagtgggctgtagcggctatctgaagatcgatgtgggtatccgttggcgactgttgagtaaaaatcggggtgatgactggctatttatgtcccatcagtcttatgaccgtgagttgaagagatga

SEQ ID NO: 378581 - DNA, 567 bp, Salmonella enterica
atgagttattcactgtcgcagtccaccaaccagttgctgctcaccctggtgatggaactgaaatccgggaatcttcggcgctgcgaagcgctggggctcaccgctgaagaaatgcgtatgctgcgggaattgtcggcggacgacctgttgtatttgtctgaaagccgggtgaacctgctggatttgcgtattcatcatgaaaatctggggctgatgctgacccaggcgaggcgggagcagaagcggatggagcggattgaccgggcgctggcgttgggagcctccattgagatgatgcaacggtactttggcctggactcgtcagaggtctcggggcgacggcggctgggggggattcgtacgcgcaagggccgcagcagcgctgcggatgctgaactggagtcggtgctttggtcacagtggcagaaatccggggctggaaccccggatagcgtggagtcactggatgtgatgatgctgatggcggaaacccacggtgtaaacctgaccacgatatggacgctggtgaaagcctggtgtgccgttgaaaaacgggaggttacatga

SEQ ID NO: 378582 - DNA, 528 bp, Salmonella enterica
atgagcgggcttttatttatcatcaggcgcatggtgaagtctgcagaccgcaggggggagctggctgacgttacatctgtactatgccggacttattgcctgataaaagcacaaatggtggatgaaggtgtccctgcggctgagcgggagtatacctgtgcacggagcttctgcaatgtccggattgtcccggcctggttcagcgcactgactgctgtagtgtgtcaggctgtcggttgccggtggtatttcggtcgcctgccgggactgaagtttcgtcgcagcgtgacattctgtggtatcggcgagcggcctgaagtggctgggtgtctgttagtcctgttgtacggccaaatggagcgggacatggaaacatggcaaaaggtctgttgcagggaacgtctgaaaacggttcagacccgtgctcgggaggataaatggcgcatcagctggactgctgatctctggtccgccctgtctaaacaagacactttacctggtaaacaaaaaatatctgacatccgatag

SEQ ID NO: 378583 - DNA, 147 bp, Salmonella enterica
atgagtgtgggtattgatgatgcgatggtgcagtgggatgccattctgcataccgacctgcatatagctgagattcgtcatgcgcttaaggcgggggcgcctgtatcgcgccagcactggcgtgaagtgagggataaaaaaggatga

SEQ ID NO: 378584 - DNA, 1821 bp, Salmonella enterica
gtggctaaagctaaagtgaacatgttgaatcttggggacgccatgttacagggcgctcgtgagccgctgacgacatcattaacgccgataatgccgaccagtgaaatgccgatgatacttacgttggatgaagtggcgcctaaccccgataaccctcgtaccacgcgtaatccgaagtacgatgagataaaagattccattcgtgcacgtggactggatacggtgccaaaggtcacccgaaatccggaattaccgggttctccctatattttcagtgacgggggtaatacccgttatgaaattctgcgggaattgtttgccgaaactcaggatgaacgtttttatcgtttccatgtactgtttaagccttggccgggacggctggaatgtctcgtggggcatctggctgagaacgatgtccgtggggatctgacctttattgataaggcgctgggaattcgtaaagcccgctctattcatgaagaaacactgggaaggtcggtaacgttgcgcgaattgtcggatttgctgagaaagcagggatatccgatacacaattccctgatcagccgtatggagcacacggtggagtacctctatccatatatgcctgaactactggcatcagggttgggatatcctcaggtggttcaactgctgtcgttgcgtactgcatgtgagaaagtctggaaacaatacagcaatgaaagtgcagatatgatggcatctgtttttggagatgtctgtcggcagtttgacgatccggaactgtattccctgaacctgtttcgggatgaattgatcggcaatatgattcagacgttgccccatccttcactgaactatgaccgctggttaattgagctggatccaaaaacacaaaaccagcttgcattgtttggtgccccggagccagtgcctgaacatctgattctggcagaccatcaggcctggcataccggggatatacggaataaggaagctgtttcccgggaacagacactaataagtgagcccggtaacgatgatggtgctgaactcccagagcggaatggagctgttttattgtcctcaattcttccctccgtcaggaatgaaatccagtctggtatgtcgggtggtccggatgtaccgtccggcaaggtcatgctgggggatgacgaaacggatgatacgccctttttatcttcatatgcgtgcggagataccacgacaactgcagcgacgggaggcgttgttactgcgttctcacaggccaccggttcggtggttggtagtgctgctgttaccggggctggtattgatttgatcaccgacagtaatttattcgagtttcgggaaaataacgatcttaaccctccgtcatccccggtgctgtcagccattccgccttcttctgtcgcattcgcgaacacgggtctggagccggtcagcgatatctgggctatatccgctctgcaggatgatatagaacatcttcaggatatggcataccggctggtttttgagaccgcggaggcaatagggtgtgaagacagtatccaggaggataatagtccggactccgccggtttcgctgtttctccccacggcaatgaatttgttctttttctggcagggctgtcaggccagttacctaatcagcagttaaatatgtttatgttctgcatgaatttctttggctcacagtcctccggcgatgtacctgtgtttgacgatattcatgttgtgaaaatcatgcgacttattcgggtgattcgtcgtttgagggagcagcagcgccaggcgaccacgggtagagaagaggctggactgcaatga

SEQ ID NO: 378585 - DNA, 1413 bp, Salmonella enterica
atgggtgacatcaaaaaatcagggatgcgtgagacgcgtcgtgatgtgccgtatcacccggctgctgaaactagcgtcctcggcggacttatgctggataacgaccgctgggatgagattgcacctctcctgaaatcgactgatttttatctttcggtcaatcaggcaatttttcgtgaaacagagcgtctggtcagtgccgggatgcccattgacctgattacactttcggagtcactggagcgaagaggcatgctggagcgatgtggtggttttgcctatctggctgaactgtccaaaaatacgcccagtgccgccaatatcgtggcctacgctgaaatagtccgggaatgtagccgggcccgtaaactgatgaggctgggaagcggaatttatcagcaggccgccctactgcagccgtcagatggtaaaggtatttccacgcttcgtcaggtgacagacgcgctggttgaacagagtgaaaaagaactgtttgaactggcgcagcagaatacctcgcaggcttgctttagcattaccgcacaggtatcagatgtgctgacctggctggagtcagtatctggaggaaccggcgtgacgggggttcccacaggatttgcggagctggatgcaaaaacctgcggctggcaggacggtgacctgatacttattggagctcgtccgtccatggggaaaaccgcccaggcggttacacatgcgctggctgcattgaagggggggccggcggagaaaacagtccagttctacagtattgaaatgcctgcccaacaactgatgttgcgcctgatgtccattctggcgagggtaccactcacccgtctgcgcagcggtaatctgaccagttacgatcttgagcttgtctgtagtgcggcgggaacgttgtcgcagtgggaaaaccgcttccttatagatgactccacttatcagactccggcaacactgcgaacctccgtccggcgcaatgcccgtaaatatggtaagcctgccctgattcttgttgactatctgcaactgatggtctgtccggagaaaaaggagaaccgtactcaggaaatccaagatatttcccgctcgctcaaggcgctggccaaagagatgacatgtccagttattgcgctttcccagttaaaccgatcacttgagcagagggctgacaaacgtcccaacaacggtgatctccgtgactccggttccttggagcaggacgctgacgtcattctctttctgtatcgcgatgaagtttaccacgagaacacaccagagcggggtgttgctgaacttattctggggaaacaacgccagggacctttaggaacggtgaaagtccgctatgaaggagagtacacccgtttttctgaatatcacctggggtacggagcgacaacaacgtga

SEQ ID NO: 378586 - DNA, 204 bp, Salmonella enterica
atgatgaaaaacttcatgttaactcaggcatgttcattgggctgttgcctgcaaaggctggcttctgttcgtgataacgacgttgttggctcccctttgtctgatttgcccctgtttcttgtttatccccgaacactctggtgtctgctggttgccttcttcgcctgcctccggggagtgaacgcggaggtggttaatgggtga

SEQ ID NO: 378587 - DNA, 1188 bp, Salmonella enterica
atgcacaatctacccagagttaaccccgtaaacgtcgcaacaactgcggatgctgcttctttttctccactggcaaacgagtttccgcggtcaaaagttgcggcacaaatcctttctattatctccaccaagggcggcgagggaaaaagcacccagggtgcctaccttgccggtttcactgctgatgcaggtctgaaaacccttctgattgatggcgactactcccagccgacttcctgcagtatctaccatctggactacgaggcaccctgcggtctgtatgaactgctgacacagacggtcgacctcaacagtcctgataaaattatttcccgtacctgtattcctaatctggatgtaattgtatccaatgatcctgatgaaagactcccgggcgagatattacacattgcggatgggcgcatgcgtttgcgcaatgtgttgcagcatccgttattccgcctgtatgacgtcatcattattgattcaaaaggggctgccggagttatgactgaaattgtcgtcctggccgccgacagtgtggttggggtgataaaacccattctgccagacgttcgtgaatttcttcgcggaacggtcagactggtgaaccgtctgctgcctctcagaatgtatggcatcaaaatccctgatattcatattctgattaatcattttgaaaacaccgttctggaccgccaaaccctgtatgaactgactagtatagttgagcaaaagaaatatatcggttcttctgaaataaaaatatcgatgctaaataccacgattgaaaagctggaggtttacaagcgtggtcacgccacaggccagcccgttcaccggcttgagtacacaactgaccgcaagtctttgccagcggcagagacgattcatcatctggcctgtgaactgtttcctcagtggaaaacactgtttgatgatgtgctacaccgaagaccaggtgtgaatgattctgctgacgctattgtcggaactgatgctgtgtatgtggagcctgatggttcggaagtcgtctgtgtcggatgtggctgtaccgataataacgcttgcgtgaatgagttttgtgaaccctgccactggttgaaggtaaaccatgaaaccgggctgggcgtatgttcgtcatgcccgtcctttcagagtcatccgctgactgatgatgctgagtga

SEQ ID NO: 378588 - DNA, 1260 bp, Salmonella enterica
atgccactcaccgataccgccatccgcaatgcaaagccgctcgataaaccttacaaactcagcgacgcgcagggtctttacctgctgattaagcccaacggctctaagctctggcagctcaagtaccgctttggcggcaaggagaagaagctggcgtttggcgcttacccgaccgtgacgctggcgaatgcgcgtaagctgcgcgaagaagctcgcgccgtactcagcgcgggcgatgatccgggggtgaaaaagcagcaggagaagcaggcaaagaaaagcggcaacacctttgaagaaatcgcccgtaaatgggtggcaggcaatatccgctggacggaggcacacgctgctaaagccctgcgctcgctggagctgcacgtatttccgctgattggcaggatccccgttgccgacctgaaaaccgccgatctgctgatcccgttgcgggtggcggagagaaaaggcaatctggagaccgccgcgcggatccagcagcgcaccacggcgatcatgcgttacgcggtgcaggagagcctgatcgccagcaacccggccaacgatcttacaggcgccatcgcgccgccgccgaaaaatcactaccccgccctgccgctggagaaaatgccggagttactggagcgcttcgagagctattccggcaggctgttaacccgtctggcggtgcagcttaacctgctgatcttcattcgctccagcgagctgcgctttgcccgctgggcggagatcgatctggatggcgcaatgtggactatccccgccgggcgtgagccgatcccgggtgtgcgctattcagagcgcggcgcgaagatgaaaacgccgcatctggtgccgctgtcaaaacaggcagtgacggtgctgaaacagctaaagctgctgtccggcaacagcgaactgctgtttcccggcgaccacgatccgcgtaagccgatgagcgaaaacaccatcaacaaagcactgcgagtgatgggttatgacacaaagatggatgtgtgcggccacggcttccgtacgatggcctgtagtgcgctgatcgaatccgggcgctggtcgaaggacgccgtagagcggcagatgagccatcaggagcgtaacaacgttcgcgccgcgtatatccacaaggcggagcacctcgacgagcgtactcagatgatgcagtggtggtcggactatctcgacgcctgtcggcagaagtttgttgcgccatatcgatatgacagacaggttcaggtagcctga

SEQ ID NO: 378589 - DNA, 1557 bp, Salmonella enterica
atgacaagcacccaacaacgcgccgcactgcaacgccagatctggcagattgccaacgatgtacgcggtgcagtggatggctgggattttaagcaatacgttttaggcgctctgttttaccgcttcatcagtgagaattttgccaattacattgaaggcggtgatgacaatgtcaagtatgcaacacttccccggagcgttattaccccggaaatcaaagacgacgccatcaaaaccaaaggctatttcatttacccagacgatttgtttgttaacatcgccgcaggtgctagttctaacgaaaaattaaataccgatttggctgacatcttctcggctattgaaatgtcagccagcggatacccttcagagaacgatatcaagggattgtttgctgattttgacaccaccagcaaccggctcggcaatacggtaaaagacaaaaatacacgtctggcggcagtgctcaaaggggtggcagaattagattttggcgattttgaggggagtcacatcgatcttttcggtgatgcttatgagtttcttatctccaactacgccgccaacgctggcaaatccggcggtgagttttttaccccacaacacgtgtccaaacttattgcgcaactggccatgcacaagcaaaccagcgtcaacaagatttatgacccagcgtgtggttctggctcgctgctgctgcaagccaaaaaacactttgacgcccacattattgaagacggtttttgggggcaggaactcaaccacaccacctacaacctggcgcggatgaacatgttcttgcacaacatcaactacgacaagttcaatatccagctcggtgatacgctgcgtaatccgcattttggcgatgacaaaccgttcgatgccatcgtctccaacccaccttactcagtgaaatggataggctcagacgatcctaccctgatcaacgatgaccgttttgcaccggcaggggtgttagcgcccaaatccaaagccgacttcgcttttgtgctgcatgcgctcagttacctttccagcaaaggccgcgcagccattgtttgctttcccggtattttttaccggggtggcgccgagcaaaaaattcgccaatatttggtggataataactacgtcgaaaccgtgatttcactcgcgcctaacctgttctttggcaccaccatcgccgtgaacattctggtgctgtccaaacacaaaaccgacatggccatccagtttatcgacgccagcgggttgttcaagaaagaaaccaataacaacacgctcacagataagcatattgagcagatcatgcaggtatttgatagcaaggctgacgttgatcattttgccaaatcggtgagctttgaagacattaaggccaatgattacaatctgtcggtgagtagttatatcgaagccaaggacaaccgcgaagtagtagatatcattacactcaatgccgagctaaaaatcactgccgctaaaatcgaccaactgcgtacggagattgatgcaattgtggcggagattgaaggcagcgaggcgcaggtatga

SEQ ID NO: 378590 - DNA, 1227 bp, Salmonella enterica
atgagcgagttgagttatctggaaaagttgctggatagggctgaggtcgagtggaaatcattgggggatgttgtagatcttcagcgcggcagacggcttgtaaaatctcaattagaaaccagtggtaagtatgcggtttaccagaacagcatgacaccactaggttactatcatgactgtaatgtcgcagcacaatctacgttcattatctgtgcaggtgcagccggtgaaattggttatagcgaagatgaattttgggctgctgacgatgttcatttcgcaatcacaccagaatacataaatggcagatttttgtttcactttttgttgacgcaaaaaaataaaatttcaggacaagtacgccgtgccagtattccgcgcctctcaaagtcagtacttgaaagacttgaattcccaattccctgcccgaacaatccagagaagtccctcgccatccagtctgaaatcgtccgcattttggacacttttacctctcttacagccgagcttacagccgagcttacagccgagcttacagcccgtaaaaaacaatacaactactatcgcgaccagttgttgaattttaaggaaggggaagtagagtggaaagctttgggggagatcggcgagtttatccggggtaagcgctttactaaagctgactatgtcaaagatggcatcaatgctatccactacggtgagatatacactcggtacggcgtctttacaactcatgcgctttctcaggtcagaaacgatatggtcaagtcacttcgttatgcggaaccaggagacgtagtgataactgatgtcggagaaaccgtcgaggatgtgggtaaagccgtggcctggcttggggatgaaaaagtggctattcacgaccactgttatgctttccgacattcaatgaacccgaagtttgtttcctattgcatgcaaacagcatctttcattgccgagaaagcaaagtatgtggccagaaccaaggtcaatacattattgattaatggatttgctaaaatcgcaattcctgttccgtatccaaatgaccttgaaaaatcgcttgccgaacaagcccgcatcgtcgccattctggacaaattcgatgccctgaccaattccatcagtgaaggtttaccacgtgaaatcgcattacgccaaaagcaatacgagtattaccgcgatttgctgttgagctttcccaagcctgaagaggtagtggcctaa

SEQ ID NO: 378591 - DNA, 1188 bp, Salmonella enterica
atgagccagacgctaacagaaatcgcccagcggcttaaagacgccaataaaaagatacagttgatctatgccttcaatggcacggggaaaacgcgcctgtcgcgcgaatttaagcagcttgttgcccccaggaatgaggatgaagtcgatcaatctgagctgtctcgcaacaagatcctgtattacaacgcttttaccgaagatttattctattgggacaatgatctggagctggatgccgagcccaggctaaggatccagcccaattcatttaccgactgggtgttggaagatcaagggcaagatcgaaacatcattaccaattttcagcgctatgctaatgagaagttaaccccaaaattcaatgaagaatataaagttaaaggcaaagacgacaaagagatcactgtaaaggcgttttcggaggtgactttttcccttgagcgcggtgatgatgaacactctgggaatctaaaaatctccaagggcgaggaaagcaatttcatctggagtattttctatacgctgatcgagcaggtgattgacattctcaatgttgctgaaccctccgagcgtgaaaccaacgcatttgaccaattggaatatatatttattgacgacccggtcagttcgctggatgagaaccatttgattgaattggccgtagatttggcccaactgatcaagtcaaacaattctgatgttaaattcatcatcaccactcacaatccgcttttttataacgttctgcataatgagctcaacagtgatgacggtggttacaagaaaaaatggcttgataagtatcggatgaccagacttgacgacggtacatttcaattagtccagcaacccaatgactcgccattctcatatcatctttatttaaaatcagaactcgaaaaagccatcgagagtggtcagttgagcaagtatcactttaattttttaagaaacattctggaaaaaacctccacgtttcttggctataagaaatggggcgatctgttgccaaaaactgatgacggaaaaaccaatccgtatgaggctcggattattaatatttccagccactcgaaacatgcgggcgaagaaatagccgatctcactgaagacgacaagcgtgttttgcggtatctggttaatgaaatcaatacgatgtatcgctttcagcaggctgaaaattaa

SEQ ID NO: 378592 - DNA, 3099 bp, Salmonella enterica
atgtacgaatacaaggctgttgccgaatcaaatagctttatcgttctcgataaatacgccagggaatggcagcttaatgaaagctaccagagcgaaggtgacctggaacgagagttcattcaggatttgcacaatcagggctatgagtatgagcctggtttaaatacgcctgagaagctgctggccaacgtgcgcgaacagttgcagaccctgaacaacatgcagtttgctgacggtgagtggttacggtttgtggagacctggctggacaagccaagcgatggcatcgtcgataaaacccgcaaaattcacaacgactatatccatgattttgtgtttgacgatggtcatatccagaacatctacctggtagacaaaaaaaacattgcccgcaataaggttcaggtcatcaagcagtttgagcaacagggcagtcatgccaatcgttatgatgtcaccattctggtgaatggcttgccgctggtgcaggtggaactgaaaaagcgcggcgtggcgatccgcgaagcctttaatcaggtgcaccgctacagtaaagagagttttaacagcgaacattccttgttcaagtatttgcagctgtttgtgatttccaacggcaccgatagccgttattttgccaataccacccagcgcaacaagaacagcttcgatttcaccatgaactgggctaaagctgataacagcttgctgaaagatctgaaggactttactgcgacctttttccagaaggacaccctgctcaatgtgctgctgcattattcggtatttgatgtgagcgatgcgctactagtgatgcgcccttatcagattgccgctactgagcgcatcttgtggaagatcaacagcgcttatcaggccaaaaactggagcaatacagaaagcggcggttatatctggcacaccacgggttccggtaaaaccttgaccagcttcaaggcggcgcgcttagccactgagctggagttcatcgacaaagttttcttcgtggtggatcgtaaagatctggattaccagacaatgaaggagtaccaacgcttttcgccggatagtgtgaacggctctgacagcaccgcaggactcaagcgcaatctggataaagatgacaataaaatcatcgtcaccaccatccagaagctcaataacctgatgaagagcgaaaacgacctgtccatttacaacaaacaggtggtgtttatctttgatgaatgccaccggagtcagtttggtgaagcccagaagaacttaaagaaaaagtttaagaagttctatcagtttggctttaccggcacaccgatttttccgcaaaacgctctgggggccgacaccacggctagcgtattcggccgggagctgcactcttatgtgatcaccgatgcgattcgagatgaaaaggtgctcaagttcaaagtggactacaacgatgtgcgtccgcatttcaaagccattgaaagcgaacaggacgagaaaaagctcagcgcggcggaaaacaggcaagccttattgcatcccatccgtataaaagaaatttcgcagtacatcctgaataactttcggcaaaaaacgcatcgcctgcatgcaggagcaaaaggctttaatgcgatgtttgccgtgagcagcgtggatgccgccaaactgtattacgaatcgctcaaggatttgcaaaaagacagtaataagccgctaaaaatcgccaccatattctcttttgtggccaatgaggaacaggatgccgtaggcgatattctggatgaaagttttgacgtatcggcaatgaacagcagcgccaaagagtttttaagtgccgccatagctgactacaacgtgctattcaaaaccaacttcagcgtggaaagcaatggttttcaaaactattaccgcgatctggccaagcaagttaaggctaaggagatcgacttgctgattgtggtcggcatgttcctgaccgggtttgatgcgccgacgctgaacaccttgtttgtggataaaaacctgcgctaccacggtctgatgcaggcctattcacgcaccaaccgtatttatgacgcaaccaaaaccttcggcaatatcgttactttccgtgacctggagcaggcgacaattgacgccatcaccttgtttggcgataaaaacaccaagaacgtggtgctcgagaaaagctacaaggagtatatggaaggctttaccgacgtagtaaccggtgaggcaaggcgtggctttgtggacgtggtaacggagttagagcaacgctttcccgatccttctgccattgagaaagagtccgacaaaaaagcctttgcgaaactctttggcgagtatttacgcgttgagaacgtgctgcaaaactacgacgaatttgccagcctgaaggccttgcagaacattaacatcaatgaccctgaggcggttgaggagttcaagaccctgcattatttgagcgatgaggatttggcggcgctgcaaacgattaaaatgccgtctgaacggcaaattcaggactaccgttcaacttataacgatgttcgcgactggctgcgtcgggaaaaatcttccgctgaaaaagaaaaatcgactatagattgggatgacgttgtcttcgaggtagatttactgaagtcgcaagaaattaatcttgattatattctcgagctgatttttgaacacaatcgtaagaataaaagtaaagcaggcttaattgatgaagttcgtcggttaatacgtgccagccttgggagtcgggctaaagaaagcttagtcgttgatttcattaatcaaaccgacctggacaaaattagtgacaaggccagtattatagacgccttctttgcttttgcacaggtagagcaactgcgcgaagcacaagagttaattggttcagagaatctgaatgaagaggcagctaaacgttatattaccacttctcttaaacgagagtttgccagcgacaatggtacagaactcaatgcggttttgcccaaaatgagtccattaaatccccaatacctcacaaaaaagcaaagcgttttccaaaaaatcgcagcgtttgttgaaaaatttaagggagtgggtgggaaaatatag

SEQ ID NO: 378593 - DNA, 222 bp, Salmonella enterica
atgatacaaccggactggcattccgccgacattatcgcggcgttgaaaaggcgtggaacgtcgctttcagccgtttcccgcaattcagggctggcgtcttccacgctggcaaatgcgctgatcaggcactggcccaaaggtgaaaggctgatcgccgaagcgttgggggttacgccagagcaaatctggccttcccgttactgcaagcctgaataccgctaa

SEQ ID NO: 378594 - DNA, 462 bp, Salmonella enterica
atggctactacccccatccagacacatccgttacttgctgttcccttcaatgccgccacggacttcaccgtccttgccgatcactgcgaaaacttcgccgaaaccctgattgaaagtaaagatatagcgttaaaaatggcgctctgcggcagactcaacgccgctctgacgttgcttcagcccactctattagaacctgtcccaccccatcttattgaaagcctgaccgttgatacccttcccgcaaacgcccctcaatttgggcctgaatgcaccgagctttgtaactactgtcttgctctgacgcagacgctggccgggcaggggttttcctcagaaacggagaaatatcttagctggctgctgtacgacttgatcaattacttcgcggcggaaatgaaagccccgcgctggttgcgtaccgccgacggcgtgaagtttattgacggggtggcggcatga

SEQ ID NO: 378595 - DNA, 2232 bp, Salmonella enterica
gtgataacaagcattcatattcagggcgcggcaacgtatgccagaccttctgaactcaacgatctgcgtaaaattaactttatctttggcgcaaacggcacggggaagaccaccatcagccgggtaattgaacaggcaccaggccatgagtactgctctatgcaatggtcggggggaagcccgttgcaagtgatggtatataaccgggattttgtcgagcgtaattttaatcaggagaatactgttaaaggtatttttacgctaggtgataatcaggttgaagcagaacaggaaatcgccaaattaaaaccagaactggataagctggataaagaaatcagcagtcttactattcagcttgagggtgaaaatcagtctggcggaaagcgaaaagaagtcatcaagttagaaacagatctgcaaacgcaatgctggaaaatgaaacagaagtatgatgatctttttcaacaggcttttaccggcgtccgtggtagtgcagaacgattcaaacaaaaagtgctcactgaaaaatcatcaaatagtgcagcacttattagcttggatatactgcaagaaaaatcggcaactatttttgcggcaaacccggaaaaaaggcagaaactaccgttaattgacgcacaaccgttaaccgaaatggcgtcatccggcattttacaaaaagcgatagtgggcagtcaggatattaatattgccgccatgattaaccggttaggcaacagtgactgggttaaacagggtattaatttccatcggcataatgatgatatttgccctttctgccagcagccgaccgataaaaccttcgctcaaagccttaaagatttcttcaatgacagctatgaggctgaattgggcgcagtaacgcaactggcgaatagctatcagcaggcggctgtaaaaattgcatcgacccttgaggctataactaccctacaatccgtccatttagactctgcccttttcgatgcttctgcccgcgcattaaaagagcggatggaaaataaccttaaacttattcagacaaaacagcaggagcccagcagaaagataacgctggagccactgagtgagtttttaacgccattaagtgaacagatcggcgcagccaatacggcaatagaccagcataaccttacagttgataatttacagacagagaaaaaacagcttattgcgcaggtatggaaatttattctggaggagcttaaactccatctggatggctacgacaccgccaaaacccgtctgcaaaataccataagcgggatggagtccagcctggaagagaaaaaacgcaagcgaaatggtgttgatgtacaaattaaggaacaagaaaaacagtccacatcaatacttcccaccaaagacgctattaacgctttactccactcgtttggattcacatcattcagcattgatgtggtagatgaaaaaggccattacaagatatgccgcaacaacggagaagacgccagccgttcactcagcgaaggtgaaaaaacgtttatcacatttttatatttttattctttaattaaaggtgcgcaggctgcatctgggataacacagtccagagtcgtagtttttgacgatcccatctccagcctggatagcgatattctttatattgtcagtagtttgattaaaggtatttttgaagaaacaagagacaataaaggatatattaaacaggtatttgtgttgactcacaacgtttattttcataaagaaattagctatcatcccaagcgtcctcacgacgccacgcttgccgaagaaagtttttggctggtgaaaaaacaggctgatacctcatacatagaaaaatgtagctgtaacccaataaaatcagcctacgaattgctttgggaagaggtgaagaaacctaatcccgccagcatcacattacagaataccctgcgtcgtattctggaaaactatttcacgatgtggggtgggatgtcgaaagactgtatatgtgggttattttatggcagagagaaattaatttgccaatctttattctcttgggtaaatgatggctctcattccatacatgacgatctttatattaatcatggtgacagggcaaacgaggtctatttgcaggtattccgggatattttcacaaaatctggtcaagatggtcactataatatgatgatgggaataactgaagacgatattgaattaacatacgaacccgcataa

SEQ ID NO: 378596 - DNA, 267 bp, Salmonella enterica
atgcagtatggattttttagtgccgctatatgtggacctaaccccacacataacaaagccccactcacaaaacaacgatttttcgtgataacccccacaaaaccaaagcgattttttatgggggccttcgtgggggcgctatttacgagaaataccaacaaaaccaataacaaacagtacgttaatcgtggatatgattccgagtccggcaccacctttccttttttatgcttccttataaatccctgtgtgtatgtaattcaataa

SEQ ID NO: 378597 - DNA, 228 bp, Salmonella enterica
atgagtatggtgcaaccagactggcattccgctgacattattgcggcgctgaaaaagcgcggaacgtcgctttctgccgtttcccgcaactcagggttggcgtccgccacgctggcaaacgcactgataaggcactggcccaaaggcgaaaggctgatcgccgaagcgttgggtactgcgccagagcaaatctggccttcccgttaccgtaagcctgaaaattgctaa

SEQ ID NO: 378598 - DNA, 417 bp, Salmonella enterica
atgaaaaaacctgtctgcatgttctgcggcgctccgtccaccctgctttgcgacggaatcatcggctgggatgccgatgaggacgaacacggacacatgaccagatgtcggggcatgttcacctgcgacgcgccgatgtgccggaactgcgcaacatggcatggcaacatcttcatcgacggaaaactccggatgatggatacacgcgacctttgccccctgtgccagaagttacacgaagctggcgaacacatacgcgttgcagaacacaggaagcattctgcattaccgcaaccctgcctgaccaaagagcaggccgcgattattcgtgcagcacattgggatgggttcgctaacagctataccagaagcatagaaatactaaaaggtggcgggcagcaaacctttgatttttga

SEQ ID NO: 378599 - DNA, 249 bp, Salmonella enterica
atgggattaataactctcaagaagtggaatgaaaaacaacccattcagttatgcgacgaacagttaaggcgacttgtacgaaatgggctaatttaccccgcgccggaaatgtacggtaggtgttatctggtcgaagagaccgcagtaagactgagaaatcatcggtcgccagtatcagccaacgccagcaaaaaactcacaaggagaataatggatggccgccatgagaagaagcgacaaaactcgtga

SEQ ID NO: 378600 - DNA, 1065 bp, Salmonella enterica
atggccgccatgagaagaagcgacaaaactcgtgatttgccaccaaatttgtacgtaagaaacggatattacagttacagagacccacggacgggtagagaatacgggctgggtagaattaaaagagatgcgattaatcagtctatagaagcaaatcttcagatacttgacgtacaaacgcgccttatagatcgcctgaatgcaacaagtgattactcagttagtgaatggtgtgaaaaatatacttctatcctggaacgaagatcactaactgaaagttcaatggctgaataccgtagtcgaataaaatcaatagcagaatggtttaccgggaaatacatcagcgaaatagcaactcgcgatgtggctgttttccttgaaagctataccagttcgggaagagattcaagagcaaaggtaatgcgttcaactttactcgatatattcagagaagcgattgccgagggattattaaccatgaatccagtagaagctaccagaaactcacgcgttaaagtaaaacgttccaggctttctgttgaagaattcgtagcaataatggaagccagtgacgatatgcccgcatgggttaaattaagcatagcgctggctgtagttacggctcaacgggtaagcgatattgcaaaaataaaatggtctgatatccatgatgacaagctttggattgaacaaaagaaaacaggcagaaaaattactatgccattacatatttctgcccctgaaaccggtcttgtgctgagtgatatagttgatgtatgtaaaaaaacttactccggctgcgaaactatcatagccacccgcagtggcggacaattacaagttggaaccatttcgcgtgcttttgccaaagcaagagacaaaactgggattaaatgggaaggagatccgccatcattccatgaaatcaggagcctgtccgcgcgtctttacgctaaagcaaaaggcgctgaatatgctcaaggcgtacttggtcacaaatcagcgcagacttctgaggtgtatattgatagtcggggaagtcagtgggaggaaattgaattttga

SEQ ID NO: 378601 - DNA, 1137 bp, Salmonella enterica
gtgaaaattctcgttgatgaaaatatgccttacgcccgcgaattatttagccgcctgggtgaggtaaacgcggtgccgggtcgcccgatccccgttgaagaattaaaccatgccgatgcgttaatggtgcgttcggtcacgaaagtgaatgaatcgctgctgagtggtacgtcgattaacttcgtcggtactgctacggcaggcaccgatcatgtagatgaggcatggctgaagcaggcgggcatcggttttacagccgcgcccggctgtaatgctatcgcggtggtggagtatgtgttttcagcgctgttgatgctggccgaacgtgacggcttttcattacgcgatcgcactgtagggattgtcggcgtgggtaacgtcggaagccggctacagacaaggcttgaagcgttgggtatccgcacgttgctgtgcgatccgccacgcgccgcacgcggggacgagggggattttcgtacgctggatgaggtggtgcgggaagcggatgtcctgactttccatacgccactctataaagacggtccgtacaaaacgctgcatctggccgatgaggcgttgatccgccgactgaaacccggcgctattctcattaacgcctgccgcggcccggtggtggataacgccgcgctactggcaagactcaatgtcgggcagccgctcagtgtggtgcttgatgtgtgggaaggtgaaccggatcttaacgtcgcgctactggaagccgtggatatcggcacgtcgcatatagccggctatacgctggaaggcaaagcgcgcggcaccacccaggtctttgaggcgtacagcgcatttatcggtcgcgagcagcatgtcgcgctggagacattactgcctgcgcctgagtttgggcgtattacgcttcacggtccgctggatcaaccgacgctgaaaagactggcgcatttggtgtatgatgtgcgccgcgatgatgcgccgctgcgtaaggtcgccggaataccgggcgagttcgataagctgcgtaaaaactaccttgagcgccgcgaatggtcgtcgttgtatgtcatgtgtgatgacgccagcgccgccgctttattgcaaaagcttggttttaacgcggtccatcacccggctcgttaa

SEQ ID NO: 378602 - DNA, 855 bp, Salmonella enterica
atgaaaaaaacagacttaccggcagaccaacagttttttgccgatctgtttagcggtctggtacttaacccacaccgattaggacgcgtatggtttgccagccaaccaccctccttgccctccggcagcttatgtatcgacctgccccggctggatatcgtgctgcgcggagaatatggcaatcaactggaaaaaacgcagcgttggctgacggaaggcgaaatgttgtttatccctgcccgtgcggcgaacctggcggttagcgacaaaccggtaatgctgcttagtctggtattcgcgccctcctggctgggtttatcgttttatgaaaatcgtacagcatcgcttttacgtccgacgcgccgtatcgaattgccgcacctgcaacgcggcgaaggcgaggcaatgctgaccgcgcttacccatttaagccgttcgcctcaggagcaaaatattattcagccgctggtgctcagcctcctgcatttgtgccggaacgtggtgaatacgcgccccgatatctgccgtccacgcactgagtttctctatcacagtatctgtaattgggtacaggataactacgcccagccgttaagtagagaaagcgttgcacagttctttaatatcaccgccaaccacctgtccaggctatttactcaacatggcacaatgagttttgtggagtatgttcgctgggtgcgaatggcgaaagcgcgtattatgttgcagaaataccacttgccaattaacgaagtcgcgctgcgttgcgggtatcaggatagcgattatttttgccgtctgttccgacgtcagtttggcctgacaccaggggattacagcgcgcggtttcagtaa

SEQ ID NO: 378603 - DNA, 1185 bp, Salmonella enterica
gtgattttccgcaccatggatattggcggcgataaaaatatccgctacctcaatattccgcaggaagagaacccttttcttggctaccgtgcggtgcgtatctaccctgagtttgccggactttttcgcacccagcttcgcgcaattttgcgggccgctgttttcggtcatgcgcagttgatgattccgatggtgcatagtcttgaccagattttatgggtaaaaagtgagctgaaaaaggcgattgcggagctgaaaggggaaaggctacgtcacgcgcaggatattccgttggggattatggttgaggtgccatcggtctgttacatcatcgatcatttctgcgatgaggtggatttctttagcatcggttcgaacgatatgacgcaatatctgtacgcggtcgatcgtaataatccgcgcgtctcgccgctgtataaccccattacgccatcgtttttacgcatgctgcggcagattatccatgttgcccatgagcgaggtaaatgggtcggcatttgcggcgaactgggcggagaaagccgctatttaccactacttttgggactggggctggatgagctaagtatgagcagtccacgtatcccggcggtgaaaagtcagctacgtcatctggacagcctggcgtgtcaggcgctggcaagtcaggcttgcgagtgccgcagcgcccaggagatagaagcgctactgaatcagttcgcgccggaaaaagaggtgcgtccgctgttggcgctggaaaatatctttgtcggcgagccgctcagtaataaggaacaggttatccagtttctgtgcggtaatcttggcgttaacgggcgtaccgaacatccgtttgaactggaagaggatgtctggcaacgtgaggagattgtgaccaccgccgtcggttttggcgtggcgatcccccataccaaatcgcaatggattcgccactcgtcgatcagtattgcgcgtctcgcacagcccgtagactggcagtcggagatgggtgacgtagagttggtgattatgctgacgcttggggcggatgaagggataaatcatgtgaaggttttttcacagctcgcccgtaagctggtgaataaaaacttccgtcagtcgctgtttgccgccaatgatgccgacagtattctggcgttgctggaggcggagttaacgttttag

SEQ ID NO: 378604 - DNA, 357 bp, Salmonella enterica
atgaagttatatagcagaagaatgcaaatagagcagaattcccgtgatgagaaaagtgaacgcttcggattcggcctgcgggccagttacagtcgttctgccgggcggctgtcagtcctgagccttctggcgacactgagcacaatcgtgctgtggcttataggatatcatgctgaaaacccaggattgcatctgagataccaggccaacagcattaaatcacggcgtgttatctcatatctgacattagcggagaatgtcctgcgacactctccgctaattttgaagcgaacagcattagacgtcgttcttcatcatctcgccagaacctaccgaagtatggtgctggtttattag

SEQ ID NO: 378605 - DNA, 522 bp, Salmonella enterica
atgaaaaattactccctcgttttaaacgagttatcttcgcttgtggataaaatcgatgagaaagaatttaactcactcgttgattctattatcacagccggtcatgtatttcttgccggtgccggacgctcagggcaaatgataaacgcttttgccaaccggatgatgcaccttggcctgtccgtcagtgtggtaggggaaatcagttctccacattctcgcaaaaacgacctgttgatcgttggttcaggctccggagaaacccaacgcctgatcaaccaggtgaaaatggcaaagaataatggcgtgtttatcgcgctcatcactaccacaccagattcaactctggcgcccctggcggattacgtactcatcatcccggcaggtcacagcgcccaaccaatgggctctctttttgaacaggcttctctgctgacctatgacagtattgtgctgtcattaatggccaatcttaatgaaaccagtcagacgatgaaggaacgccacgccgatattgaataa

SEQ ID NO: 378606 - DNA, 597 bp, Salmonella enterica
atgcaactgaaccggatcaaagccgtacgcggctataaagcgccacgtcgtatcgccggccgaccttcagtggtagctcctcatcgcgtacagcggcagtttactgttgtccgggacactcagatctgggacacagacatcacttacatccgcacctggcagggttggttgtatctggcggtggttatcgatctcttcgcccgtaacgtggtcggctggtcgatgaagcccactctctcacgtgaactggcactcgacacgctgatgatgaccgtctggcgtcgaaaacctgacggcgaggtcatcgtacactcggaccagggcagccagtacggcagcaacgactggcaacggttctgtcgggtcaataacctggcaccgagcatgagccggcgtggcaactgctgggataatgcagtggcagaatcgttcttcagttcactcaaaaaagagcgcatcaggaagcggatatataaaacccgggacatagcccgggcggatatcttcgattacattgaagtgttctacaaccgtacccgacgccacagccacctcggtggcgtcagcccagaggccttcgaaaaggcctcaccgtga

SEQ ID NO: 378607 - DNA, 222 bp, Salmonella enterica; identical to SEQ ID NO: 377886

SEQ ID NO: 378608 - DNA, 1197 bp, Salmonella enterica
atggccttacttactgataccaaagcccgtcatatcaggcctgatgatcatcccctgccgcatggcggggttaccggactcgctcttcatccttcttctgttaaaggacgggggaaatgggtgcttcgttttgtcagtcctgtcacgcaaaagcggcgtaatgccggtcttggctcttatcccgaaatcagtatcgctgacgctgctcgcatggccatggttatgcgggaacaactggccgccggcctggaccctttagaactgcgaaaaactgaaccgactaaagtcgtttcccccacttttgaaaaggcagcccgtcaggttcatgctgatttactcccgggctggcgtaataaaaagcacggaaaacagtggatttccacgcttgaacaacatgcctttcctttattaggcaatctcacgctggatgccatcactccggcaaacattgccgaagtgctgcgtcccatctggctcagcctttctgaaaccgccacccgcgtaaaacagcgcattcatgctgttatgcagtggggatgggcacatggctactgtgcggccaatcctgttgatgtggtcgaccatcttcttccccagcagctcagcgtcagtgtacggaccgaacatcaacccgccatgccatggaaatctcttcctttatatacagcaacgcatgtgtgcagtgaccagcaccgtaatgtcacccgggcgctgttgctgtttgtcattctcaccgcctgtcgttccggcgaagcgcgggccatgcgatgggccgaagtcgactttgacaaacagatatggaccattcccggtcaccggatgaaagcaggagtccaacacagggcacctctctccacacaggctgtccgggtgcttgaaagtatgaaaggactgcacgatgacctggtgtttccctctccacgcaaacagaccgtattgtctgatatggtactgaccgccttcctccgcagaacccatgccccctctgatatccccggacgtattgccaccgctcacggcttccgctccagctttcgtgactggtgcagcgaacacggctatccgcgtgacctcgccgaacgggcactggctcataccgtcaggaataaagttgaagcggcttatcaccggaccgatttactggaacaacggcgccccctgatgcaggcatgggcggattttgtactgccacagtaa

SEQ ID NO: 378609 - DNA, 240 bp, Salmonella enterica
atgaatattaacactgaagtgatagatgatgtcgttctggcgcttctctggctgaccctgcatgacgattatcgggcctggaagagttttgccccggatgtgctcaaccgattttacgggcggggtttcattggcgaccctgtcaataaagcgaaatcagtggtcctgactgaaaagggacttcttcagtcggagcaactttttcggcgatattttgtcactgaaaacagtgaagaataa

SEQ ID NO: 378610 - DNA, 681 bp, Salmonella enterica
atgactacaataaataacaagattactcaacgtgaaaagcccgtatccaaaaaggaaattgtttataatcttttacgatcaagaattttaaatggtgtataccatccaggacacagagtcacaattgatgatatctccagggaattatcattcagtaacagccctattcgggaagccattaatcagttagttgctgaaggattgttacgtataataccatattcaggtgcagtcgtacagttagtcaatgaagaagaatatatcgaaattatgtatgtacttggagttctggacggtgcggcaacttcactgacctcaaattttataactgaaaaagaaatagagcaactggaagcaataaatgaagatatgaaaacatctctggataattttaatctcgtgaaatttagtgagttaaatcgtcagtttcatacttttatttatagtaaatgtgggaatcaatttctaatcagtagcctggataccatatggcaaaaaatttcttacggaaataatgtcagatttacttttgcacagttcagagcaaaagagtcaattttagagcacagtaaaataatacaaatgctcaaagataaagcgccaacaaataaaatagaggaatttttaagagaacataagaaaaacatgatagatactataaaatctaagcatgaaaaataa

SEQ ID NO: 378611 - DNA, 213 bp, Salmonella enterica
atgaggttattccaatttaacagatgtgttgtcatttctgaagaaagtgcttatagattaactgacgaggtattaatttttcgcatgtctaatacgagaattatattttcttttattggacagaaagataatccttatgctaattgtttttacattttatttttcatgcttagattttatagtatctatcatgtttttcttatgttctcttaa

SEQ ID NO: 378612 - DNA, 1263 bp, Salmonella enterica
atgaaccctgaaatgccctcaaaaccgataaaatcagtcagtccgaagagatttttaatcgtctttatactgtttgttgcaatatttacagcatatcttgatcgtgttaatacatctatattttctgcagatgataaatttttattagaaatgggaatatttaacagccccttacatactggtttactcatgtcagtttttctggcggcatatggtatatccagttttttacttggttctgttggggacatgtggggattacgtaaagctatgcttacagcgatattattatggtgtatttccctttttataggaggactggcaacaactttctctgtgatacttatttcaagggtactgttgggtattggagaaggatggtactaccctatgcaaaatggcattgtaaaaaactggtttcccgaaaatgaaagaggaagggctaatgctatatgggttataggacaatccgtcgctccggcagttgctatgccattttttacatatatagttggagctcatgggtggagagaagcatatcatatttcatttgcattgacattgttaccattatgtcttatgtggttttttttaaaggatgcacctcctgagtacgccggaactgaaaaggtttataataaaaaagaaaccagtaaaaataatgcgccagagctaccattagcgcatcgattatcgtcttttatttttaattaccaatactggatattagtctactggtacatgacaatgaccgcaatatactgggggcttgtatcatggttacctgtatatctaaagtcggaaagaggttttagctggcatgaaatgggatggattgcttcattaccttttatactgacaatatttactaagacattaaatggatggctgaatgataaatataaaagatctgcgcccttgctatttcttgcgctatttttaggggctatctttatctatctggctgtaactgtgaccgataaatataactcagcaatattgttatcatttgcatttggtgcaacatcgatggcaacttcggtagcctggacgttacttcaaaaaattgtgccacaatattctatatcaacttcatccggagtgatgaatggaatagccagtttcgtttcttccataatgccagtcgcaattggttatattattagcattacctcaagttatgcttccggaatgtatctgcttgtgtgttcggggtttgtggcttcgctggttgtgttacccctgatactgaagaagtattag

SEQ ID NO: 378613 - DNA, 1191 bp, Salmonella enterica
atgaaaattatcagcgttgatattatcgatgtagcgaacgatttccagactgcagttaataaatggaggccggtgacaatccgtattaatacagatgagggaatttcaggttatggggagattggtctggcatatgccgtgggagcatctgcagggttcggtatggctaaagatttggctaaaattatcataggaatggatcctatgaatattgagcaaatctgggataagatgcaaaagaaaacattctggggacagggaggaggaacggttgtttcagcagcaatgagcgctattgatattgcattgtgggacctgaaagggaaagtatttaatgttcctgtatataagttacttggtggtaaaacgcgggaatcaattcgtacttacgccagtcaactgcagtttggttgggggaaaagtgcagataaatccatgttaacagcccctgaacaatatgcagaagccgctttatgtgctgtttccgaaggatttgatgcgtttaaagtcgacccattaggaatggatgaaaaaggaaactggaatgtagaaaacttctgcggcatattgtctactaaggttatacggcggggttatgaacgcctcagagctatgagagaagctgtggggcctgacgttgatatcatcgttgaactacatgcttttaccgacacaacagctgccattcagttcgggaaagtgattgaagagctggggatcttttactatgaagagcctgttatgccattaaatccggttcaaatgaaaaaagtggccgataatgttaatattcctcttgctagtggtgaacgtatttatacccgatggggttatcggccattctttgaaaatggttctttgagtgtgattcagccagatcttggactttgtggcggaataagtgaagccaggaaaatctgcgacatggcacacgtgtacgacatggtagttcagggacacgtatgtggcgggccacttgcaacagctgctgcactacatcttgaaacggttattcctaatttcattattcatgaactacatcgctatgctcttcttgaacccagcataaatacatcaatgtacgattatcagcctgttaatggtaaataccaggttccggagttgcctggtttaggccaggagcttacggaagaaacactgaaaaagtcatatatcgagactgttaaataa

SEQ ID NO: 378614 - DNA, 1269 bp, Salmonella enterica
atgcagaataaaaacagtgttcccagaaagagatacatgatagttgttacattatttttttctcttgcagttgcatacatgggccgggtaattgtttctgtattagcggcaaacgaagggtttcttcatgatatgggaatcgcgggtcaacctgtaaaggtgggtttgcttatgacttctttccttatcgcttacggcctttcaaactttgttctgagccctcttggtaataaatgggggccgcgaaaaggaattctgatcgccatgattttgtgtggtgtatcaatgattcttggcggagtggctacagtactgggatttgtcattgtgtcacgcatattacttggtatcagtaatggtctccactatccattacaaaatgtgtttgtgaaaaactggtttccatcaaatgaaagagggagagcgaattccgtctgggtaattggtcagtcagttgcaccggcaatagcaatgcccctgttcacatacataataggagaatttggctggagatatggttttataacttcagctgttctgtgtcttattccaatttttctgttattgaaatttacagaagatactccggaaaaatataaaaatattgacagaaaagaacttgattatatcaaaggcatcgatattaatgtaatagaaaaagttgcagaaactcaagacagaaaactgtgggacaaaataaatttgtttgcaagagactacagatactggttactggtctactggtatatgtcaatgacttttgttttctggggacttatatcatggttacctgcttacctgaaggcgtcgagaggattcagctgggttgaaatgggatggttgtcatcattacctttcatattatccattatgttaaaaggtcttggtgggtgggctgtagacaagaccggaaggtatgctccatttcttgtattagcacttcttgccggagggattggtatatatttatctacaataatagataataaatatattgctgctgttttgttggcgttgtcatttggcatcacaaatatgggtacagccccggcatggacattgttacagaaaattataaatactgattccctggcaattgccggaggaaccatgaatgggatttctaatactgtatcagcactttcaccgttaatcattggcttatcaataagcattacaggtaaatatgaaagtggattatatgtactcgtaggggcagcaataattgcatcatttgttgccatgatattagtatccagaaaactgtaa

SEQ ID NO: 378615 - DNA, 1053 bp, Salmonella enterica
atgaaaaaaataatagtttatctggcattgtttataagcgcttcaacatattcagcggaaatctataataaaaacggaaataaactggacctttacggtggtctcagagcccgacactactttagtgataataaaaatgtagatggtgatgcaacttttttcagaggaggttttaagggtgaaacgcagatcaatgaaaaaatgaccgggtttggtcgatgggaatatgaatttaaaggtaataacagtgaatccgatggcagtaaaggtagcaaaacacgtcttgcctttgcaggtctgaaatttggacgctatggctctgtcgactatggtagaaactggggggttacctatgatgtggcagcaatcactgatatcgccccaatttttgacgaacttacttacagcagtgctgataattttatgacaggtcgggccacaggtttactgacatggcgtaacagtgatttttttagcatgattgaaggtttgagtattgcagcacaatatcagggcagtaattcgtctggtcgatcagctacaacatctaatggcgatggatatggcttttctctgagctatcagcttttcaatacagttactgtgctgggaacatacagttcatcaaaaagaactaaggagcagcaacgcttaaaatggggtaatggtgtatatgcagatgtctgggctggagggattaaatatgagtacaatggggtatatcttgctgcactttattcaaaaagccataatctggctaagataaaatcatccggatatgctaacgaagcaaacagttatgaaactgtggcctcttatcaattttcctctggtttaaaaccatttattggttattttctgtctcatggcaaaaatatcgagaatgtaggtggggctgatatagttaagtatatagatattggattgagttattattttaataaaaacatgtttgcatacggtgattataaatctaacttattagatagcaataactctttaggtgtggatagtaatgataaaatcggaattggactgacttatcagttctga

SEQ ID NO: 378616 - DNA, 351 bp, Salmonella enterica
atgtgcagccggggctcaaaaaaacattcctatatcgccggagataatgagctgggtcgctctcgcggtggttctggcaccaaaatccatctggcgacaagcggtagtagtctgccgttaaatttcgtactgagtcccggtcaggctcacgaaagccagtacgcactacgtcttctggacggtattggtgttcagcgccagaacggcagcatgaagcgacgtggtcatgccgtactggctgataaagcctgccccgaacatgtgttacgtaacgaactgaaaaacaaagatataaaaaccctcattcctcgcaaatcaaatgagaaaatggcgtctattaggcgacaataa

SEQ ID NO: 378617 - DNA, 288 bp, Salmonella enterica
gtgtatcctttgcatcatccggcaccctcaaaaccccgtcactggcgaacccgggcagatcccttcacagacgtctggaacgaaacagaatgctggctgaaggatgaactgcagctgggcagtaccgaattacttctcaaacttgaagacgcacatccgggtaaattcactgaaggccatcgcagaacactgcaacgcaggttgcaggaatggtgggtcagggtggtcagagaactggtctacggaactcgtgctgatggtaacattttagctgaggtaagaaagtaa

SEQ ID NO: 378618 - DNA, 198 bp, Salmonella enterica
atgctataccggtatcggtcagcgtcccagttatgtgtgtggtgcgtgcataccctgcgttctgaactccgtggccattttgacggtatcatccacgcactcgaccctctgaagttgctggaaaccattcgactttatcagcaccatctggtgcgaatagctgtcggggatcccattggagacaaaacagcgatttaa

SEQ ID NO: 378619 - DNA, 162 bp, Salmonella enterica
atgaacgaactggtgagaaacaatcattacttcggcacagtaaaggaatttaaggagaatacacaccacgtcttcagtgataccttaccaacacttgccgggagcctgtcgtgtcgtattaacgctcacttccagaagatgaaaaatgcatcttcaggttaa

SEQ ID NO: 378620 - DNA, 285 bp, Salmonella enterica
atgcagggagcaaaactggcgtatgactggatgcccgccggaaagaaagcccatggagtggaaaccacgggcagtcgtacccgtctggacatcatgggagccctgaacctgaacgacatcgacagtctgaatatctgcaggttcttcatcgccgtccgggaaacgtacctgataaagcagaaagtgcatatcatcccagatgcagcaggctatcaccgtacaggactgggcggtagtgatgaatacagaactccactggttaccgccatacagccccaatcttaa

SEQ ID NO: 378621 - DNA, 480 bp, Salmonella enterica
atgaatatccccaatatctttagcatgaaagttgaacccactactgaacagaaagttgctcctgagggccttcagcgtcaaagtcgcgatcatcacgtacgtgaccggatacgttgtgtgctactttcttctgaaagttggtcaactgcaatgattgctcagtcccggcgtattcatgaaaccaccgttcttcgtcacatatctgactaccttcgttcggaaaaacttgctcctgaaaatggtggttccgacagtcatctcagtgaggttcaaacggctgaacttactgaatatctgacgaataactttttgccaaccactctggccatcattgaaatggtcgatgagtggtggggcgtctgctataccgtagcggggatgaccaaatggttgcaacgcaatggcttcagctacaggaaaccggtgatgatgaaccgagccagttgttcacccgatgcagggagcaaaactggcgtatga

SEQ ID NO: 378622 - DNA, 312 bp, Salmonella enterica
atgtgcctgctttatttgccagtctacagcccggatctgaacgtaatcgaaatggtatggaagaatgcgaaatatcactggcggcgctttatcaactggagaaaagaaacactggaatctgagctggataaattactgggtgcttatggtgatcgttttgcagttaatttatcctggctggttattaaaaaaataatgaatttctattcattattcccgcgtgtttttttcgtattttcaatgtcccgttttcgcgttttttttgccccgctacagccaatcaacggaagcatgaaactatcgcaccgttga

SEQ ID NO: 378623 - DNA, 489 bp, Salmonella enterica
atggtatttctgatgaatctgacactgactgagcctgaacgaatcacgttacagcaactttccctgaaccatccacatcgtgatattcgaaccaaaggatacgggttgcttttattggccagaaaatttactccacagcagattgccgacgagattgggtgttcatggagggttacttacgactggtttcatgcatgggaacagtccggtattgttggcctactcggtggacatcaggaagggcgttatcctgctatgtcacccgaaatgatcacaacagccgttgaggttgcaacctcagaatcactgtcactggcccgcattgcacagcgtgttgaagaaatccatgggccattaccctgttcactgtcaacgctggcaaaaacactaaaaaaaacagggtatgacttacaagaggactcgctattctttaagaaaaacgcgatagcaaagcgttcgcagaaaagtcagtcctgctgtataaactaa

SEQ ID NO: 378624 - DNA, 522 bp, Salmonella enterica
atgcttttaatatcgaatgaccaattctttgtttcaggtgtcagagagttgattgcggaaagaattttttatagttcttgtgatttaatgatacttgatgcttcaccatttatttatgtttttgactcatattggtttttttctcagggttttaaagagcctttttctgctctaataatttgtaatgattttttatatatcaaaggaatagatgtgggtggttttattaatgccgtgaatgataataggaaagaggcgatgagcatacctaaaagtataacggtatctgagataaaagttcttcgttatatttttaatggttataaggacaaggatattgcaaagcaattcaactgttctaaaaaaacgataagctcacataaaattaaagccttaaataaaatgagaataaaaaacaccagagtgttttatactcttgttaatttttggaaaacatcatggccgatactaggacatgcagatggtaaagtccgtttttattataatgatgagggtttataa

SEQ ID NO: 378625 - DNA, 873 bp, Salmonella enterica
atggaaagattgcaccaagtattattagcctcaaatgcaagtatagaatccattgagcactgctcattaccctatgtatttttgcccagtacttcgacattgaataatgattgctatattgatatattctatatattggatggcactggtgaattaatgtttaataagctaccaataaaggagttatcaaaaggtgactttattctgttgaaaagagaaaatagtgattactttatcctgtcgggtcatgctgatactgttgtcattcatgcaaaaatattaccgcgcgggttatatttggatttggttatgtaccatgggtatcatgagtctttgaaggttttacgaaaagaatgtacagatgttttatatatagcggctgaaatgatgaagttattgctttgtttaaaaaataaaggaacacagatgaatcgtcttattgagatacccatggcgcttttttttgttcaactttatgtcgttgaaagttcatggttatctctttcatcctataactctgagcacaaactatctaatttaatgctggaaattataaaaaatccatgcgccccctggcgagtaaaggatatggcgaaaaagtataatatgagcactaatttttttatagatgaattcagaaagttagcaggagtcacaccatttgtttttttaaaaaaaacaagattaaatagaggtagaaaacttcttgaaaatacagaaaaaccagtatctattattgccagggaatgcggctataatagtcatgcatcttttgcttattatataaaaaaagagtttggatttcctcctttaaaaataagaaggaatgcaaaaataaatatcgatagtatttcaccagaagataattgttaa

SEQ ID NO: 378626 - DNA, 489 bp, Salmonella enterica
atgaaaaaatatatttccttactgagtgttttttttatttctcttactctgagtgcatgtcatcagaaaccagtaaagagtatagtaacgcctctgacaacaccaaaaaaacaggaaacatcatctcttgaactgtttcctctaagtgagttccctcatgcgggatggagcaaggtcgatttagcaggaagaaaatggtacatcgatactgaaaaagtattgacgcgtaatgaacttacatctttggcatttgttcaaaacgacaagggtgaagtgctgttacatattttccctaatcaacagggaaaaattaaaattaataattcattgagtaataaagatgggtttatattaatggtattaaatggtcgggctatttcactttcaaaaatcaattcagctgaggttttgccgttttatgttggtgatgagaatataacaataaaattagcagaggaaattacgcaaaagaaattgattcgtaaatga

SEQ ID NO: 378627 - DNA, 825 bp, Salmonella enterica
atgaaaacatatccagctaaatttttatttttgaccgttgttgccttgtctggttgttaccagaacccaagtcatccggaacgtgatgggagcattaaaggggttgtctggcctgcccctgaaaatgcaaagctgtggaccggaaaggggatatttccagcgccagaaagcatctctctattaaataaagagatgacaaaagaccaggtatactttctcatcggtagaccgcatttcgatgaaggcgttttctctgtcagggagtgggattacctccttcacttcagaacaccgggtataggtcttaatggagtgacaacatgtcagctaaaaattatttataattcagataaacgggtttcagatatttactggagatctgttgatcccaaaaatagtctgtgtccgccagatactgggcagaaaaaagaaagtcacagatatactttgagtgcagatatcctttttggtctgaatcaatatcagcttgataaatcgaatcatgatatgttacaaaatattgataaaataatttcagatatcaaagggaaaggaggatatgacagtatctctgtctatggctatacggactggcaaggggacactggctataacatgaaactgtcaacattacgtgcagaatctgtggcaaattattttatatctaatggtttcccaaaagataaaattttttataagggggtaggaaaaactgttccggaaaccagttgtccaggtttgacaaacgaaaagttgacgaaatgtttattgccggacaggaaggttgtcattattgttaatgctgccaagactaatgttaagtaa

SEQ ID NO: 378628 - DNA, 4269 bp, Salmonella enterica
atggaagaaaaaaataaaattacacttgttgttttgtgtatcactaatgttctcctgattgcacatactaacgcagcagaaacatctattagttgttatgttgacaacgtcaaaaaaacatttcgttgtggaaatgatactattaccaatggaaaaaataccattgctgttggaaaccaatccagcgcatcaggggccaggtccattgctattggttctatcgatgatgcaataaataacttagacccagcgtttactaataatacaaaaagtgctggggatgacagcatttcaattggcgctggaacaactgtcgtcgcaaatgctcctggaggtatagcaataggctctcgtcggcatgagtctaacggaaaaagtgcagggaacgaagtaaatagtggtgctcgcgtatattctataaacggtatagccattggtactggttcagtctctggtagctcagttgtgggtaaacaatatcatcgaacaattgctattggtgatggagctaaagtttcaggtaatttaaatacggggctgggagctggtattgttgtcggagatagttcagacagttctgtcgctgttggttttgcatctgcaattggacgccagaaatctggcagccgtatatttgataatgcggctaaagcaacggctgttggagctggtgctgaagtaatgagaggctcagatcgttctacaagtattggctcagaagcgcgtgtgctccagggaactactcaatctattgccctgggaaataacacaaccattaatattggtgggaataattccactgctgttggctcgtttgcttccgttggtccgaatgcagcaaatgccattgcgctcggtggtggtaatgatggaaatgatgcggcaaaagccaatgccgtagcagcgattgctgttggccacgcatccagcgcatcaggtactaatgcacttgctttaggaagttattctcatgcagatgcagaaggggccgtcattattggcagcggtgcaaaaaatacaaaaggcaccctgacggcagttggtctgcccgctgataacggtattaacgccataggtattggtagttcagctaaaagcgcggctaatggcatagctattggtcggggggcagaggctaaaatatctgaggccagaagtattgctattggagatggtgcggtcagtgcggggggaatagcttttggtcagggggcttccgttgtgaaaggaaataacccttcaggaacagcaagcgcatctgttgctattggtcgtcaaacgacagtagctgattatggtgtggctttggggtcaagagcttctgtggggatgactcttactgcggacggaactcctgaaaaactgactacagggggcctgtatggtaccgctgttggtataaatagtggtgtatattcgaattcggcgctggcggtaggacataacgcaaaagtcagtgaaaacgctaatgccgcactggctgtgggttataactcacagtcttctgctcaaaatgcaattgcaatagggaacagtgctaaagcaacggccgtaaatactatcagtattggtaccggaaatatggtaagtggcaataattccggtgcgataggtgatccaagtactgtatccggggcaaactcttattctttaggtaataataatactgtctccgccagtaacgcttttgtgcttggcagcgcggttaataactccgttgataattcagttgttcttggcaatggctcgacggtttctatcgccgttgcaacgcctgaatatactgtcaatggggtttctcacacattttctggttctgcgccagtgtcaacggtcagcataggggattccggaaaagaacgcacgttaacgaatgtggccgctggtcgaatttctgctaccagcacggacgctattaatggcagccagttatttgcggttacatccgaagtagaaaaaggtaatcagtttgccgggaataccgggacattcaaccgccgtctgggcgaaaccaccactattcgcggggggctggctgctgatgctgccgccagcaacaaaaatatcaggactgttgcgaaggatggccagatagacattctgctggcagataatcttgatgtgacgagcgtaaaaacaggtggcacgctgcttaacaacgacgggctgcatattaccggcgggccttcagtcaccgcaggcggtattaatgccggaaaccgggtcatcagcaatgtgggcgatgccatcagcgacacggatgcggtgaacaaacgccagctggataatctgtcaatctctgttaacaggggctggaatatacaggccaatggcggggatgctgagaccgttgcaccgggtgatacggtgaacgttacagagggtgacaatattcaggtgacccgcaccggcaaaacgctgaatattgccacggccaggaaggttaattttgataacgttgcggtcggagacatctcccttgataaggatacaggaaaaatcagcgggctttccgatggttcgttatcagcagacagcagggatgcggtaaccggcagccagctgttcaacaccaatgagaacgtaacgacgaatacccgtaatattgcctccaacaaaacacaaatagacagtgggctgaacttcaccgggaataccgggacattcaaccgccgtctgggcgaaaccaccactattcgcggggggctggctgctgatgctgccgccagcaacaaaaatatcaggactgttgcgaaggatggccagatagacattctgctggcagataatcttgatgtgacgagcgtaaaaacaggtggcacgctgcttaacaacgacgggctgcatattaccggcgggccttcagtcaccgcaggcggtattaatgccggaaaccgggtcatcagcaatgtgggcgatgccatcagcgacacggacgcggtgaacaaacgccagctggataatctgtcgactattgtgggtctgggcctgacattttctgctaatgaaggtaatgatattacgcgtaaacccggagacattctggctctgaaaggcgatgccacgacaaaaggtgattacagtggcaaaaatattaaaacggttactgatatttcgaccgggatgatatcgattcagatcgcagaaagtcctgtttttggcagtgtagtgatcaataacaatggaaaaattacgggggtgagtgacggtgcaattgcggcgggaagcaaagaagtcgtgaatggaggacaaatccatcgttttacaacgtctgtcggtaatattattggcggaaatgctcatgccgacccggatggaagccttgttgccagtaatattggtaacaccggtaaaaatacgattcacgatgctattgattctgtcaggagcaccgctgaaaccgccagtgcgggatggaatctgtcagtaaatggacagcagtcaagtgcggtaaaaccaaaagaaacggtcgacctgaataatacggatggaaatatcagtatcactaaaaaggataatcaggtgagctttaacctgtctgattcagtcaaagttaaagaaagtattggtattgaaaatggcccttcgctgaccagaacaggaattgacggtgcaggtatgaaaattacgaatgtggctgatggtgtgattgcggcaggaagtaaagacgcagtaaatggtggtcagattcatgattttgtcagtggagaagtcaccagacccattacatttgcggcagacagtggcatcccttatgacgcaagactgggaacaacagtaaatgtcaaaggtgatgataaaaatattcgaacgacggtgagtggtaatacgctcagcgtcagtatgaatgagaatattaatgttaaatcaattactgcgacagagtccctttcggtggcaagtggtgccagtgtcgatatgggaggaaatgccatccacaatgtaggaaatgcgacccgtcctggagacgctgttaactatgggcagttccagcaggctttcagtagtctgggaaatcagattaatcgcgttgaacgcagagcaaacgcaggtgctgctgcggccatcgcaactgccgggttaactcaggcctatattccgggtaaaagcatgatgtccatgagcggggggacattccagggagaaagtagtctggctattggtctgtccaccatttcagataacggaaactgggtattaaagggctcattctcttcaacaaccagaaatcagaccggcgcatccgttggggtgggattccagttctga

SEQ ID NO: 378629 - DNA, 1347 bp, Salmonella enterica
gtgcagaacaccggcagcagcacgcagacgcagcgtacgctgtacctgcccgggctggagctgcggaccacagtcagcggcggtaaggaaacggagagtctggaggtaatcacggtgggcgaggcaggatgtgcgcaggtgcgggtactgcactggacagcaggcaggccggcggaactcaccggcgaccagaccagatacagctatgacaacctgaccgggagcagcggtctggagctggacggcgacgggaatatcatcagcatggaagagtattatccgtacggcggtacggccgttctgacggcgcgcagccagaccggggcggattacaaaaccgtgcgttactcgggcaaggagcgtgacgcgacggggctgtattactacggataccgttattaccagccgtgggcgggacgctggctgggcgcagacccggcggggacggcggacgggctgaacctgttcaggatggtacggaataatcctgtatccatgaaggataacgatgggcgtgttacagaatggcttgacctggcatatccacacaagtcatttaacgttgtagcgcttatgtataaaaataatcctatgctaaagttatatcatcgaatctttacgcaagaaacaaagaaaatacttgacgaagctgaaataaatgaatccagccttaaaaaactaaaacctaataaaagacaaaaaacatcgagagacatgaaatatactaaaacaaaattaaagaactatgcagcacatgccggatttttaaatgtacccagcggcagcggtgaaactccgagatttaaatctggatttgtaaatttacccggaagcctgagcaataaaaacacattcccgggagtccgtctgatagatgaaaaagtcaaaagaaggtttgaggagtactctccagaaaagctaaaagaatcaacaaaatggagacctgaaacgagccttggttattatcatgtggaaaatgttgacattttcatttctgaaatcaagaaattatatgcagcgtcaggttcggagcttcatgaggttgttgaacgtaggatcagaaatcatctggcgagcaataataatatattaccaagaatggctgggattgcagggctgcacgctgaggtacaggcgctgaaccatatcatatccatgactgatactgaggctagagtagctagtaaactcagttccagttacatatatacccaacgtctggttggagccagaaatgaggatttccctgcatgccataactgctcaggaattattaatgggcttgaaaacatcatgacagggagagttgaaggtcacacaagattaataagaaggaaatccatctga

SEQ ID NO: 378630 - DNA, 159 bp, Salmonella enterica
atggtggccccgttttcagaacagatagtgaatgctgtgctgcctgcaggagctgaccggatactggtgggcaatgtggacgattatggcgggatgcggatgaaccgcttcatctgcacggcggggaaatgcacgttccgggagcgtattcatgattaa

SEQ ID NO: 378631 - DNA, 1182 bp, Salmonella enterica
atgattaagatggtatgcagggcgctgaagatgataacgagggtaaaccggtcatcatttatgctgctccatagagtgaagcgaatgccactgtggttgctggcagtgtgcacgcttgtggtaccaggatatgttgctgcggcagatactaccaatacatgtacggactggaacggggggcagtcagcgatacgcctagagttacctccctcagtcagttttccgcccggcgtaaaacctgacacaaaccagcctctgtacaccagcccgaccccctatgccataaaataccagtgcaatgttacatcgggggcgggacaggcagggataacccggcttaacgatattaactctttaataaatgcactgagtaaggcgggaatgcagttaaagttccgtatccgggattccagtaatggacaggacgtaatctggaatccggccaacgctgaaaatatatcattcggaaaaacttacaccggggacacggaaaaaaggacggtgtatatcaccgtggagctgtaccttataaagagtcctacagccggtttttatgcaatacccccactgactgcgtttaaaatggttccttattatggcacttatagcggtttttttcttaccacttcagcgaccctgatacagtatattccggattgtttcgtaaagaccgccctgactaccaacaaagtggattttgggcctgtgataacatctgatgtaaactcttcgctttccttaactcgtccttttacggtcatggccagcgttaataatgacagtggttgcaacaaaggtaatcttcaggacggctatacggtcagtacttcaggaggaacacagacatttcatctggagcttcctctgaaggtgacatttttcgttaacagtggtggcgaggtatctgacgagaagtctctccatctctataaagaaggcacatcagataaaaatggtctgcaactgaaaatatatgacaacaatcataatgctgtttcctttaataatgacagtacctctctgcccgacattttcccggccaataagctgggcgaatttaacggaagctcgaatacatggatggtcagtaaacaatatactgccaccctgtcctcaacaggggcccccgttctgacagggaaatataatgcacaggtgactgtaaaagtgagttattactga

SEQ ID NO: 378632 - DNA, 507 bp, Salmonella enterica
atgtgccctgataacacacatgcaaaaaagctgtatatggccaacgatattcattatcccggccagaccaaccacgatgcctgctttattccgaaaagtgtccgccagtatgccggcgaacccctgtatatcatcgtggcacactggtgcctgttgcagcagaactgggtacagcgtaaccagatatcagaggcgtttcacatcactgccagacgggccagctacctgattgcctatctgagaagtaaagctacgcgggtagtctgtgtctgccgccaccagaccctgctcaataaagccctgcgctatgaaatttatgttttccgggttcttgacaatcccaccccgtccacgcgccgtgaaaaggccgggccgccgccggtatcaaaacgccgggtcggtaacggtgacaggtcgatggcaaatgaactgtggaaccggctgtgcagtaacagaaatgcgggaaaaatcctgaaaaaggagaaaaaagaagatgacaggacataa

SEQ ID NO: 378633 - DNA, 813 bp, Salmonella enterica
atgacaggacataaccggataccggcccggcaggtcatcgtgcatggtgactgctggccggtgacgaccactgtggtacacctggtccggacatgtctgccgggcagcgactgtgaaagcacacacaggctgcccgcgctgttacagcatctgcgccggaaaccggaggccatactgatactgtgtctgcgtccccgtgagcatctctttttgttctatgccctgcggcggacgctgccggagcacccggtgatggtcatcagcgatgagctgcttttcagtgaccgggtggtactgaaggtgtacgggggtgtcccggcactggcggagcaggcgctggagaaaatacttatcagggggcaggagggagagcagtggtccggggacgcgcgcctgcgcagggcgggagagctggacgcctttttgttatcaccggccccggtgacgggctttatggaagtaccaccgatatttaacagtccgaagcggctgatgaactgtatggaccatctgatgcaccgggagatgctggcatgcggagtgagtccggcccagctgcgtctgttacaggaggtttaccgcggacggggaaagctgtcagcgctatgtggaaagctgaatgcgcgggagaagcaaatctggcaggacaaataccggttactggtcaagctgggaatgcggaaccggctacgggaactgctgtccggaacccggttttgtatggaaaaccagaggacagcttttatggttccggctgatacggggtattcacgcagatataccggcacagtcagcctgtcgggaacggaatag

SEQ ID NO: 378634 - DNA, 501 bp, Salmonella enterica
atgccgggttccgaccttatgtcactggcgtgtcgccttgctgtcatgggggggggcgtatgtgggtggcaaacgatccggcaaaccactgcctctggcgaagtgacgcttcatttacaggcgacccgtaaaaccgggcactgccctgaatgcctgaagtgcagcacttctgtacatagtcggcgacgacggcggatacagcatctgccatgttcgggccaggctctctggctgatatttgccgttcgccactggtactgccgaaatccatcctgttcacgcaaaatctttgccgaatctttagagcattttgctggtccgcgacagcaggcttcgcagtcactacaaaaattacagcatcaactcggattgatttccggtggagaggcaggacgacgggctgcaacggcaccagatctgcggacgggggcgatatcagtcacgattaccccacgattttttatgctttcctgccaggctattccgttcccgacaggctga

SEQ ID NO: 378635 - DNA, 972 bp, Salmonella enterica
atggataaaaaaccctcatctcaggatatcgaactactgacagagattgctattgcttactatcgcgatgaggttactcaggaagagatagcccgaaagttcggaatttcccggattaaagtaggaagattgctgagacgtgctaaagaagaagggattgtcgaaattaacgtgagatatcatccggtattcagttctcaactggaaaaccagatgtgtgagcgatttaaaattaccagggcattaatcgctcttgatcacagtaacgaagaagaacagcgccgtcaggtggctgcgctggtatcggcttacctgacacataacctgcgcgataacatggttatcactgttggtcaggggcgtaatgttgccgccgttgcggaatacaccagtccaatccaggaaaaaaaatgtcatttcatatgcggaattggtggtacccacagaccaggagatattatcaatgccgatcatatcagccgtttgctggccaaaaaattcggtggtagcagcgagtctttgtatgcccccgcgtatgtggagaatgtcgcgttaagggatgccttattacaaaacggcacaattaaagaaacgctggatcgggcacgtaaagcagacatcgcgctggttggtattggtgatatgaatgaaaatagctatatggtaaagcttgggtggtttactccagaggaaataagtgatgcgagccttaatcagggcgtaataggtgatattgcgggttatgatttttttaacgcacagggacaacatgtaaacactgtgatggataatcgcgttattggcctgagtgttgaagaacttaaacgcattccgtgtgtgatcgccattgctgcagaaaacacgaaatcaatggcaataataggggcattacgtacgggggctatcgatgttattgcaaccagtgctcataacatcagaacgatactaagtatgactgacaaagtccggtaa

SEQ ID NO: 378636 - DNA, 657 bp, Salmonella enterica
atgtctgaatttgtttctacgcaatcaggaaaccgtattgtaagcgatctggtccacattattatcagccatcgggactatctcagtgagatcgatggtgctattggtgacggagatcatggtatcaatatgtcaaaaggctttgccctgtgcggtgataaaatcagagataagtccttgacgttgtctgaagggtttgaagtgttatcggacaccctgatggaggatattggtggctcaatggggccgctctacggcagccttttccttgggatggccagcagtatccgtaataagaacgagctgaaccggcaggattttctggacatgctgaacagtgctttaaacgagctacgtgatatcagtgatgcgcagcccggggacaaatgcattatggatgctctgtgtccggctatttctgcatttggcagtgctgtaggcagaggtgagagcttctacagcgctctggaaaaactcaaactggcagcagccgaggggcgagattccacacgtgatatggttgcaaaaataggccgggccagccgtctgggagaacgttcgcgcggtgttctcgatgccggagccgtttcatgctgcctgctgttaactcaactggcagaaagtgtacagttacagctcacaccgatagaagcatga

SEQ ID NO: 378637 - DNA, 1005 bp, Salmonella enterica
atgaacagaataattaacgatcctgaacatgttgttgaagatgcaatccaggggtatctcaaggcacactcacagtatcttgaagcaaccggaaacccgcgcgttctgaaataccccgccgctccatttgccggaaaagtgggtattgttaccggtggaggctcaggacatgagcctgcgtttctcggctatgtgggaaaaaatatgcttgatgcggttgctgtcggagagattttttcctctcccacggcgggcgcttttctggatgctttcaaagccgctgatggtggtgaaggggttgcctgcctgtacggtaattatgctggcgataacatgaacgtcaaaatggccataaaaaaagccacccaggcaggcattaccgtcaaaactgttgtagccaatgatgatgtggcttcagctcctgcaaatgataaagccagacgtcgtggcgtggccggggaaatactgatgtggaaagtcggtgccgccgctgcagccagaggcgatgaccttgatggcgttatcagtgcagcacagaaagctatcgataactgtcattctgtcggcgtgggcctttcttcctgtactattccagcagtaggacacccaaatttcaccattgaagatggcatgatggaaatcggaatcggtcatcatggtgaggcaggtgttaacgtttctgtcattcagaccgcccgggaaatggctgaaaccatgctggatattgttctcaacgatatgccacatgaaaaaaatgatgaagtggtcgttctggtatccggtcttggtgccacaccggtgatggagctttatatctactatgccgagattgagaaactactcagtaccagggggatacgtattcatcgccagtatgtcgggaattatttcacttcactggaaatgatgggaataacgctgaccctgatgaaggtggacgatgaactgaaatcactgatagatatgcccgcctgttcaacaggtttaactcaggtggagtgctaa

SEQ ID NO: 378638 - DNA, 768 bp, Salmonella enterica
atgcgtaatgaagcagagtctgattcaggtgtcctggaggggaacgttgcgatgatcacgggaggtgcagccggaattggctatgcaatagcctcacgtttcatcagccagggatgcagggtggtattgttggatcgttccgaatctgtcagggatgtcgcacgtcagttggggcctgtttctcaggtgctggggctcagggcggacgtgacatcctctccagaggtggaacaggccatcggggaaactcttcgccattttgggagactggatattcttgtgaacagtgcaggcatcgtgatgcttgatcctgcggaggcactcagtgaagccgcatggaatgcgacactggctgtcaatctgacgggggtttttctgatgagccagattgcagggcgacattttcttcaacagaaagggggaaccattattaatctggcttcacaggcaggcgtggtggctttgcccgggcatctggcttactgcgccagtaaagctggcgtcattggtcttacgcaggttcttgcgcttgagtgggggccacataatgtccgggtaaatgcgatctcacctacggttgtattaacagaactggggcgaaaagcctggtccggggctgttgcggaagagatgttgcaaaaaatacccctgcgccgttttgcacaaccggaagatgttgctgctgccgcactctatctcgccagtgatgcggcaaacatgattactggtacaaatcttgtcatcgatggtggctacaccattcagtaa

SEQ ID NO: 378639 - DNA, 1272 bp, Salmonella enterica
atgaacgcgctggttaaccgtatcggtttatcatcaaagttattgttaggctatgcaggtgttcttattttcatgatgggggaaggactggagcagggctggctttctccctaccttatcagtaaaggtctcacggtacaggaatcagctttgctgttcagtgtatatggattttctgcggctattgccgcatggttatccggcgttctggctgaaatctacactgcacgtcgtgtcatgattgtcgggctgttgatgtttttagctggctctctggtttttcttggatggggcctgccaagcaataagcttgaaataatgatcccaacctatgccctgcggggttttggttatccgttgtttgcttatggttttctggtatgggttgcttatgaagctccgccacaaagactgggctctgctgtcgggattttctggtttgtttacagcggtggattaagtgttttaggcgttttttactcaagtcttgttttaccgtatctcggagaaattaacacactgtggagcgcccttatttttgtcgctctgggcgcgtttatcgctctggcattaaatcggaggcaggagtcaggaacctcacaccgtcgggtcaatgtgacaccagggtatgtacttaaaggaataaccatcgccttcgaaaacccgaagatcggtctgggggggctggtcagaaccattaacacctccgcagcatacgggttcgtcatttttatgccgacttacatgatggatatggggtttacccggacacaatggctacagatgtacgccatgctctggtcggtcaatatcgtatttaatcttatcttcggtgtaatcagcgatggtcttggctggcgtaatgtcgtgatgtggtgcggttgcattggttgtgcggtcaccacattactgtttttctacgttccgcatttttttggagccaattatttcctgacgctggtcgctgcaggtctttttggagcctgtcttgccggatttgttcccctttcagccattatgccaacgctcgccccggacaataaaggcgcagccatgtcgattctcaatctgggggccggactgagtacatttgttggccctgccgttgtcggattatttattggcagcctgggggcttccggtgttatctggattttcgttggtctttacctgttaagtgccgtactgatgaaattcgtcacggttccggtatccaaaaatacggttaccggaaccgatgaagcatccgggatgaccaacatttctcactaa

SEQ ID NO: 378640 - DNA, 1113 bp, Salmonella enterica
atgtgtaacgtctgtgatgaaaatgccgtgcttgctgcaggcatccccagagagatgaaagccgttgtagcgtatgcaccacatgactatcgccttgaaacggtgaaggtccctgagatcagttcacaggaaatccttgtaaaagttgaggcctgcggaatttgtgccggtgatgtcaaagcctttgaaggtgctcccagtttttggggggatgaaaatcagccggcatacattaaagcgccaatgatcccgggccatgaattcattggccgtgttgtcgggttaggatctgcagttacgggattcaaaattggtgacagagtcatctcagagcagatagtgccctgctgggagtgccggttctgtaatcgtggacagtactggatgtgcgaaaaacatgacctttacggtttccagaataatgtgaacggcggtatggctgaatacatgaaattcaccaaagaggcgattaactatcatgtcccggaagatttgcctgtcgaaaaagcgattctgatagagccctatgcctgttctttacatgccgttcagcgtgcaaatattaagctgggggatgttgtcgtgcttgctggcgccgggactctcggtctgggaatgattggggctatcaagaaatctggtccggcgaaacttatcgtacttgatctgaatgatgaacgtcttgcgctggccagaaagttcggcgcagatattgtacttaacccgacaacggacaatgtgggggccattatcaaagatatgacggagggttatggctgtgacatttatattgaggcttcaggtgcgaagcagtcagtagagcagggactgaaaatgatccgtaagctaggtacttttgttgaattttccgtcttcaaagatcctgtcaccgttgactggagcattatcagcgaccgcaaggaacttgatgtgctgggctctcatctggggccttactgttatcccctggtcattgagggaattgccagtggtgattttccaacggaaggtgtggtcactcagatattacctcttgaacagtttgctgaaggtttcgaaatgatgaaacgcggaaccggatcaatcaaagtcgtcctcgaccccaatatctaa

SEQ ID NO: 378641 - DNA, 483 bp, Salmonella enterica
atgttacccattgctgtaggtgcagatgatgccgccattgaattaaaaaacatgctgatcacatggctgcaagagaagggttataacgtaaaagattacagcgacaataacgaaaaccatcatgactatccggatattgcctacgccgtagccagtgcgattagcaacaaagaacaccaaagaggaatactcatttgcggaaccgggattggaatgaacatcgtcgccaataaggttcccggtattcgatctgcacagtgccacgacacctattccgcacaacgagcccgtaaaagcaatgatgcgcaaatcataacgctgggtgcccgtgttattggacctgaactggcaaaaagcattgttgaagcatggctatcttcagagtttgagggcggacgttcatctccaaaagtagagcggatttcctggtacgaaaattcatttgagaaaaaccaggttcaccaacagggaaaactgaaatga

SEQ ID NO: 378642 - DNA, 984 bp, Salmonella enterica
atgaatcaactgaaagagttgcggaaaataacatcgattgtggccgataccggagatattgatgaaatccggcattattctccccaggatgcaacgactaacccttccctgatattaaaagcagcggaacttccacattaccgccatttaattacacaggctctggattatgccgtcagacaaggaggacgggacgaaacactgttacttaatgcctgtgacaaactggcagtactcattggggttgagctgctgcgtcatatccctggccgtgtatcaacagagattgatgcccgattttcgtgggaccgtgggatgtgtgtagccaaagccagaaagttgatacgaatgtatcaggaagaaggagtagacaaatccagggtactgatcaaaatggcagccacatggcagggcattaaggccgcagaagagctggaacgagagggaattaactgtaacctgacattactgttttcatttgcacaggccagagcatgtgctgaagccggagtctatcttatttctccttttgtcgggagaatcaacgactggtacaggaacgcgagttctcaggaattttgtgaggtggagtctgagccaggtataaaatcggtacgggcgatttatgaatattataaatccttaaactatccaacgattatcatggccgcaagtttccgaaatgcagaacaagtattggcactgtctgggtgtgaccggctgacaatctcgccgacaattttacaaaatttaagtcagcgtaccggtgaggttgtcagaaaactaaatcctgacgtgcaggctgcctaccgtccattaccattaagcgaagctgagttttactggcagcacaatcttgatgcaatggcggttgacaaactggctgaaggaatccgcttgtttgcacaagatactgaaaagctacaaaacaaaatgaataacgaactgcagaccttattgaaaaacaaaactgaacagctctga

SEQ ID NO: 378643 - DNA, 1239 bp, Salmonella enterica
atgactgcgactaatcaatttgctgcacacgttggtctggactgggcagataaaaaacacgatgtctgtgttcagtttaagaacggtgaacgtgtattccatgtgattgaacatacagcagaagcgcttgacgtctggcttaccgagttacatcagaaggtaaaaggcaggatcgctatagctctcgagctgaagaagggccctgtggtatatgctcttcaaaaatatccgtttatcaccgttttccctgtccacgctttatcgctagctcgttaccggcaggctttctcacccagcggcgcaaaagatgacccgcaggatgctgagctggtattagagttaatgctgcgttactcccagaagataaaagctattgaacctgacaatgcggatattcgcttacttcagcaactggttgagcagcgtcgtcagttggttgaagataaacgccgttttgtgaaccggctaatcaacacgctcaaacagtattatcctcagcccctggagtggttctcacatcggggtagcttgctattgtgtgaactgcttatacggtggcccagtctgcaacaattgaaacgagcccggcacgacacgatccgtaactttctgaatgccaaaggtggtcgcgcaatggcccttaccgagcagcgtgtggtgagtattgataacgccatcccgttgacgacagacccgagtgttatagaggctaatgctttgatggcaacagcactggcgacacaaattaaagtcgtgagtgaaatcatcaaaacctatgacgaacgaatcgaaacgctgtttgacacattgccagattcggggctgttcaaatcacttcctggcatggggccgtgtatgggaccacgaatgcttgctgcactgggtgataaccgtgaccggtttaacagcgctgaagaaattcaaaactacgcaggtattgcaccggtgacagaacgaagtggccagaaatcctgggttcactggcgatggctgtgtgccaagttcgtccggcagacctttgttgaatgggcagccaagacggttaactcatcatactgggccagactttattatcagggactgcgagaaaaaggaaaatctcaccagtctgcaatccgggctctggccttcaaatggataaggatcatttaccgctgttggaagacccgaacccagtacgatgaagcgaagtatttgctggctctcgaagcgagacgctcgcccttactgaagccataa

SEQ ID NO: 378644 - DNA, 711 bp, Salmonella enterica
atgaaactctttaaaacactgctcgacaatgagcaagatgatgttcttgaaacatcaatggccatggtagcttcggctctgtctgacccttcaagggtcagtatcctgtgcgcactgatggacgggcgcgcctggacagcaaccgaactcagcgtagtggctgacatagcagcctcgacaaccagcgggcatctgaaccgacttctcagcaacggtctggtcatttgcgtgacgcaggggcgtcatcggtattacagccttgcgggccatcatatcgcgggactgctggaaaacctgatgggagtttctatgcatactcataaaacccacacttcaagtactccggtaaatctgcgttacgcacgcacctgctatgaccatctggcaggcgagcttgctgtcagcatttatgagtttatgctgcgggaaaaatggcttgaggcagatggctcggaactgacatcagtcggcaaaatgaattttgaaagaatgggggtcttgcttaactcacacacacgccgcaagccctgcagcccctgtctggactggagtgaacgacgttttcaccttggcggtaatgcaggctcagctctgcttacgtttttcgttcaaaaagaatggataacgcgtacgccgggatatcgtgaggtgaacgtgaccgattcaggcaaggttgcaatgtatcggctttttgagctgaaaatcacctga

SEQ ID NO: 378645 - DNA, 393 bp, Salmonella enterica
atgtatgacattcatgttattctcaaaaataccccgggttcacttggttcattgggcagtgtgctgggcgaaaacggagtaggacttgaaggcggtggtgtattcacaatgccaggggccggacatgtacattttctggttgaagatggtgaaaaagcccgcagggtactgactgaagctggttttgaaatctgcaacgtgtgtcgtcctctgataagaaaattatctcaggaacgaccgggggagttgggagaaatagctgaaacaattgcccggaacggtattaatatactggtacagtacagcgatcacagcaaccgtctaattctcattacagatgatgatatccgggctgatgaagtaacccaaaaatgggcaataccttctgaatga

SEQ ID NO: 378646 - DNA, 324 bp, Salmonella enterica
atgatagcagtactttttgaggcaaatgctctgacagaagctcaggaaagatatcttcagcttgcttcggagctgaagcctcttttatcccacacgcccgggtttatttcgattgagcgttatcaaagcctgactacgcccggaaagattctttctctgtcctggtgggaagatgaggagtccgtagccggatggaagcaaaatgtgatgcatcaggacgcgcagaaagaaggcaggcagtcgattttttcattctacagaatacggatagccagcgtaatccgtgattactcttcggataagggaacaaatcagcatgtatga

SEQ ID NO: 378647 - DNA, 1959 bp, Salmonella enterica
atgatagggcgcattcctccgaaacgacgtgatggcaagagcagctttctgaagctggttgcctatgcgatcgttcgtgatgaggataaacctgacgtaccgcttgagcctgatcatcctgactggcgacgcccaaaatcgaaagatgaaatctttaaccggttgacggactacattacccgaagcggtgatgaaagtattatgcagacactaagcacggatgagtatggtcgtcagcgtgttttatttgatggtgttatgtgtgaaacaaataccttcagcctggcaacggctgcgatcgagatgaacgcagttgcacttcaaaatacacgctgtaaggaccctgttctgcactattttctgtcatggccagtgacggataacccgacacatgaccagatttttgacagtgtcagacagtcgctcatcgaattcggaatggcagaacaccagtacgttgctgccattcataccgataccaataacattcactgccacattgcagccaaccgtattcatcctgagacttacaaagcagctgatgactcatatacgtttcgtaaactgcaaagagtcttgcgaaagctcgaacttaagtacgactggactcccacgaacgggaagcgtgatgaacctcctgtaccacagggtgcggtcgcaatggagtattatgcggatcaggaaagcctgcacagttatgccatgagaacgtgtgcagatgatatggagaagctgattatcagagatgatctgacctggacggacgtgcacaaacttctggtcaggcaggggctgaaactcgacaggaaagggaaaggattagctatctggtccctcgatgagccggatattacaccgataaaagcgagcaatctgcatccggatctgacactcagttgtctggaagatgatcttggcccgtttgaacgaatggaagatagcggtcgatatacgcttgatgaaaatgatgcaggtgaagatgcactgatccatatgtatcgttatgagccagcgttgcataagcgggatgaaggggcgagggctgcaagacgtgaagcgcgcgcagctgcgaggcgtgaactgtttgaccgttataaaaaatactctgacggtttcaaacgtccgaagatggaaagcacggaagcgaccaaacagttcaaagcgttatccaatcgctatgcctggaagaaagagcaggtccggtatatttttgacgatccgttgattcgaaaagccgtttaccgtgttctggaagcggagcgtcagaaagaatatgaggcgttaaaagcgcagattaaacaggaaaaagcggcgttctataaggacccagtgaaccgcaaactcacccggcaggagtgggttgcacagcaggcgctaaaacaagaccaggccgcaatatcatgtctgcgtggatggtcttatcgttataagcgcaatgccttaacgcccgcgctgtccgaaaatgccattgtgtgtgcggtggccgatgatatcagaccttacaacgtgcagagttatgagacgtcagtcaatcgtgacggagtcatacagtacaaacagaacggcattgttcagattcaggataagggcgatcgcattgagattgcggacccttacatgcagggcgggcaacacatcgccagcgcaatggtgattgcggaggaaaaatccggcgaaaaactgctgttcagtggcgatcctgccttcgtggacgcagcctgtaatattgtgccgtggttcaacagcgggggagaaaaaccactgtcgctaacagactcacagcagcggattatggctggttacgataaacctgccacccaatctgaccggccatcaatgacgcatcgtattgtggatgaagaaacgtatcttgcgtcacgccagcgagacaaactcagtgatgacgatgagctgaagcctgaaagaaatactcatcgtccgcgaccggctggtcgttga

SEQ ID NO: 378648 - DNA, 306 bp, Salmonella enterica
atgagcaagagcgagaagcgaaacagaacagcactccttcccagtgttcgctgccttccggaagagaaggaagccattcaggagaaagcaaaagccgccgggctgagcctcggtgagtttctgcgtcgttctgccctagggcgccgcatcgatgctcagtgtgatacggaaatgatcatggaattgcgtcgtcttggggggctgcaaaagcatctctttaaggaaggtaacggcgtactgagtaaggaatactctcaggtgctggttgcattacagaaagctcttctgcgagtaggtcagggctga

SEQ ID NO: 378649 - DNA, 318 bp, Salmonella enterica
atgacggataaaaagtggtacagcgtggaagacattgaactggctaaatcagccctgagtgagatgccagatttgacgccaacccgcctgactaagtcggatgttcttgaacagcttaaagagcagattgttgaactctcactcaaaaagggatacagcgtggaggatattcgtagcgcgctggacagtgcaggaattaaaacaagtgccaagtctgtgcgtgatgttctgaattcttccaggaaatcaccatcacggacgacaagaagcaggaaatcaggaaccgaagcgaccgacagacctgcacaaaaatcatag

SEQ ID NO: 378650 - DNA, 834 bp, Salmonella enterica
atggcccgtttatcatctgttttccgttctgctaatgtcatccgtaaagaacgcgcgctgaccaatgacgaacttatgcgttgtgtacccagcgtattttcaggggaaaaacatgaatcccgcagcgatcgctacacctacatcccgacaatcaccctgctggataacctgcgcaaagaagggttccagccgtttttcgcctgtcagaccagaacgcgcgatgccggaaagcgtgagcatacgaaacatatgttacgtcttcgccgtgaaggtgaaattgcgggagaggaagtgccggaaattattctccttaacagtcacgatggcagcagcagctaccagatgataccaggcatgttccgcttcgtatgcatgaatggcatggtctgcgggcagaccttcggtgaaatccgcgtgccgcataagggcgatgttgtcggacaggtcattgaaggggctttcgaagtcctggacattttcgatggcgtcaaagaatcacgcggagagatgaaagagattggcctcagcaaagacgaacagcgcatttttgcggagattgccctcaactggaaatatgacgacaaaggagagggaaagcatattcctcttgagccggatgatattttgcaggtccgccgccacgaagataataaagacgatctctggacaacctaccagcgcgttcaggaaaatatgacgaaaggtggcctgtggggtaagaatgcaaaagggaaacatcaacggacccgcgccgttaatggtatcgatggtgatgtcaaacttaacagggcattgtgggagatggcggaaaaaatgaaagcactgaagtcataa

SEQ ID NO: 378651 - DNA, 258 bp, Salmonella enterica
atgaccggatatgaactgaggctgtggcggaaaggtcttggctggagccgtgacagggctgctgaagaattgggcgtttgcctgcgttcatacaaggcatacgagaacgctgctctaatcaagcgtaacattgctttagccaccgtgtccctcaccctccggaatctgctccccgaatttgacaggaagcggatgagcggcgaaaaaatgcggcagttactggatgttatgatccgggacgcaacgcacaacgcctga

SEQ ID NO: 378652 - DNA, 204 bp, Salmonella enterica
atgaacagactgaatgtcaccatcaacattaccgcattgtctcaaagaggaccgaaagccctcgcccgtatcatcgacagagcacattaccatgtggcctgtgcgcaggaagcgcatgcgcattatggtgccaggttcacccgaactgacacctgcgtgtactttatccgtggcgcactggaggcaattgtcaggaaggtgtga

SEQ ID NO: 378653 - DNA, 159 bp, Salmonella enterica
atgaaactgccgcgaaacactctgttctggtgcgtattaatagtgtgtctcacgctactgatatttacttacctgacccgtaaatcactctgtgaaatccggtacagggacacgaacagggaggtggcggcttttatggcttacgaatccgctaagtag

SEQ ID NO: 378654 - DNA, 327 bp, Salmonella enterica
atgaagtggcgctattcactgcgctggaagctgccgcacagaccgtgtccggggctgcaggaactggcgtcggaagtggtggaggccgggcagcccgccccggagtcggtgatggcccgctgggtggcaggtgccgggtatgcggtgtgtgtggatttcctggatgagaggcagatcaggcgctggagcgatgaacggaaagcggctgcccgcaaacgaaatctggagcgccgcgtaaaccggatcgcgccgttgtttgccgatgaacttatcgagcgggaactggaaacccgaccggcgtattttcgcggaaaatcagtacgataa

SEQ ID NO: 378655 - DNA, 2043 bp, Salmonella enterica
atgtcagccgagtctaaagcaaaaaaggcaaaaaaagccagccccaaagcggcagcgcataaagcgagcgcacagtcagacgttctggttgccgcactggacagcgcccctatccattacaccgcctggtcccgcctgtttatcggggatctgaactgccgcatcgtcccgcatactcaggaagaaatcagggggtatgccgacagtatccacgcagtcgggcagatccataacattgtggtggttgaatgtgatgatggtcggctggaagtggtttgcggcgggggacggacaaaagcgatcggtctgctggttgaagaagggaaggtaaacccggatcacgaatggatttcttataaagcggtgccgcgtgaactggcacgggctgtctcccttaccgaaaacggcagacaccgcgccatgcaccctgccgagcagatcgccggattccgcgccctggctgaagaagggaaaacgcccgcgcaaatcggggatttgctgggctacggtgtgaagcacgtccagcgcatgctgaagctgacagggctggctccggtgattcttcaggcactggcagaggacaaaatcaccacagaacactgtcaggcgctggcgctggaagataatcccgaccgtcaggtgcaggtgtacgaggccgcgtgtcgtcaggaatacaacaataaaccggaagtgcgcgtgatccgtaatctgatcaccgacagtcaggtttccaccctcaacaacagcaaatatgcgtttgtcggggaaacggcgttctccggcgatgaaatccgcgctgacctgttcagcgatgagcagggcggttttgtggacaaactggcgctggatacggccctgctggaaaaactccaggttgtggcggagtgcctgaaagaggccgagggctgggcatgggccatcggacgcatggacgccgtcagttaccacggtgaggacagcgcggtctaccgtattcaggatgagcctgacgcggtttacacggcgcaggaacagcagcgcatggatgaattgcaggatcagtatgacgagaaccagaccgccagcgatgaaactgacgcgatggagtcagagatggaggccatcgaatgcgcggcacaactccgggcatggacgccggaaatgcgcgcacagtccggcgtggtggtgtcatggcgtcacggtgaaatctgtgtccagcgcgggattttcctgcgtgagcagtctgaaacggaagacgaacctgcccgggttaaaacgtatgaacgccagccggagcctgtggacgatatcagtgttcccctgctgaccagaatgtgtgcggagcggacgctggcagtccaggcggcactgatgcagcagcctgaaaaatccgtggccctgctggcatggacgctgtgtctgaacgtgttcggcagcggcgcgtataaccgacccgcgcaaatctccctggactgtaagcattactccctgacgaataccgccccgtccggtaaagagggcatggcatttctgaccctgaagcaggaagggaaacgccttgaaacgctgctaccggaagggtggaaacaggatttcaccacgttctttatcctctgtaccgccgatcttctggctctgctcagtttctgtacagcatgcggtctcgatggcatgcagacgcgtggcaccggaggcaccacccgcagcccgctcgataagctggaaacctctctcgctttccatctgcgcgactggtggcagccgacgaaggccgatttcttcgctggcctcagaaagccacaaatcattgccgcactgaacgaggccggactgtcaggcgcggcgcgggatgcggagaagatgaagaaaggtgatgcggctgaactggcagaggacaaaatgcgggacacccgctgggtgcctgtctggatgcgcgcccctgatgcagaaaaatccccgtctgatgcagaaaacgacgtatctgataccgaaaacggcagtgctgatgcacccgatgcggcttttgatgcagacagccaccacaccctgcctgatgcagcctga

SEQ ID NO: 378656 - DNA, 564 bp, Salmonella enterica
atgcatagtgaactcagggaccgcattcaggcgatgcgggccagacttgacgggcgcgcacccgtggccgagattcgggccagctcgcagcttttcgtcactcccgacccggtttgtcatcagatggttgatctggcagagcttaacgattctgaccggatactggagccgcaggccggaacgggggccattttacgggcaatccgggaggctgtcccactggcacggtgtgacgccgtggagattaacgccgcgttagtcgcgcatctgcaagcggcgtttccgggcgttaacgtccggtgcagggatttcctggattaccagcaggaaaggctatggaacaaaatcctgatgaatccgccgtttcagcatgcgcaggatatccgccacatacagcacgccctgacgctgcttgagtccggcgggatactgacggcggtttgtctgaacgggccacgccagcagaagatcctgaaacccctggctgatgtctgggagccgttgccgcgtggcatattcacgtttaccgatgtttcaaccgtcctgctcagaattcagaactga

SEQ ID NO: 378657 - DNA, 1383 bp, Salmonella enterica
atgacacagactaccgcactggcacagactgccgacatgaccccgccgcccgcatccgaagacagccccgcgcagtcgtaccgggcgacctattccccggacgataacaagctgcgtctttatgccgcgctgcgtctcgatgaggaaacgtataaaaaagtacatgacgcgggttttcgctgggcgccgaaacaaaaactgtttgtcgcgcccgcctggaccccgtaccgtgaggacgtgttgctgtcccttgccggagatattgaagacgatgacaacaccctgtctgaccgtcaggagcaacgcgccgaccgtttcagcggctacagtgaaaaacgcgccggggagtcagagcagacgctcgaacaggtggacgcgctggcgtcggttatcccgttcggacagccgatcctggttggtcatcacagcgaacgccgggcgcgacgggatgcgcagcgtattgaaaacggcatgaaacgcgccgtgatgctgtttgaacgtgcggaatactggcaggagcgggcgcaggcttccctgcgtcacgcgaaatataaagagctcccggctgtgcgttatcgtcgtattaaaaaaattgaggcggatttacgcaagtctgaaaagaccatttcacagtcagagaaatatctgacaatgtggcgggcgcagacgctggatctgaacatggcgcagcttgtcagtaattacgatcacattaccgcctgtttcacgctggataagtacccgcgcccgccggagaaaagccagtacgaaggccggatgtccctgcattcggctcttgagaacgagattatcacctttgaacaggcccgcgatattgcggttcgctgccatgaacgcgcgatccgccatcagcagcgctgggttactcattaccggaaccgtctggcctatgagcgggccatgctggatgaaagcggcggtgttgcctcccgtactcaggagtttgagcagggcgggcaggttcagagtcggggcgagtggctgaccatcatccgtatcaatagaagtaacggcgcggtcagttcggttgtcaccccgtattacagctttatgggctgtaacgggactatgacactgacccccgaccgtatcacggactataaagccccgtctgcggaagaagcccgcgccgccaaacaggccgcgaaacgcccgccgatcgtcaactggccgggggaaggtttccgcgaaatgacaaaagccgaatggtcgaaaaccccggctgattataagtcggtccggggtgtcgctgaaaatgatgagcatggcgcgtaccgtttccgccgcatcatgaccagcggctacacgctcgataacgtgtacatcaccgacatgaaaaccgtcgaaatccctcaaaaataa

SEQ ID NO: 378658 - DNA, 231 bp, Salmonella enterica
atgcctgtaactattgtttcaccttccgcagaggctgtaaagccccgccgtcatacgcgcatcattcgggccgatattttggcatcagagattaaacccgaattaaaagcgttcgggcgacacatcgccagacgtttccgcaaggggcgcggggtacatatccccgcgatgacaaatgccgcctacgggcaggtactccgcactcttgaactgaaacgcgcatttaactga

SEQ ID NO: 378659 - DNA, 243 bp, Salmonella enterica
atgcaggctcaggcgatgcgtgtttatcagattgcgtttagcggacgcgatgcacagggcgttttaccgatgtttacccgcgtaaaagccatgaccggtaaaggggcggtgagagcgtttgttgaacgttataaacccgtcagcggctggtttttgggcgaccccgaagacattaccgacaaagtgaataaggaggcagacgacacagacagacaacacgcagagatgaaaaaagcagggtaa

SEQ ID NO: 378660 - DNA, 228 bp, Salmonella enterica
atggccggaaaaaatttatcgcgaaaggttcaccgtccctggactcctgcgccgggttgtggctgtctcagcccgggcgaaaggggcttaaacggtgaaaaggcaccagaagtggatgagagcaggggcccgctgcaatgtcggggcgcggcacgcgaaacggcgttgcgccttacagcccggcagacttaccgccggggtgcgaaaagcgcaggaaacggcgcgtaa

SEQ ID NO: 378661 - DNA, 132 bp, Salmonella enterica
atgccgggtgatagtttctggccagtgtgtgaggtttttttcctgccggtgataatactttgcctgtgcctgtgcctgtgcctgtgcctgtgcctgttcatgctgctgcttccctgtgtttttgaaatctga

SEQ ID NO: 378662 - DNA, 255 bp, Salmonella enterica
atgtctgtatttaatctcgcggcaacatcgaaagaagaccaggataaggaggccattgacctggttgcttcaggtgtggcgtataaagaaagactggcgatgccggtggtcgctgaactggtggccagagagcagcctgaacatttgagagagtatttccgggcgcggctggagcactatcgccaggtcagtgcgcagctcccggacaaaaatgccccggaatatgccagaaaagaggatgaggttaaaaaataa

SEQ ID NO: 378663 - DNA, 183 bp, Salmonella enterica
gtgaatattaaaccggaaacccgcgaaatccttcgtcagtacaaagcactgattaattgtgatgcaggccagcgggaactgacgaccgcgcaggtcatggatgaaatctgcgagtacatgacctgtcagtgtgccgtgtacatcggcggtcacttcatcttacagggcggaaagggcaggtaa

SEQ ID NO: 378664 - DNA, 768 bp, Salmonella enterica
atgaataacgataccctgaacgccctcattcttcgccacggtgacaatctgctgcgccggtccggctggcccgactcagttgatatgacgcccgtcgcgcccgaaaccgtacccggctggctgtacgtcagtggcgtgctcgatgcagacgagatcctggcgctgacaacccggttgtgccaggccctgaatgacggacgagcgaaactgctgacggccagtgcgcaacggctggcaggaacacccgcccggctgcatctgtacccggctcagtcttatccccggcccgaagccctgcctgactgtacgtgtatcagtctgccgtatgcccgggaatggctgacaaaagccgaatgcgacgacctgctggccttcctgaaagatttcactgaccgtgtgtgcgaaatcgttcgtcaggacgcgaagcgcatcgcggcagcactggtgccatctgacgcaccacggctgatggaaaaacgtttcggagactggcgactggttgcggacgaatacgaacatgacaactggctggacagtgaggacggggaactgctggatcaggtgctggacggcatactggtccgggatgcgcggttttgtccggtcctgctcaccctggtgaatgagtcccgggaagaaatcgaagcggccggggtgatgaccgatctcctgcgtttcccgggggaaccggttcgtcgctggtttgaccgccgcgtgttgcgggatgttctgaacgaggtccgcaacacagaccccatcggggattaa

SEQ ID NO: 378665 - DNA, 405 bp, Salmonella enterica
atgatgtatggcacccgtaaggaactgaataaaaagctgaaacgtatgttttgcaacgatgatcactttgccctgctggtctggacgaagcagaacgtgatggcccaggtggaaaatatgacagaaaacgaggccgctgcgattttgcaggaaatcggcagcgttgccgaccataccgaagagggaatttcatttcgcacgattcaggagatgtatgccggattacgggccgacatcccgaccgtcatcgtgcccgccgatctgctggcccgtctgactgacgtagcggggctggcgctggacacagaggacgcccaggcctggccgcttgttcgccagcattacccgtccgtggctgatgcccaggccgatatcacgtggctcaggcagctcctggccgcctga

SEQ ID NO: 378666 - DNA, 420 bp, Salmonella enterica
atgtacggaacctgtgaaaacctctgccggttgctgagtgagcattatcccgcagaaaccccgctgaccctgattatctggtccccggcggatatcgaagcgctggccgacggaatggaatgtgccgtttctgaacaggacataaaggcggtgctggcgcgtctggatgccataccggaagaacaacggctcaggtctggcgtgtctgccagtgcggtgatggatctgattgatcaggtgaaacaggccgttccggcggtgatggtgccggctgacctgcttgaaaccctgctgacgaccgccgaacaggcgttatggcacagggaatggaccgcccgtgacgacaatcatccggtgccggaaagcgttacccgccgcctggctgatgcggcgaaagtccgtgagttactgaaaaactga

SEQ ID NO: 378667 - DNA, 222 bp, Salmonella enterica
atgaactatgccggacacgaaaaactccgcgcagaagtggcggaactggccaacaacatgagtgacctgcgggacgcgctgaacggcatggagcaccgttatcgctttgattccgaagtgctgaccgaacgcctggcccgtcagacgcttttccgcatcaatgccctgtttatggcggcgtacaacgaaatgcttgagctggatacctgctttaaggattaa

SEQ ID NO: 378668 - DNA, 228 bp, Salmonella enterica
gtgaataatacagacgctgacattaatgatacctggcttgtcgggttaagtgtcgagattgaaggtactgaaatgatgatgcattacctgattagcgcgactgacctggcgcaggccgaagcgggcgtcatggaaatggcgcgcacctggtggacagtgaccgactcaacggatgtgccgcgactgcacgatgagtgggggaacgactggcgggatattacccgctga

SEQ ID NO: 378669 - DNA, 324 bp, Salmonella enterica
atgacctttcaagagcttgatgctcgtatcgcaggctctggcagacgttctatcgcttctgcattaatcgcttttattcttgatgcgcttgatgagggacaggacggagttgatcttgataccttccaaaaccatacgcgcttcgttcgtaataatgtaaccacggtagccagttacctgcagcttcatggtattatccatatactttattaccgtgatggtgctgcagaacgtcagtatgagtccgttaataattatgggcggtgggcaaagcagtactatcgtccttctgaggctcttatacatctgcatcgacgtgattaa

SEQ ID NO: 378670 - DNA, 438 bp, Salmonella enterica
atgaaatcaaccccattcaccgaaatggccacggtattccgtggccaaattgtccgcctctggacgcttcgatatcctggaacgcaatccgaagcagctgccgcattaacagaagcggctatcaatctgggatacgttacaagaaacaggcccgtacccggcgcggcgttactttcatggtcctctaacccggctgaaactccgttgtgggcagctcagacggcgttaacattgatgctcagcatcggctggaagcccgaaagtaaccaggactggtgtggtatgtcggcgctgatattcagagctaatcgtacacttccacttgagcagttagtcgcttccttgcctgatgacatagacaggcaaactgctaccggatggttcgtggcagcaattgaagaggatgccaactaccgttacaacaggaaatccacatga

SEQ ID NO: 378671 - DNA, 1032 bp, Salmonella enterica
atggccaagaaaccgtttatgagacgactccaggcgcagcaggaaatgaaaaaaaaagcatctgttgtttctgatattgaacaggtcattgcaaataaacagccagatgagcagaaccatgatatagctgcgcaccagattatggcggatattgcccgtccggatatcgaacctgatggacagataatccgtgtcgatataaatctggtttatgctgaagaacaagtgcggcctgaagaagacttcgaggaagatatcatcgatggtatgtctgataccttcgaaactatagggatgcttaccccacctcgttgttatcctcgcgacagacgtggctatcagatatggttaggcgaaacgcgtgttcgcactgcccgcaagcgtggtgatacccacattgatatttatgttggtaaaccaccacgggaaagaaaagaacgcatcatcggtcagctcattgaaaacctgcagcagtctggtttgaaaccattagcgactgcaaaatcgttctatgagctcaaacatgagttcaatatgacgggtgagcaaatcgcaaaaacaatgggtaagcctacctcatttgtcagtaaacaccttcgtctcattgatgcaccagaaaatgttaccgcccttctccgggataaagtcacatctgatgtcgatctggcatacacactgatacaggtaaatgaaaagtctcccgaagaggccgagaagcttgtcgcagctgcgcgagagtctggtatttcacgttcgcaggttaaagctgttcttgatgcagttaagaacaaaagcaaaggtgagatttcgcatgcgaaatctaaggctcagaacaagaaaccaaccaagcctttgggcagtaattcagatgtaaaaacctggcaggttgttgttgagatagacggtcagcaaggggtaataatgactgaccgtgcgccagacaaagctgggtatgtgtgggtgaaaatggatattggtgagatttcagttgaggcttctgaactacgcgtcaaagggatgcgctctcagtga

SEQ ID NO: 378672 - DNA, 867 bp, Salmonella enterica
atgacactgaaaataggacctatcggcaaacttatcgttgtatgtagtcagaagggcggaatcgttaaatcgcagtcatccagtgaaatcgcacatgacctccgtaaagctggtttccgtgtgcttgaaattgatatggactggacaactggtctgacggagagggcttttcctgacggcttaccttatgagatagaacgcgaacctttaagtaacagttttacacccggtgaagcgaatacatatcagcttttcttttctgaaacagagattcgaccgattgagcttcctggcgggcgcttctttatcggtgctaccagtgagcttaatgaaattaactaccgaaacagcgactgcatgttcgacttcagggaacgtattgacgaactgaagaaacagtttgattttattattgctgattcagcgccatcctattcaaatgttatgatcgcagcgcatatgtcagctgattatcttctgattcctaccctgctggagaagcaggcccgtaatgcagttggtaaacagcttacttatatgcagaaaattaagcggaactacaatccttcgctgcagttcatggggacttatgtgacgcagacgcaggtgaaaaattataaaaagccacttaaagaaggatatctggggcctattgatacactgaacctgaatctcctcatcgagatccttcagggaaaaggctactctgaagaatacattctcgcctatatatcatttgtacctgctgctgcaaaagaagcgatcgaacttggtctctcctttgatgaatatgaccccaaatgtcttcctgcaattcagtataaagaacttaccaggaaaattattctgctcgcaggaggtaagtaa

SEQ ID NO: 378673 - DNA, 441 bp, Salmonella enterica
atgaataaaattaccctaggcgtattactgacgttatctttctccggttatgcagcaacggagcagttcacatcaacgctgattgatagctttaaaatcgaaagtaacttccactttcccagaggtacaaatacacttaacgtacatcaaaatgtcactgtatacagctttagtgcaaagagtatcgccgccattaaaaagacacttgcggagattgaacagaaaggattttcaacagcaaccgcaagcctgagcggtctggagaaaaacagaacagcacaattatggtattccgggcaaataaagaaggacagtcactttcgctgtcagtgctgtcagaagtattacaaaaaaacgtcagcattgagagtaagtcaggtctggaaggtattatgccggaacgcctttacactcagatgtctgctcagatgtaagctctga

SEQ ID NO: 378674 - DNA, 213 bp, Salmonella enterica
atgagtttaagtaataataaagtttttgcggcattcaacgtatcattcagtgttattttaactgcgttacttattggtttcgcttcacgaagtacaggtgatgaaacttttgcgcagaagctaatggccctgatgattgcttatttatttttcactttaatagcaacacatacgattctttccatattaaccaaaaacaaacaaaaccagtaa

SEQ ID NO: 378675 - DNA, 270 bp, Salmonella enterica
atgaatatgcgaaattttcgcgctaaccagtggcggaaagcccgtagactttatttttcattcaaccagaatacccgcacaattattaaaaaggcatggcaggacggcgtatatccgactgatcccacctacctgatttatgtgatagagaaacataacggcgactatcagcgccgttgtgatttctacgccgaacagcacagaatattgcgcgaagaaaccgcccggatttataacgaccgggaaaaccagattgatttattccagtaa

SEQ ID NO: 378676 - DNA, 180 bp, Salmonella enterica
atgaaattcagacgtcaggaacgctactcttatcactggacgccagctaaggaagccgattatttacgcaagccgcagcgcgtacagaataaactggcttccggtatccgcttattgccgaccagcttacaacgccgcagagttcgcttgaggaagaaaaacaacgccgggaagaactga

SEQ ID NO: 378677 - DNA, 273 bp, Salmonella enterica
atgggatttatttatttcgtaatatattacttaactaaatttagccatccggaaatactaatctatatttggatattttttctggttttatcaataataaaaattgatcaaattcgcaaccagttagctatcccatcagatgttctggtagcactattcaaagacagcgaagataatgaaaatctcagagatttttttattccattatttaacagtaaagatattttgcgccgaaaagacttgaaaaatatttttgaatatatgaacaaataa

SEQ ID NO: 378678 - DNA, 252 bp, Salmonella enterica
atgcctaacattattctcagtgatacaagcgccagtgtcagcgaactgaagaaaaacccgatggcgacagtcagcgccggtgatggtttcccggtcgctatcctgaaccgtaatcagcctgcgttctactgtgtacccgcagagctgtacgaaaagatgctcgatgccctggacgatcaggagctggttaaactggtagccgaacgcagcaaccaaccgctgcatgatgtagacctggataaatacctatga

SEQ ID NO: 378679 - DNA, 288 bp, Salmonella enterica
atgaggtatcaggtaaaattcagggaagatgcgctgaaagagtggcaaaaactggacaaggctattcagcaacagtttgcgaaaaagctaaaaaagtgctgtgacaatccgcatattccttccgcaaaactgcgcgggataaaggactgctacaaaataaaattacgggcgtcaggttttcgcctggtctatcaggtgattgacgaacaattaattatcgctgttgtagctgtgggtaaacgtgagcgcagtgacgtttataatcttgccagcgaaagaatgagataa

SEQ ID NO: 378680 - DNA, 267 bp, Salmonella enterica
atgaatataaagcaaattactgatgaagcagaaaaatcaattacagaagatatgcagaaagcaatagatgccaaagatcaatggcaggcagaaatgtttttcaactgggcagtaggcactctgaatttttggcgaagactggcaagtttcattgtgcgtcaggaatcagatttatctaagtggaatgaagtaaataaataccgggatgatgccttagaaaaattcgaagagcttgtttcaatggatcgagtccctcttctaaagtga

SEQ ID NO: 378681 - DNA, 291 bp, Salmonella enterica
atgattaccgttacgattagtgagacgaacggaaaacgtaaatggtcacaccgcgcccggacaaaggacgcaatgaccgccatcatccggacgatgaacaagcattttccgctgtcacacaatttcatccctgatgatgtcgataacgccccgatactctttgcggctgtcgccagcacaccggacgtgacagtgacaggtcatatctggaaaccgatgtggcagaagggaattcgctggaacgtcaaaggttccgctgtcaccgtcacgctccataattcttcactctga

SEQ ID NO: 378682 - DNA, 435 bp, Salmonella enterica
atggaaaatatgttgaaaactatgcgtgagtatttccccacgcgaacagtggtgttcgaacagtctctggatatgtttggtatcacccggggtgaggacgggaagctcatatttccccgtcattctgatgaccgtttcccgatcgggcgtatccgcaaacgtctggcagcttatggctggcgcggagaacgtctgaatcaggaagtggcgcgtatcgtcgcgggtcctgatattcttcctgaaagaaatgactacagcataatttttccttacggatgggaacgtaaccagcttacccctgagatgcggagaatgtttccccggaaggctggtcgccgcgtgctacttatgctggatgagttccattatatttatgacgcccgggaacgtcagacgtttgcaccagaaagtgatgaagcacccgaggtatcatga

SEQ ID NO: 378683 - DNA, 357 bp, Salmonella enterica
gtggtgatcaagaaatttatgaggctgggcccccttgaactgataatactgctatgcctgcttacggctctggtaaatctgcttcagtatctgggcgggcgtgaagacggtccgccggctgcagagggcagcattgccatctgcaccctgccgacgggaagctttgacgtgatccagcgggacgggcatctgcaacctgtggatcagaagaccggcgctgtcgctggtctcctggagcgctggccgaatggtgagatccagctgacgacggcagagggttttgcgccgaatgtgacacagtgtctgtccgggaagctgaatacggaacaactgaattccctgccgctgcacgactga

SEQ ID NO: 378684 - DNA, 387 bp, Salmonella enterica
atgcaaaagtttgcgtttgatatggagacatttgttaccgacacggaagaaccggatttcactctcgacccgcagacactgaatgaactggctgccatgcatccactttaccctgaactggcacactggacccggtttgcattctttgtggcctggggcgcgtactcgcaggacatttacgccatcagctgggtggactggatgaccggacaccaggacgagggatttctggcgtactgttatgcctgccagcgctggcctgcgtttgattttggcgggacagggctgtatgacgaggatatacagaaactggcagcgcaacgtccctggagttgctctccgctgccgccggctcccggctggttacctgcagcacataaactatag

SEQ ID NO: 378685 - DNA, 231 bp, Salmonella enterica
atgagaaccgtatctatatttaaaaatggcaataaccgcgccatccgtctgccccgcgatctggattttgagggagtgagcgagctggagattatccgggaaggggacagtattatattgcgtcccgtccggccgacctggggctcattctttgaacttgaaaaggccgatccggactttatggcagatcgagaggacgttgtcagcgacgaaggacgatttgacctgtga

SEQ ID NO: 378686 - DNA, 744 bp, Salmonella enterica
atgagtgaactgaaaattgataatcccgctcagagactgctggatttacttgagcaaggaaacgaatatcagagggatgataattgccgcaaagtctggcaaaaaatattgcaggttgaagatatggaagaacagcatcttcttacccgactggcatgtgctatggcactgcccggacgcataatccaggtcagggaagacaacttttccactctccgcggaaaatcaaaccactggaaaagtcacgtggatacagcatttgtctcacaaagcttaaatgatggctggcatacattccgggataacattgatgatcgtacactcacagaacctggcatgttgtccgatctgtttgaaacccgcggagcacatgccggtatagcggcagaagaaattgatgatctgctggagcggataacgcagttacgtagcgagattcgggagagcgggctttctgccacaatgaaaacccttctgctgaaaccactggcgcagattcaggaagcacttgagtcatacagcatttccggtgtagagccggtgatggacgctgttcagtccacactgggtctggctgttttgcatcccgaatatcgtaatgagattagcaaaggcacagggagcctgttcggagataaaatttctgctttgctgacagatactgcaaatgttgtcactatcgcaggggccatgcccatgatatccggcgcagtgcatacagctctgacctatctgagcagataa

SEQ ID NO: 378687 - DNA, 372 bp, Salmonella enterica
atggtggcagtaaatcagtggtccatggccgcagactcagcagaaatactttaccgccagtgtcaggccggggtatccactgtagcgcaaagaaaatgttatcctgcagcggaaagacagtcggaggcagagctcgtcgctgcagagaaaaaagcacggctctccctgactcagatggagagtatcagcgagggaagccggtccctgcaccctgtgcgggcttttgatcgtgcagagttgctgtaccggaaattccgcacggcagaaagagaacgggtaatggcttcttatggttctggcaacgggggagatcttgcggcatatcaggtcgtaattgaaatgaatctggcgcgaattaatctgctgaaataa

SEQ ID NO: 378688 - DNA, 132 bp, Salmonella enterica
atgaaatcattctgtgaatttatttttgttattgtgccatggttaatactgagcttgcttattattatatatgatgattttattgtgtggcatttctttaaatttatggtttacatttctgatgtcttttaa

SEQ ID NO: 378689 - DNA, 183 bp, Salmonella enterica
atgagagtactcagaacgccaggtttattcttactggttatttctgctatgacagttttttttgaaactcataattattttaccatcaatgataatttcagagtcatggtggatttgtctgaacatcctgatgaatatatctactgcaaagacagatattttaaaccccaccacagaaattaa

SEQ ID NO: 378690 - DNA, 723 bp, Salmonella enterica
atgaaaaaaaacagagtaattcctgtaaacataacatacaaacgattaaatattccctcctcaacgctttacagtctgagtgagtttatttttaaaaaaacacagcagagcaggttttccttacttttcagaaaggtttatccggttactgataaagagatgtttgtcatcgataactatcataatgactggagagatatttatgacaaaaaaaaattgtggtctctggatcctgtggttaatatatgcagaaagcctgagatgacatccctggcatggggggatgatttttttgaagggtattccatactccttaagcatggagaggagtttggctttaaatatggtgtgtctttcattattaatactctacatggatatgagtgtattttgtcactttcaaatgaactttgtaatataacatcacaacagatggcgtcctgtgaactgcactataaagaaatatataactttattattcattcatgtcagcttcatttacgtaatgccagagatttcgaactgacaccgccggtactgacgtctatggaaaaaatcatattaactcttgtgtcagatggattcacatcatcagaaatatcaaataaaatatttatcacagagagtgccgtgaattttcatgtatataatataataaaaaagctgggctgccggaacagaacgcagattgttgcaaagggtataattctgagtttaatttaa

SEQ ID NO: 378691 - DNA, 1053 bp, Salmonella enterica
atgtctgccaataaactgcatctttatacttctacaggcctgctggattttgagccgaataagactgctactattattgctgagcttaaagacagtaatgaaaaaccgatatcaggaatggagataaaatggagatatgttgcagattcccctgatgcaacggtaaccacatacggcggcagtagtcataccggtgctgatggccgggcggaatatacgatctccagtaacaaagctaactcgattagtgttacagcaacttctacttgtgcggatgctgaaactatttacattggagtggcatctgataatgttacggctcctgttgtggttgattctgatatccaggggatcgcttatcagattatgatacgcaaacatgtcaaagggggacatgcaggtgacagttacactgtatactgggatgatcatgctatcgccacagtaatggatgatcctgcgaaaaatatttttccctatgttaaatccataaagaagaatgcagactatctttcaccgggtactcactatatctattacaccattgatgatcaggtcggcaacagaagctattctccggtagtatcacaggatgtttcttatgataatgccactccgttatacgataaacccttgtttcctgatttgctcgatgcaacgattaacaatcatggattaagtcttgataagggcttattgattaaaattcgatatccacaatccaaagccggacagggggcagtcatcgaagccggggataccatctcagtgtatatgaaaaagggagatccggaaaatgatgccgaaaatccggatatccagcctgtaaaaattgccactcacaccgtaagtaaagcggagatctccggtacaaatattgagttcacagttgataaatcttattttattgataatatcaatgacacttttaatggtgtttacatatttatttactatactgttggcgattcaaatccattatattcttattcagcagagctatatgtagatacagaatctcctggtaattttattatcaggttaattgactga

SEQ ID NO: 378692 - DNA, 471 bp, Salmonella enterica
atggataaaaacagtgattatgtatgggaaagcagtcagtcatgggtgacagtgagaaatgatggttcatttgtcatgatatctgaacctgattcatcatcgacaaatgttgtcattaccgccacaccaaaagcaggaggtgagtcattaagttataaatttaatcttcgccagtggttttatctgtccggttctgctgaatatcagatggtcggacaatcctgtaccagagcagacagtgttcctgcccgttttgcacaggtaacaacggctttgccgggaagcggaggtgccaggtttgaaacgggcacgcttttcggggaatggcagggattcattggtccggcatgggcgtcagatgctccggatgaatacgggaatgtgtattatgttaaccagtcagatggctctgtccggattacacgtaatctgtatatgctgttgcctgcgttatgtttaactaatttttaa

SEQ ID NO: 378693 - DNA, 312 bp, Salmonella enterica
gtggtgccggcaaccgccttccattccggaccggacggcagcgccgtgaccggggtgccggtgagtgccggagccggtgctgacgcagataacgccaaagaagaagatgatgatgttaatgaaggggaggcggataccgccggagaggccggacgggatgatgatgacgccgggacggtcgcggtgtctttcccggtcaggtccctgccgctgaacgggttacgcccggacgtgacagccccgggggcagcagttacccctgacggggatgccgctgtcgggactgatactgtattttttgctttcacctga

SEQ ID NO: 378694 - DNA, 552 bp, Salmonella enterica
atgttttatctcagagaaggcgatattacccgattcagcggggatgtgatcgtgaatgctgccagtacccgtctgcatcatggcggtggcgtatgcggtgccatacacagtgccgccggtccggaacttctggttgcatgcagaaaccacatccgggcttatggtaaaccccgggtgggaactgtggttctcacctctccgggaaggctgctcagccgcggtgttattcatgctgtgggtccccgctggctgtttgggctgtgggccgggcgtcatgatgatttactcgcgcaggcgtatcttcgggcgctgagactcgcgcgggacaatggtttcagcagtattgcttttccctgcatcagtaccggtcattatttttatccgcatgacagggccgccagaatagcgttgagaaccatcatcacatttctgacgaacatcgcgccggacctggacgtgtattgcttctgctttgacagacgggactctcttatttaccggcgcattctggaagaacattaccctcactttttaacggatgacgcctggtaa

SEQ ID NO: 378695 - DNA, 936 bp, Salmonella enterica
atgaacagtaaacgtggacacgatccgctgttcaagctgtttctgcgggagccagagacggccaaagattttctggcggcgcatctgccgcaagacattcgcgcccgggttcgtctggagacactcaagcttgaacccggcagttttgtggaccagaagcttcgcgaactacactcggatgtgctgtactcggtggagaccacagacggtgacgccggatacatctattgcctggttgagcaccagagtaccgctgaccggatgatggcctggcggatgatgcgttactcgatggcagtgatggacgcccacctgaaaaagggtaacgggacactgccggtggtggtgccgttgctgttttatcagggaactgtgcggccttacccctacagtaccgactggctggactgttttgatacaccggcactggcgcgggaggtttattcccgaccgtggccactggtggatgtcagtgtgatggaagacagcgatctgcagtctcaccgtcgcatggcattactggagctggttcagcgagatatccggcatcgcgacgctgcatcgctgctgcgtgatgttgtacagctgattcgactagccggaaatacccgggagcaggtggaagccatcctgtgttatattatctacaatggcatgacaagcgagagtatcacgccgtttttatacgaactggccggtgagatcccggagtataaggagttgatcatgggcacaattgcacagcaactgaaagaagaaggtatccagcagggtatccagcagggtattcagcaggagcgtcaggccagccttgagcgtgagcagaagacgttactggaaactgcgtatgcgttgcttgacaatggcgtcagccttgacgtggttatcaaatccacgggcttaagtcgcgagacgctggaacaaccgcgtcattaa

SEQ ID NO: 378696 - DNA, 489 bp, Salmonella enterica
atggcttcaagaggacttaacaaggtaatgctcatcgggcatctggggcaggatccggacgttcgttatctgcccaatggcaatgcggtggcgatgttgtcactggccacatcagatacctggaaagataaacagaccggcgagcagaaagaacgcactgaatggcaccgtgtggtgatttacggcaaactggcagaaatcgccggagagtatctgcgtaaaggctcccaggtgtacattgagggcgaactgcgaacccggaaatggactgaccagagtggtcaggaacgttatactacagaggtggtggtgtccatgcagggtactatgcagatgctgggcagtcgtggaaacggtggtaatggtcagcaacagggaagccaggggcaaccccagcaaccggcaggccgtagctacagtggtacgccgccaaaacagcatccggcgaatgagccgccgatggattttgacgatgacatacccttttga

SEQ ID NO: 378697 - DNA, 219 bp, Salmonella enterica
atgttaagttcaaacactgtctccactggcatgctggcagcagaatttgccggtctgtctttacccttacaggtccttcgcagcggtgccggtttctatatcggtacggaaaacgaaatgggcccggtatcccgtgaatccgtggagtattttgccactgctgaactggctgaacgtgcgctcgagcagggtacatggtcacagcgtgaacagccttaa

SEQ ID NO: 378698 - DNA, 468 bp, Salmonella enterica
atgtccggaaatactgacaaaaaagaagtgaactacttcaaccttaacatcagcggcctgggctacatcagtaacgtacgccaggtggtcaacggtaacagtaagtttacctgctgtacgctgaacgccctgacggggccaacagataacgcagattacacccgctttgatgtcaccgttgcaggcaaggacgcaacgagtctgatcaaccgttgccagaaagcgtgcgatgaagacaaaaaagtgatggtcagttttgtgctcagcggaatcaaaccggacatcttcaccctgtcgaaaggtgagcatgccggcgaaaaccgcgtcagtctcaaaacgcgtcttatccggattgactggataaagattgacaaagagattgtctataaggcagaaaaaccgacctcgactcctccggttcaggaccagactccgcagcagaagcagtacgcggaaaactcattctga

SEQ ID NO: 378699 - DNA, 2031 bp, Salmonella enterica
atgcgtctttttctgtgtgagaagccttcccaggcacgggatattgcgaagtttatcggggccggtcagcgtggtgatggttttctttccggtccgggcgttacagtgacctgggcaaggggacatctgcttgaactggcggaaccagaagactacggtgagcagtacggtaacccctggcagctggaggtgcttccgctgataccgcagcagtggaaactggaagtgaaaaaggacgcccggctacagtttgcggtgattaaccgcctcctgaaacaggtggatgaggtggtaatagccaccgacgccgaccgggagggcgaggtgattgcacgtgaactgctggagtactgctgttttcaggggcgggtatatcggttatggctgtctgcgctggatgatgccagtatccggactgcgctggcagacatatggccatcggagaagactgaagcactttaccgcgccggagttggccgtgggcgggcggactgggttaccgggatgaacctgacccgtctttacaccctgaaggcccgggaagcgggtgtcagcggggtcatgtccgttggccgggtgcagacgccgacactggctattgttgtccggcgcgaccttgagattgagaattttatcccgaagccatactctgacgttattgccacgctggtatctgacaacattgcctttccggcaaaatgggtggcggcggcacagtactgtgatgaagaggggcgttgtgttcagccgggtattgccgcgcaggtggtgcagttatgccttcaggcagcatcagcgacggtgattgagtgtcagacgacacggcagaagaagtccgcacctcttgcgttcagtctgggttccctgcaacaggcctgcgcggaaaaatttggcatgccggcacagaaagtactggatatagcccagagtctgtatgaaacccacaagctcaccacctatccgagaacggactgcggctacctgccggtatcgatgcgggatgaagttcgcgcggtgctggccgcgctgatgcagacagacccgtcactgaaatcacaccctgcgatggcgcaactggacaccggtctggtctcccgtatctggaatgacaaaaaaattacagcgcatcacggcattatcccgacgaaacatgcgggggacttaagccggctgagtgccgatgaacgtaatgtgtatcagctgatacggcagcattatctggcccagtttctgccgcagatggaggtggacgcgacggaagcgacatttaacatcggcgggcagttgttccgcaccaccggcaatgtgaccgtggtggcaggatggaaagcgctgtttaccgacccgactgcgcagtcagcgcagacagcggcagagggtgatgtgagccgtgataaaacagatgctccgcggttaccgccccttcaggccgggcagacctgcccggttcagggggcggaggaaaagcgtcttcagacaaaaccgccggtaccgtacaacgacggtacgctgattgctgcgatgacgaacgcggcatcgttcgtcacggatgcggcgctgaagaaggtgctgaaagaaaacgcggggatagggactgaagcgacgcgggcagggataatcgatacgctggttaaacgcggatttatggtaagggagaaaaaggcgctgcattcaacaccgacagggcgtgacctggtgaatgccctgccggcggcgctgaccagtccggggctgacggcgttgtgggaacaactgctggatgaagtggccgcgggccgggtgagtcttgatgattttatggcgaaacaaaatgcctgggtgtcgcagctggtcagtcagggaaaatcacagccgctggcgatgcaggctcctcccggtccaccctgcccggaatgcggtggacgaacggcacaacggcagggaaagaatggtgttttttttggctgtgtgaactacccggcctgccggggtattgcgggaagcggagcgacgttgaaaatgccaaaaggcctgaaactgaacctgcgataa

SEQ ID NO: 378700 - DNA, 1047 bp, Salmonella enterica
atgaatgagaatgaaaacgccgggaaaaacgcatctcctgcatcccctgatacagagtcagctcgtgataatgaaaacaaccggttgcacagtggggcgttgcgctcatcactgaccatagagctccatacccgacacgccattcagttgtggcagggacgtgaaggtcatgaaaaacgcaaaggtgagaaggggggcaggagaaggggcaagtggcgcattatcggtatgccgttctttcttcatctcgtcactgtcatgagcgacgccacccgcagggacgatccttttgccgatgagcgaatgctgaagctggaaacgctgtttgccgaaggggatgcgctggtcggttccatgatcaaggaacttgacagtgtattgcacgatctgccccgacggatatccctgtcttcggtaggttctgtgtcgcccgtgaatatcggcgtgttcagcagtacgcctgtcggataccgctgtgtgtggttactggttggtttcgatcaactggccatgctggcaagccaggcgtggcactatggtctgatttcccatacacaaagagaaaaatatctgaacggtgccagtgctgcggtcagacgtgtgtttggcattgcgctgggatacagaagaacgggggctacccgtatggatgtgctgaaaaacacgccaatggcgcaggaggcagaacggataatggggcccgtcagtgaggatgttctgtggggccggaaacgttcttcctggtctccgccgcttgggcgtgcccgtatagaggcgatgagtaaaggggccggggatgaaagaacaacggaaaaacacattatcactgccgttgaaggtgattcccaggtacaaaataccactggacaggtaccggacagagatgattcctctgaattgcaggatgtacagacgcagacagaagaggcccctgtaccggatgacaggaggggcgagttgacggatgaggttgacattgatactgacattgatatcgatgatttatctgtgctgctgcccccgcctgttgataatgggccggagtaa

SEQ ID NO: 378701 - DNA, 1383 bp, Salmonella enterica
atgtacacgcaatatgcgcagacgccccccgcggggaccggtgccggtcaccgtctgcctgctgatgacattattgactacacgctgtcgaagatgcgggcacggattgacggtgcgtcgggcacatcgggtcaggagcgtaacgggctgctgttcacgggtaacctgcatgatgcctatccgcgggcgctggtactggatatgcggctttccccgctggacaagatgtgctggataatgatacgtcagtatgccctgcagaacgacggcgctgtctttccttcctatgacgaactccagaaactgctttcttccccgggttccgggcaggcctcgcgggatacggtgagccgggcgctgacgatgctgcgtcttaccgggtggctgagtctgtgtaagcgggtgcgggatgcaggcggcagggtgcgggggaatatctacgcccagcatgatgaaccgctgagtgcgaaagatgctgaaactttcgaccccggatggctggagatggtcgggaaagcctgcgggcataaatacagggaggtgagtgaaacggcatggcgggtactggaggggatactggatgaccagatgatgcggcaccggcattcgcggctgacggagattgctgaacgttttacacgcccctcaacagtacgcgatgttgcccgcattcagcagcagaaacagcagagtccggaaagcggactgagtgctgggagtacagaaaatgagcaggaatcactgagtccggacagcagactcagtacggtggacggggttaaaacaccgggtctggtaaacagactcagtctgaaatcagatacttatgacagagtccggaaaccggactgcaataacgtacgttcttttacacaggaacagattaaaaaaacgtacgtatgcggcggggatgaaaatgggtcccctgatggttctgtccccgttcctggcggaaatatcccgccaggatttgtgtggccggaagggctgcagcaactgttgccggcaggtgaacaggctatgctggcgacacaactgcagcatctgcgccagcgcagtcctgaactggcggatggcgtggttgcgacggtgataaccggcgtccgtgaagggagagtcaataacccggtgggctacctgctgatactgctgcgccaggcgcgggaagggaagttccgtctgccggaaggaacggtgaaatcaggggctgtaatgtcaccaccgccgtcatcgccagtggctcccccctgtccgggccataccgggggccagcatggtcgtgatgagcatgctgcggaagaagaatttgttcctgcaccgaaggagcttgttgccgcgaaactggcagaagcccgcgccatgttgcaggtgaatcgtcggtaa

SEQ ID NO: 378702 - DNA, 258 bp, Salmonella enterica
atgagtgtgaatacgtatgtggatgactcgtttcgttactggcgtactgacccgcggagagtgcatgcgagtgcgacccggaaggcccgtaaactgctgcggcagtaccgtcagggaaagcgggtgtacagcgaggtgggatgtacaggatatctcaaaatagatgtgggggtacgctggcgtctgctgagcaaaaaccagggagaggagtggctgtttatgtcccaccagacctatgaccgtgagcttaaacggtga

SEQ ID NO: 378703 - DNA, 570 bp, Salmonella enterica
gtgaattactcactttcacagtcatccaaccagttgttgttcaccctggttgccgagctgaaatccggaaatctgaagcgttgtgaggccctgggtctgacgcctgaagagatggggatgctgacggctctctcgactgatgacctgctgtatctggcggaaagccgggtcagtgtgctgaacctgcgggttcatcacgaaaatctgggactgatgctggctcaggcccggcgggaacagaagcggatggagcggatagaccgggcactggcgctgggtgcatccattgagatgatgcagaaattttttggtctggacacatcggaagtatccgggcgtcggcggttgggtggtattcgtacgcgcaagggacgcagcagcgcggcagacgcgacgctggagccggcgttgtgggcgcagtggcaggatgcgggtatggacaaccctgacagcgtggagtccctggatgtgatgatgctgatggcggaaacccatggagtgaaccttaccacggtgtggaccctggtgagggggtggtgtgcacaggataaacgggagtcgtcgtcatga

SEQ ID NO: 378704 - DNA, 723 bp, Salmonella enterica
atgagcgaaacagaggcagacctcacactgacattcacgccgcgacagataccggagtctgaacctgcagtggcgttgttttctcgtataaaaacgatggcaaagtcagcagacagcaaaggtagcctgcatgaggttacggtcgtgttgtgccgtgttcagcatctgattaaagaatccgggccgggtgacagtgactccgtcccggccagtgaccgggaattcacgtgtcaccactgtccctgtgatgcacgggtcattccggggtggctcagcgccctgacagccgtggcatgcctggtcaccggctgtcactggtattttggtcgccggcgcgataacagcgggaaaccgcggcgtaccgtgacgttctgtggcaggggagagcttgctgaggtgacggaatgtctgttcaccctgctgtgccggcagatgtggcgggacctggacatctggcggagggacagtgagtactttcacctgaaaaccgccgccacccgtaaccgtacggatgaatggcgcagaggctggaccgccggtatctggtctgcgcttctggaacacgataccccaccaggtgagcaaaacattcctggcccccggcaggattgccatcactgtagaagatggtatcagccactgaccggaaccgcagccgtcatcagggagacggggccgcattcctgtttattccccgccggcaaccggcatacccatatataa

SEQ ID NO: 378705 - DNA, 222 bp, Salmonella enterica
gtgagtgtggatactgatgatgaaatggcgcagcgggaggccatgttgcataccagcctgcagattatggtgattcgccatgcgctgaggaccggtgctgcggtatcccgtctgcactgtgcggaatgcggggatgaaattccggagaaacggcgggcatcactgcccggggtgaggctgcgtgcggactgccaggcgtggcatgaggagcgagggtcatga

SEQ ID NO: 378706 - DNA, 1827 bp, Salmonella enterica
gtggctaaaactaaccttcttgacctgggtactgccctgttgcagggggcccgcgagccgcagtcagccccgtcaccggccatcatgccgaccagtgagatgccgttgatactgacgctggatgaagttgcccctaatcccgacaacccccgaaccacgcgtaacccgaagtacgatgagataaaggattccatccgctcccgcgggctggacacggtgccaaaagtcacgagaaaccccgatattccgggttcgccgtatatcttcagtgacggcggtaacacccgttatgcggttctgcgggaactgtatgctgaaaccggtgatgagcgattttaccgtttccatgtgctgttcaaaccctggcccgggagactgaaatgtcttgtgggtcatctggccgaaaatgatgttcgcggcgacctgacgtttattgacaaggctctgggcatacgcaaggcccgcgccattcatgaggaaaccctgggacggtcagtgacgctgcgcgaactgtcggaactgctacgtctggaggggtatccgatacattattccctgattagccggatggagcatgcggtggagtatctgtccccgtatataccggagttactggcttccgggctgggaaaccaccagataacacagatactggcgttaagaaccggagtagagaaggtttggaagcaatacagccgggagacggtggataacctgtcgtcagtgttcggggaagtgtgccagcagtttgacgatccggaactgtactcgatcgagatgttccgtgatgagctgattggcagcctggttaaggctctgccccatccatcgctgaactatgaccgctggttaattgagctggatccaaaggggcagaaccagcgggcgttgtttggcgagccggatccggtggctgagcatctgattctggcagaccagaatgcctggcaggccagtgatgctcagaatcagacggctgtacaaccgcctgaaccggtagcagaaagtgatgcgctcccgacatctgcagggagccaggattatacgccagctgtgccgtccccggtggtgttaccccgtggagtggaaatccagcctgatattttgggtggtcaggatgtgctttcgggagaattcatgtcttctggcgtggaggacgacgatacggatgacgcagcattttcatctgtctgtgcgcaggtcggtgccggggcgtcggtgaccgccggtgccggtgttaccgcattctcacaggcggccggctctgctgttaccgtcgcatctgctgtcagtaccggcggtgatgttatttccggcagtaatatcttcccgttccggggtgacgataacaccgctggaatgcccgccggtcctctgctgtccgccattccgccatcctctgttgcgtttgcggataccgggcttgagccggtcagtgatatttgggcaataccgacgctgcaggatgataccgaacaccttcaggatatggcgtaccggctggtctttgagatagcggaagcgatggggtgtgcggacagtatccgggaagacaaccgcccgggttctgctgggttcgctgtgtctccccacgggaatgagtttgttcttttcctcgcgggactgtcaggtgaactgcccaataaagagttcaacatgttcctgttctgcctgaacttttttggttcacagtcaccgtccgatacccccgtttttgacgatattcacgtggtgaaaaccatgaggcttatccgggtgatacgccgtctgcgcgagctgcagcgtcttcagactgtcacctgtgacgaagggaggacgttacagtga

SEQ ID NO: 378707 - DNA, 594 bp, Salmonella enterica
atgacaacagacaaacaggcgctgcgtgaagtggcagagaaggccgggaaagacaagtggcaggccaggaaaataaatggtgacttcttcgtcatccgccacggtagttacgaaaagcaatctggcattacatcgtatcagcctgtagcggagattgacgataaggcggtcagggattttgttgcgatggcaaacccggctgctgtgctggcgctgctggacgagaatattcaactccggcgggaaaaagacgtaacagaggccgtattgtcagccatgcgtgatgatatgcggcaggcgcgcgaacaactgaaagctgcagaacacacggcggcagtagaccacgaagcggcgtgttctttggtcgaagaaaacgaagaactgaagcgtaaactcgaagccgaaaatcagcgcaataccgcactgacagcaaagatagagccaatggaccgccgcatagcagaactcgaacgcagcgagacgcagcttatcaatgagcgtgatagtgctgaatctgctttgaacgatgcctacaaagccgttaccgacgcaggtgaggggggaacagttgtcggggaggtgtcccgtggctaa

SEQ ID NO: 378708 - DNA, 189 bp, Salmonella enterica
atgagcagactgacaaaagcggcaatccatactgccatgttcagctcccttgagggatatgtgtctgctgtcgtggattctgtcgaattcgaatcagacataaaactgaatgatgaagaacatcagcaggtttaccggctggttgaaaaaataatcaccagagcgaccagcaaaggcggggcagcatga

SEQ ID NO: 378709 - DNA, 339 bp, Salmonella enterica
atgacgtttaacagaaaaggttacagccgggggcaactgtcgccggacattgaacgtaaatcacgtgaacttctggggtatgtcatttcacagcaggagctgcggctgatgccgtatgtccaccactgcgccatgaatgacggttacatcaaccagcagcgggtcagtgctccggagcgtgaaatccttcgtcagtgggagacccggggatttggcgggttcggaccacacctcagcatcgaaaaattcttctggagcgccataaatgaaattctgtggctggggtatgtgatgcccgtctgcggtgcgcttccttatacagaggagtcttcacaatga

SEQ ID NO: 378710 - DNA, 276 bp, Salmonella enterica
atgagtctgaaaaaacagagacataacgttgtaggcccggttcctgaggttcttcccgccggacatacctgcgggataagggagtacatcgtcagcatcggtactgccagatatcagactttccgtggtgagtgggaacgctggacagacacgccgggccggggatgccgccagggatacctgaggcgggtcaccggtcagcggcttctgcgtctgctgaatcaggccgtgcgggattaccgtgaaaaacaggagggtgaacaccatgacgtttaa

SEQ ID NO: 378711 - DNA, 1404 bp, Salmonella enterica
atggctgacgtcaaaagaacgaagccgcatcgtgatgcgccataccatcagggggctgagaccagcgtgctcggtgggctgatgctggacaatgaccgctgggatgaggtggcccctctcctgatatcgacagatttttatctttccgtcaaccagctgatttaccgtgagacagagcgtctggtcagcgaaggataccccattgacctgattacactctcggagtccctggagcggcggggactgctggaacggtgcgggggttttgcttatctggcggaactgtccaaaaacactcccagtgccgccaatatcgtggcctacgctgaaatcgtccgggagtgcagccgggcgcggcggctgatgaagctgggaagctctctttaccagcaggcagccctgctgcagccgtccgatggtaagggcatatccaccctgaagcaggtcacggactcactggttgagcagggcgagaaagaactgtttaacctggcgcagcagaatgtaccgcaggcctgtctgagtatcaccacgcaggcgtcagatgtgatgacctggctggagtcggtggcggacggggctggtgtgacgggcgttcccacgggatttgcggagctggatgcaaaaacctgcggctggcagaacggcgacctgatactgattggcgcccgcccgtccatgggtaaaacggccctggcggttgagcatgcactggcagcactgtacggatgccctgtggacagaacagtccagttctacagcattgaaatgcccgcgtcacagctgatgcttcgcctgatgtccattctggccagggttccgctgacccgtctgcgtagcggcaacctgaccagtcatgaccttgaactgttgtgtggtgcggtgggaacgctgtcgcagtgggaaaaccgcttccttatcgatgacaccagttatcagactccggccacgctgaggacttccgcccggcgtaatgcccgtaaatacggggagccggcactcattctggtggactacctgcaactgatggtctgcccggagaaaaaagagaaccgcacccaggaaattcaggaaatttcccgctccctcaaggcactggccaaggaaatgcggtgccctgtgattgcgctttcccagttaaaccgcgggcttgaacagcgggccgacaagcgacccaacaacggtgacctccgtgactccggctctcttgagcaggatgcggacgtcattatcttcctttatcgcgatgaggcctacaacgaaaacaccctggaacgtggtgtggctgagctcatcctgggcaagcagcgtcagggaccgctgggtacggtgaaagcccgttatgaaggagagtacacccgtttttctgaatatcacctcggatacggaggggcgactgtatga

SEQ ID NO: 378712 - DNA, 438 bp, Salmonella enterica
atgcgaattctttatcgtgcagtctgctcctgcgctgcctccctgcaccggggttttgatgaaaaacgggtgttttttgaagctgaccataacgacgatgccggcgcgtgcctggtcgcattgctggcggatatctggggtgtgcctgaatccacggtgatttaccacaacctgctgtcggagtacgaataccaccggaaacttgatgagcaggctggaaccccggtccgccacgctcctgaaacagggagtctgcgggatgacatgcggctctttgaggtcatgtggacgtatgaccatgacagtcgtgaaggcgtgtcatatctgccgttgtctgacatgccgctgtttctggtttctccgcgtatgtaccggcgtttgctggatgcattccttgcctgtccgcgtgaggtggctgcggaggtggtgaatggctga

SEQ ID NO: 378713 - DNA, 333 bp, Salmonella enterica
atgaaaaacttccctctgattcataccgtcagaaccgcatattcagtggacggagccgtactctgtacgatttacgcccacaacagccgctttgccggactcccgtggttgatgtttacgttcgcaggcatcccgccatttttcactggtgttcatgcactgatacctcagttaatgaatatggttttactgacggaacgttctgaccgggatgtctggcgacatcggtcagaaaatgttctgtcagtgaacgggatggtacgtactgcagtggtggggccggtacctttttcgccattttttgccgttttttacactgttcagaatgtgtga

SEQ ID NO: 378714 - DNA, 1203 bp, Salmonella enterica
atgcgtaatgatcaaatttcgaccttttccggtcaggctgaactggtagttgcagattccctgactcagacagctactttatcaggcagtttaccatttccgctgacaaaagtcgcgacacaaatcctttccatcatctccaccaagggcggcgagggaaaaagcacccagggtgcctatcttgccggtttcaccgccgatgctggcctgaaaaccctcctgattgacggcgattactcccagccgacgtcctgcagtatttaccatctggattatgaagcaccctgcggtctttatgaactgctgacgcagacggtcaacctgagcaatcctgaaaatattatttcccgcacctgtattccaaatctggatgtaattgtttccaatgaccctgatgaacgcctgccgggagagatactgcacatcgcggatggccgcatgcgtcttcgcaatgtgctacagcatccattattccgccagtatgacgtcatcatcatcgattcaaaaggggctgccggggtgatgaccgaaattgttgttctggctgccaacagcgtggtcggggtgataaaacccattctgcctgatgtccgtgaatttctccgcggaacggtcaggctggtgaaccgcctgctgcccctcagaatgtacggcatcaccatccctgatattcacatcctgattaaccatttcgaaaacaccgtgctggaccgccagaccctccgggaactgaccggtattgttgagcagaaaaagtataccggtgccgatgacattaacatatcgatgctgaataccaccattgaaaaactggaggtttacaagcgtggccatgccaccggccagcccgttcaccggcttgagtacaccactgaccgtaagtcgttaccggcggcggaaacaattcaccatctggcctgtgagctgttcccgcagtggaaggcgatgtttgatgatgtcctgtgccgaagacccggcgtgaatggtactgccggcgcagttgccggtactgatgccgtggcagatgagaccggcgctcaggaagccgtctgtgtcggatgtggctgtactgacaataacgcctgcgtgaacgaattccgtgagccctgccactggctgaaggtgaattataaaaccgggcggggcgtgtgttcatcatgtgaatctttcctgaatcatcctctgactgatgacgctgaatga

SEQ ID NO: 378715 - DNA, 396 bp, Salmonella enterica
atgccactcaccgataccgccatccgcaatgcaaagccgctcgataaaccttacaaactcagcgacgcgcagggtctttacctgctgattaagcccaacggctctaagctctggcagctcaagtaccgctttggcggcaaggagaagaagctggcgtttggcgcttacccgaccgtaacgctggctaatgcacgcaagctgcgcgaagaggctctcgccgtactcagcgcaggcgacgatccgggggtgaaaaagcagcaggagaagcaggcgaagaaaagcggtaatacctttgaagaaatcgcccgtaaatgggtggcagggaatatccgctggactgaggcacacgccgccaaagccctgcgctcgctggagctgcagttttcccactcatag

SEQ ID NO: 378716 - DNA, 4194 bp, Salmonella enterica
atgtcgataaaatgggaaagcataaggacgttcaataattctcaaaataatgcttttgaagaactgatttgccagttagcaagagaagagcctattacaaacaaagtggaatttcgtcgtgtggcagcacctgatggtggtgttgaagcttattgtgtgcttgatgatggcactgaatatggctggcaggcaaagtattttttttgtatgggggatgctcagtggaaacagttaaaagaatcattcgaaactaccttaaaaacacatccaaatcttactaagtattatatctgtattccattagatcgccaagatcctcgtagaaaggatcaagagtggtttatggataaatggaataaaaaagttattgaatggatacaatatgctaagggacggggaagggatgttagaattgagtattggggtagttcagagctaatccaccgtttatcgcaggaaaataatgctggcaggttgcatttttggttttcaacggaggagttaaccgatcgttggtttagcgaccaagtagaagagagtactaaaaatcttggtaagcgatatacacctgaattaaatgttgaactggatattgtcagaaattttgatgcaattagcaggaatagtaatttttataggctagtacataaacactttcatgattttcttgcaaaactcaataagtttacagaacggtctatgtattattctggtaataatagttctgaaaaatttgagtgcattatttctgatcttaaagactgttttgttcccgaagaccttggattggaacagtttgatataaatttattgttaagccacatagataatattagtaagtatttatctgattttgaacatgaatttattgataatagtgataagaagaatgatgatctgaggtatcaggttaatgaagtatggcaggcaatttctgacttctcagactttattaagggcccaatgctgaaattggcaaatagtcccataatgattctgtcaggggaggccgggattgggaaatctcatttattagcagatatagcaaatcaccgaataaaaagtaggattccttgcctattacttctggggcaaaactttacgtcagaagattcaccatgggcacaaatactaaggaatattctgcgcattgatggtaaagaaaatgttttattgggagcattgaatgcaagggcagaggcccagggagaacgtcttttatttattattgatgcaattaatgaaggcaaaggacgatatttttggcctgattatttagttggtatgattaatcagttttctaaatatccttggcttgggcttgtcttgagtattagaagttcatatgagaaattgattgttccaaaagactttttcaatgaaaataaaataacacggattacccattctgggtttggaagtgttgaatatcaggcatctaagttcttcttttctcaatatggtatagagcaaccaggggttccgatattgcaccctgagttcagtaatccgcttttcctcaagatcttttgtgagggtttatatcaatcgggattgaataaaataccaaaaggatattctggaataagtaatattatcgcattttttataaatagtattgaggcaaaattatcaaaaccctcctcgtttaattacccagaaaatactaaactaatagaaaaaactgtcaatgaattaattgaatataaactgagtaacgaattgagttttattccgtatgagatagcatttgatattgcagaaaaacacatcagtagatatagcaatcgacgtcgttttctcgatgagttaatttcagaaggaattttgtcaaaaaatatctattggaactcgaagggtaattatgaggagggtgtatacctggcttacgagcgatttgaagatcatctgacagcatcctttcttttagataaatatttaacaaataatagcaatgcactggatttcgcttttagaaaagagggcgaactgtataaatatatacaacctgattatttataccaagggattattgagtcattttccattcaattgcctgaaaatttcggtaaagaactttatgaattagttgataatgcccataaaaaacgggatagtatcatacgtgcatttgtatcaagccttatctggcgtaagtctgataatattgaagaaaagacacttggatatattaataaatatattatcccatttgataatggatttgatgcttttatgcaaatggtttatagcgtgtcctctgaacccggtcatatttataacgcagacagattacataagtttctttcaaaacattcaatggcagtcagagattcattctggacgaagtatctccataatttagattattatgagatttcttcgatgcagcgattaatcgattgggccggggcagaagaggataagctttatttgtcggatgactcaaggttactggccgctaaagcgctgtcttggctgtttacgagtacaaacatcaaattacgggatagtgcgacgaaatcgttagcaaatttattaaaaaataatattaaaacgataacagcactcattgagagctttaacgatgttaatgatccttacgtactggagcggatcctggcagcctcttacggcgcggttttaaattctgttattctggatgggttggatagactttctgaaaatattgtttccactattttcgaagctgaagaagtatatcctaatgttcttgtcagggattatgctagaaatataatcgagtatgccttatataaaaatgtatatcaaatggataacgttaatattattaggcctccatatcgaagtcattttccaacaactttcccgactaatgatgaaattgatgcttataaatatgactataattctgctgattttaaagattattattgggggcaaaatgcaatattaagctcaatggttactgagtatgggcgggggatctgtagctatggtgattttggacgttatacttttcagagtgcattatctggatggtgtgattttgatcctaatgatttaagtaactatgcctgtaaactgatttttgaggaatatggctatgatgttgagaagcatggaaaatttgatcgatatgccagtgagggcgatagaagcaggaacaaaaaagaaagaataggtaaaaaataccaatggattgcattgtatgaggttctggcgcgtattgcggataatcatcagctggctgaggggggaagtcgctggtcagagtcgaaaaattatgtttggtttcagggaccatgggagttgtttgtcagaaaaatagatccaaccacgccatcttatagtagagaaactataagacaaaaaagtttctggaataatgacaatccatatgatgactgggatgggactattaacgattggttaaaaagagagactaatctaccagatcctcttgagctgatatcagttctgtctgctgataataaaaaatatttattacttgatggtttttttacatggaatgaaccactccctcttggtgaagacgaatatggttacgcaaaaaaacacctttggtatcacattagaagttatttagtcaaagaagttgaagtgccaacgttaattcataatctgaataaagacttgtcgttgatccaatacttaccagagtcgcatgaacaataccgtgtctttagccgagaatattactggtcacctgcatatcaatattttgacgacccatactatggggataagggatggcaggatatttatatggattggcatagggaaggtaaatctattgcaactgtttgtctgacatctgaaagtcaccgttgggaatctgattcgtccggtgataatgagctatcatatttagcaccttgcgagtttatgtatcatggtttgaaattaaattattctgaaaatatcggagaatggttggatagtgatgggaatgttatatttctggatccatctgttcagtatagaaataaatcagcgctcatcgttgataaagataaattagaggaatttcttttaatcaataagttaaatatagtttggatcgttacaggtgagaagaatattcactcaatgcgtccaattgaaatagatggtgataaatggctggagatatatggggtttataccctaaagaacaacagtgtggacgggtggcggataattaaataa

SEQ ID NO: 378717 - DNA, 2073 bp, Salmonella enterica
atgcctttgcaaataaaagatattatagatctgcaaacccttgtcgagtcagaacaggtagagttcaagctggcaggggggaaagacggcaaaggcgagttaccgaaagacttctggcccacctattccgcaatggcgaatggccggggcggttgggtagttctcggtgtaaaagaacaagctggaaaatttacaccggttggtattgctgatcccgaaaagattaagaccgatctgtttaatcagttaaacgatcgcgatcgggtcagtgcgaatgtgctgagatcagaaaacgatgtgcaacaggtctctttacagggaacggacgttctggcgatccatattccacaggcgatgcgcaaacaaaagccggttcacctgaaaaagtccccatttggtaacacctatcaacgtctgcacgaaggcgatcgtgtttgtgatgatatgaccgtcaagcggatgcttgcagagcagatccacgacagccgcgataatgaagtgcttaccgaacactatacctttcaggacgatatcgatctggacagcctgaaagtctatcgcaatctgctatcggcaaataacccgcagcatccttatctggcctgtgagccgtttgaactatttaaaatggttggtggatggcgtaaagacagggaaaccggaaaagagggcataacgctggctggcgttctcatgtttggtaaatgggatgcgattattgccgcagcgcctaactacatggtggattaccaggaacgccccgaagctaaaacggagctgcgttgggtggatcgggtatgtccggacggtacatggtcagggaacttgtttgatttttatcgcaaggtataccaaaaactggtcgccgatctgaaagttccatttacgcttgaagagggtcagcgcagaacggatacgccagtacatatcgcactgcgtgaagcgctggtcaacacgctggtccatgctgatttttccgatcgggtttctattttgatcgtcaaacgtcccgacatgtttggctttcgcaaccccggcttgatgcgtctgccgctggaggatgttattgcgggtggcgtcagtgattgccgcaacaggctgctacaccagatgtttttgctgattggtctgggtgagaaagcaggttcagggatgccgaagattttcagcggctggaaatcggctaactggcgaactcccaaactttgggaaaaaacgtttcctgcacagacgcttttagagctttctacggctagcctgatcccgcagcatgttctggatgatttgcatcagcggtttggtgaaaccttcgagcagcttgatgattttgaacaggtgattgttgcaacggcggcgattgaaggctgggtcaaccatgaacgtgcttgccagttaacaacacggcactcccgcgaagtcacgctgacacttccccgactggaaagtaaaggttttttggtcgcagggggtgagcagaaaagcaaatattacaccttgcccggcgtatcggtcatgacgccggatgaagttttctcgttgggtgcggttgtgagttccacacataacgaggggaactccgcatataacgagcagaggtccacacataacgaggggagctccacatataacgagcagaggtccacacataacgaggggaactccacatataacgagaagaggtccacacataacgaggaaaactccacgtataacgccggggacgatcagcctgcgtcccgggatgagtatggacgtttgcttaaccgctttatcgacagaccctatattgatgatgttgataatctcaccgaagctttccgggattcgttgtttactttagcagcggttccgcgtgaaagactgcgtctgggggataaagagctgatgaagagtgtgatcctgaatgtgtgtcaggggcagtatatttccgttgctgcgctggggcagatccttagtcgtaaccctaacgcgctgcgtcagcagtacttaaaaccgttggtggagcaagggaaactaaaactggcgtttccgcagtataagaatgaccctaagcaaggatatagcgcagtttaa

SEQ ID NO: 378718 - DNA, 327 bp, Salmonella enterica
atgcagagcagaactgtctaccactggcagagtcagcgtgacgatcgggcgataacactgcgcatcagggaaattgcggaagcacgaatacgctacggctgcccgcgcattcacgtcctgctgcgacgagaaggctggctaattaactataagaaaacacaccggatttattatccggaaggcctgaatttgcgcagaaaacgtccccgcaggcatatcagtgtggcacaccgtcagcagcgtccgaccccgacgtacatcgatcagtgctggagtatggatttcgtgtcggatagtctgtttaagggatggctttccgggcactga

SEQ ID NO: 378719 - DNA, 129 bp, Salmonella enterica
atggacttctcccgccccggaaaaccgacagataacccgtttattgaatcgtttaagggaagcctgcgggatgaatgtctgaatattcactggttcctgtcgctggaagatgcgcaggataaactctag

SEQ ID NO: 378720 - DNA, 870 bp, Salmonella enterica
atgagttggcgattttgcaccatgggcctgaagcgtgttttttactataaatcggtgttactgacaacagctcttctgataatggctggagtagttatcttgtatttcccggagacgtattacctgaaagaaacgggatggaaccttacagcagaaaaagaaattccaggagtaaaagggggattatccggtctgacgtggaacccggatagtggtacattatttgctgtgacagatcatccgtcatcagtaatcgagttggatactgaagggaatgtactacgagtaatactatcggatcgagaccatgattttgaggccatcgaatatctcggtcagaatcgctatattctggccagggagagagagcggacactctccacccattgtattgaacggactactacagaattaccactggcggtatacaccatgactctggatataaacagggggcgtgataataccggttttgagggtcttgccagtagttcgggcagggatgaacttattattgcccaggaaaaaaagcctcttcggatttaccgtgccggacacagcaaaaacgggatgatgatcagcgacgccataacctgggagacgtcgttaccgtggtttataaaggatatatctggtctgcattatgaccataacaggcagtgtttgtatatcctttctcatgagtctgcactggttctggtgtcaaatctggcaggtaacaggaggttaatgccacttctcagaggccactatgggcttcaccgggatataccgcaggcggaaggcattgcctccgatgacagaggtactttgtggatagtcagtgagccaaatttattttatcggtttagcaggacaacgatgtcctga

SEQ ID NO: 378721 - DNA, 258 bp, Salmonella enterica
atgatttctgagctggttgatgaacagctccggcagaatgatatacgggagatgactgttcctgagaaaatcattgaatttatgaggaacagtattaatgaggatggccaggtatttttccgtagcagggaaatagcagacgcaattggactgacgatataccagatacgtgcgcatttaaccctgctgcaggacgcagggatagtggaaagggttaatatcgggagaggacgtccaggggtatggatactgaaataa

SEQ ID NO: 378722 - DNA, 3777 bp, Salmonella enterica
atgaataaaatatatgcgcttaaatacagtgcaattgccggtggggttattgcagtatctgaattttccacaaaatgtacccgcaggataattggaaaaaaacatctgaaagctttggtgttactatcgtcactgtttttctccggtctgtcaggtgcgtccattgtcagttcagaaattgattatcagatattccgtgattttgcgggaaacaaagggatatttaaacctggaactacaaacatctctatttacaataaaaaggatgagctggttggaatactgaataaggctcccatgccggattttagttctgttggtgtacgtgctcatccgggggtggcaacactaattaacccacaatatatagttagtgtgaaacataacagcggatatcagaatgtcagatttggcgatggtgaaaatgagtataatattgtagatcgaaatgatcatgcatctcaggattttcatgttccaagacttgataaactggtcaccgaggttgtgccagccgctgtcacggcggaaggccagaaaaaaaatgcttatgctaatactgagcgctacacctcgttttatcgtcttgggagtggcatgcaatatatcaaagataaaaacggcaatgtaacttggatatcagaggcttatagctatctgacaggtggaactgttggtgcaccatcgtcatccgattatattatttcgagctggcctgggaatgtgtttgatccgattaatggtcctctgtctagttatggggctcccggggatagtggctctcccttgtttgcatatgattcatggcaggaaaaatgggtaatagtgggggttctttcgacctggaccggtgaaaatgggacaaatagtaggtgggccgttatcccgctggattttattgaacgcactttaactgaggacaacgatgtttctgtcacgtttaactcttcactcagcgaaccgctgctctggtcgtttgaccagagcagcggtactggttctttggcgcaggccagtacctcgtataaaatgcatgggcagaagggggatgatcttaatgccggtaagaacgtggtcttttccgggaatggaggccagattgacattaggaatgatgtttctcagggtgctggctcactgaccttcaaggatgactatacagtcttttcctcaacggggaatatctggactggtgctggcattattgttgataagggggcatcggtcatctggcaggttaatggggtgaaagaagataaccttcacaaaattggtgaaggtaccttgcatgtgaacggtagcggagttaatgaaggtggtctgaaagttggggatggcactgtagttctgaatcagcaagcagacaaaagtggtcaggtacaggcctttaacagtgttaatattgccagtggacgacccacagtggtgctggctgatgaccgacaggtgaatccggataatgtctcttggggatatcgtggaggcacactggatgtgaatggtaacagtttgacctttcaccagctgaaagctgcggattatggtgccgtgctggcgaataatgccggcacacaagcaacgattacactggattacaccctgtctcgggagagcgtggttataaataactgggctgacactcgcacaggaactgccggagagctttatgaatacagcaatccttatacaaaaaccacagattattttatcctgaaaaaagaccgctatggttattttcctacaaatcagagtagtaatgatgtctgggaatatgtcggtaataaccgtactgaggcacaaaaactggttgcagacagagagaatgaaaaggggtatctgtatcatggtcagctgaaaggcaacctgaatgtgtcaaatgctgtaccgcagggaattaccggggctctggtcttggatggttctgcagatgtttccggtacctttactcaggagaatggtcgtctgactttgcaggggcatcctgtcgttcatgcatataatgattatgccttggcaaataaactgactgctattggcgatacgtctgtcctgacacaacctacttcatttggccaggacgactgggaatgcagggtcttcacttttgataagctggaactgaagaatacggattttgggcttagtcgcaatgccactctgaacaccattattgaggccgataactccgttgttacattgggtgacaatcgtgtgtttattgataaaaaagacggtgatggtactgcttttgttctggaggagggaaaatctgatgcggtatgggagggggacaggagtatctttaacggcagcgctacgttgaccgggaatactcagctgaatattattaactctgttgttaatggtgacatcactggttattcggggactcaggtacagttatcccgaagcggaaaatggaatatggacaaaagttcaacccttgatacttttcgcagccagggaggtaatctgtccctcgtcacgccggactggtcaccgaagaatttgactgtgaataccatggatgctaatagcctccatatcagtcttggtgtcagcatcgcggatagtacaggtgaccgggttgatattctgcagaaggcgacaggtgggcataacatattggatttgaccactctgtttgatcagtctgtactactaaagaatgatttgacactggcctcagcacctgcaggtacatcacatagttatttttcttttgccagtctgaacaggggttttacagtgtatacacctgatacacaggtgcaggaaaaggatggaaaggtgttatggcagttgaaaagcaatacgcctccgggtattggagaaaataacggtaataacggtaatgtgactgtgccggatactcctggtccaggagaacctgtctttaaaggagaggataacacctcactccttaaaaaagcccggtgtttatttactgcccgggaatatattatcagtagtaatgtggaccactggcagcaggttgcggataatgccaaaactgaaagcggcccactggttatggctggttacagccatggtggatatggggactttacagtgagccagagcggactggatatcggtttcataactgcggaagatatgaagttctgggggggggccagtatcgggttatataagggacacagtagcactgatggttatcgggatgactataacctgtggggtggtaatatattttttgggatatcatcagaggaaggtttgtttgctgacggtggtgtaggatataaacgtttgtctgaacagttttctattcagggggagctgactgacttatcaggcaaagcggatacgaatattttcacagcaggtgctcgggtgggctggcgcgggaatataaagagtctggatatgagcgtcacgccatctgcctcacttaacggtgtccaggtgggggctaatcgcctgaagggggaatatcggtcagcagagattcaatctgggcgtgctgtatggctgaagaccggcattcttgcggaaaaggattttgggggaatcatggtaacaaccggattgtaccgtaattttacgctggatgagatgccaggtatggtgttgagtgatgcctggaaagccaggcactattcggccgagagggcagatcgttatactgcaacgataggtattgatggaaagataacggagaaattacatgtgcaggtgaaactgaacagcagctttggtggatacttcagaactgactgtgaaggagggatgggagtgcggtatgatttctga

SEQ ID NO: 378723 - DNA, 504 bp, Salmonella enterica
atgtaccagggaataccgggcaacggacagtatgatcttgttgtgatcgctctgagtgctgagccgctggctggctggggaaaacatcttcagaatatcagagaactgtacgcaggtgtgcatgtgccaatgattgtgctggttcctccccaattgcaggcattgcgacttctgaagggagttgcccggatttacaacggacgagacagattatcccggttggaaaccgtacttcgtcagtccctcgacggtggtttatgtccggcagagatggaggtgctgacttgccgccgacagcgtacgctaatgtcactgcatatggcagtgagcagtaatacatcgttgaagccagcaaaccgaagagagtattaccaccgggcccgccttgttgaatatgtgggggtggacagtctgcacgtgttgtgtatgagtggcttggtatatgaggtatgcagagtgtcccgtcagcctgatatccccgggggaaagcgactggatttttaa

SEQ ID NO: 378724 - DNA, 651 bp, Salmonella enterica
atgggaacagcaaacctcagcgggactctgtatgttcgcggtgtgacctggcaatggcatccacaaatactgcagatgagtaacagtagctgtatccaggccggacttcgtctcggcaagcagggcatgatgagtgagagtagtcccgggcagctttactatattcttggtggccatacaacgacactgacaacggtccgtcccgggcttcagccatcggtgagtttgttgcaaactgatccggttgctccccgcctggaagccagaggtgagctggcgaaagggcaggttaggtatggtgaaattactttttccgtccggcatgtactggcctggcaggatagcactactgcagacagcggatggagtgtagtcagtggtgatgtcactcctgacatggagcaacaaataaaaaatcagttatggcaggtgaccggatatgactgggagccggtgtattcaggtcttacggcacgaccagatgcttttacggcgatgcctgacagtattcagccagaaaataagactaagcataatattgctggcgcttgggtcaccgcgctggaagatattcgggtgagattcccgggagctgaagagccggtcaaacgctggcagggtaaccttacgcctgtggtaatgtatttctga

SEQ ID NO: 378725 - DNA, 765 bp, Salmonella enterica
atgaagaaaataacatttctgttactggcagccagtttgttgccatcttgtgtgctggcctggaatacgccgggggaagattttagtggtgagttgatactggggggaccggttaccagtacgcgaaacccttgggtatggaaaattggtgaaggaaatgaaagcctggatgtgaggcaggtacaggggcattctggcaaagggcaggtgacaccggtatctctaccagagatggcggtgttattagggaaaaccacacaggccaccccgtcaggacgtgaaggcctctctccccgggtgaactacggaaaaacagcagacggtttcaaactggagtgggttttgccggggatggcggaagtaactcttccggtgacaggagaggataactcacgtattggcagtttcagcttcagaatgcaggctgtggcggtaatgcgacatacagtgaatggacgggcaatgtatgccggactctatgagaacctgaagggaaatggtctgcctgagcaggccgcagtgatgtcggctgaacaaactccagggaaactgcaggctatgtttggtagcgaagggccactttggttacaggatattggcatcaacgaaactatcggcttgagcagcttcagtgacgcagccttacatcagatagagggggtttatggtgcgcaggtggttcctggcagcggtgagctccgtttggctgacaaaacatcgtcacgttggcgggtatccttgccagtaagtattgagtaccagtaa

SEQ ID NO: 378726 - DNA, 798 bp, Salmonella enterica
atgaaaatcttccatcattataaaactattatttctactctgactatggtgaccctgttttattctgccatacccagggccgaaattcttgatggtggcgaaattcagttttacggctttgtcaccgacgagtctccaaaatggacctggcaggttagttcttatgaacaatcatggtcagtggatatcgctgatgcccgaacagagagcgggcaacttatctttgatttacgcaataaaggagccttgccctttcttgaaggacatctttatgaggtggccgaacgaggcggtcccgggttcactccttttattacattcagcagtgcaggccagcctttttccgtgaaagacggagagagcactgccgcacaacattttcgcgcctctgtcccagtacgtgatccggaaaacggtaatgtggccgggcgacttttcttcacgttcaaccaagggatggctgtcagtgttggtacgcaaatggaagggacatccttgccggcagggatgtccctggtcagtggacagagtgtaaccaaggtatattcagaaactctgccgcagggacttaagaaccgtctttcctcactgctgctgatgaataaaggctttggcgatgggatgagtgcaaatgataacaggcaggttatcagtcagggagttttggctgacggacgggttatgaacattgctgcggcttacgcttctgtagtatcagattttgaactgcaattgccgtctgaaggaacgccttcacggtggcaggcgggactgaatgtgacggtgaccgtccagtga

SEQ ID NO: 378727 - DNA, 792 bp, Salmonella enterica
atgaaaaaaacattgattgcactggcggtggccgcatccgcagtagtttccagctcagctatggcatggaatcctggtggtgctggtggttcttttgacattggcggaacgctaacaccagaagttaaaggaactccgtgggtagtgaaggttggaggaatgactggtttgaatgccagcattacaaaaggggcggagtctattgatgttcctgttacgaatgatatttctattttggggatacgtactcagactgctgaagcatttccgggccaagcaggtattagtcctcgtatagactatcatggaaacgttaatttagcttctggttcttgggggaaagtggaactttcattgcctgtgttaaattctgaaacggaagaaaaaataggtacactccgaactcttatgcaaactggtgggggggtttccgtagcaaattcatcttcatcagctaatgatggtatttattcagtacgcgcgaataatgatgcgtatgctttctatggcggcttacctcatcgtggtaataatgagtttggtggagcactgaatattgttaaattctttgatggtgaggttgatgataattttaacttccaaggttttgaggacagaactttttctcgattcaaagctgtgaaatttgatgaaaaaggtacttatagcgcattttatggttcaggtattgcgacaggcgaaacctttactatcactttagactcagctgcagcagctgatcaaccaattaactggaaatcatccatgccgattactgttacttatcagtaa

SEQ ID NO: 378728 - DNA, 492 bp, Salmonella enterica
atgaaaaaaacactgatggctgtggctctcgtcacatccctgccggtgctggcagcagattacaacgagaaaacccagtacctaggagtggtgaatggcagggtggtaggcaacagcgttgtgaaggtgactcgtacgccagcagagccagtactattccgggcagagaataacgactcgctaccggaagaactggttatccggcatgcggaaagccgcccggcatcaggaggcctgaccaacatcacggtgaagcagctcctggcggacgggcgggacgcgcgactcaccctgaaagccggtctgatggtggacgggaaaaaagtggttattactgccagtcagcggggggaggacgtggttatcagtgtaccggcagcgaccagactggtggaactgagaagtgatgcgccggtagagctggaagtaccggcaaactacaggggcaacttgcaggtgccggtggaagtggaagggattaaaaccagttaa

SEQ ID NO: 378729 - DNA, 2433 bp, Salmonella enterica
atgaatcggaagcaggcgtcatcacagtcccctctatattaccggacggtcctggcacttgcgatagcggttgcactgggcggtggtaccgcaagtgccggggaaaaactggacatgtcatttattcagggggggggcgatatgaaccctgaaatctgggctgtcctgaacggtagttatgcgccggggcgttatctggttgatctgatcctgaacggtaaggacacaggaaagcagatactggatgtgacaccacaggacagcgaggaattgtgtctgccggaagcatggctgacaaaagccggagtctatatcagcctggactactttcgggatggctatgacaccactcggcagtgttatgtgttgaccaaagcaccgtccgtaaacgtggactttgatgtttccactcagactttggcgctggctattccccagaaaggtctggtgaaaatacctgagaacgtggaatgggactacggcactagtgcatttcgtgtgaactataacgtgaacgccaataccggaaaaaataacacgtcagcctttggctcagcagacctgaaagccaatattggtcgctgggtggtgagttcgtcggccacagccagcaacagtgacaacggcgataacactgccacgataaatatgtttacggccactcgagccatcggggcaatgagcgcagacttggcggttgggaggacatcgacaggtgacagcctgcttggcagtaccgggacttacggggtgtccctgtcacgcaacaacagtatgaagccggggaacctgggatatacgcctgtgttcagcgggattgcaaacggaccgtcgagggtaaccctgacacagaatggacgactgctgtattcagagatggtgccggccgggccattctccatcacagatgtatcgttgtacaccagtggtgatgtgacgatgaaagttaccggagaggacggtcgggagtatgcgcagaacttcccgctgtcggttatagccgggcagctgagtccgggagagcatgagttcagtgtagcagcggggatgccggacgatgacagtaatattaaaggtggcgtgtttgctgcctcttatggctatggcctggacggactgtctctacgggggggcggagtgtttaacccggactggcaggggggcagtgttggcatagtagccgggttgggatatctgggggcagtgtcagttgatggtgcgtatgccacagcaaaatacagggacggcagccatagtggcagcaaggtaaagctggcctggagtaagcaactggatataacgaacacaggactgcgcgtgagctggtcacggcagaatgaggaatacgaaaacctgtcctcctttgacccgatggagttgtgggtgcagtcaaatcacggacgtcggataaaggatgagtggaatgctggtatcagccagccggtggggggattattcagcctgtcggtatcgggctggcaacggagctattatccggggaatgttatcgccagttattactaccgtgatgacaatgggaaagagaaagggcttactggcacgatgagtacacagataaagggcgtaagcctgaatctgggggtgtccggctcaagaaactcacagggggagaacaactggtcggcttctgcatcagtgtcggtacccttcaccctgtttgaccacaggtacagtaatagtacatccgtaacaaccagtaagggaggcggaaccggattcagtaccggggtatcaggctcactgaatgaccgtttcagttatggggttggtggtggtcgtgacagcagcggtggtgccagcagttatctgaacacgtcatacagcggtgatcgggcgtatctgagtggcactctgaaccattcatccggctcaggaaccagtggttctgtatctgccagtggttcagtactggcggtgccggcagtacgggatgtcatgttcagccggaccagcagtgacacagtggcggtggtgagcgtgaaggacacgccgggcgtacgggtgacatcaggaaacggagaaaccaaccatgatggcaatctggtagtacccctgagcagttacgactggaacacggtgaccattgatgcgggtaccctgccacttaacaccgagctgagtacgactagtcagaaggtggtgccgactgataaagcggttgtgtggatgccgtttgatgcgctgaatgtacgccgttacctgctacaggtgaagcagcgtaatggtgagtttgttccgggcggaacttgggctcgggacagtaaaaacaccccgctgggctttgtggctaacaatggcgtgctgatgattaacgcggtagatgtgccgggtgatatcaccctggggcagtgccggatacctgcgaaaaaactgcaggagactgagaaactacaggagattacgtgtgaataa

SEQ ID NO: 378730 - DNA, 540 bp, Salmonella enterica
atgaatagattttcagtattcattctcctgctattggtggggagcgaattctctcatgcctcggttcagaaaaccatattcagcgctgatgtagtggcctctgcctgtcatgtggtggtggatgctgaaggcaccagcagcagccggctcattttcggtacgtaccgcaagtcatctgctgtatctgtgccaccacgtgatttcaccgttcggctgtatgagtctggtgccacggttcagggttgctctgcttttctggcaggacagatcgccaccctagactttggtaaccctggacaacttgatgccgctggcgtggtaacccacggggccggagacgggatacgtattgatgttcgggcggtggatgcgcaggcagacacccatggacgtctgacacaggctactcatacggttaactatcctgtggatttcgcggccagggggcaattccgtttccgtgcacagccagtcatcccggcagacgtgaaggccggggaatatagcggggctctgactttcgtggtgacctatcagtaa

SEQ ID NO: 378731 - DNA, 306 bp, Salmonella enterica
atgcaaatggggaatattctttgtcatccggaggataaggtgcttttttccaaaaagagggaaggggtattgatgcctggggaggtacctgaagaacaattctggttgctgattgaaatatcttctatccatagtgaacgtaatatccatgcgctgaaagattatctggtttctggttattccaggaaggctgtctgtgagcgttatggtgttaataatggttatttcagtaccagtcttggtcgtctgcaccgcattaatcagatggcctggaaactggcgccttattacaggaatgctgtctga

SEQ ID NO: 378732 - DNA, 1296 bp, Salmonella enterica
atggtgcagaagaattcagatgctgtgacccttctgactgccggacgccggcagtgggctgccggtctgcgctgggaggaggagaccctgaaggatccacgataccgtcgcggtctccgggtggagaaaaacagtgccgtcagggcgcgcgtccggaatgagggcgtgtctcttaccttgacggtccgccagggacgccgcggcagaggggtgcgagcggcgggccgggcggttccccgcccgcgcaggacggtgtattcgctggcagcggtattcagccgacgcagtggagccggtgcatatggcgtgtattgcctggacgcggaggcgtcacgctacgtgtttctggccacggtggacggtctgccgtcggtaatgggggatgtggccggtaccgcggaggagaccgggcaggccctgcaacggttcctggcctttaacacggcacctgaagggggctggagcattacttctccggtggattcgccactgtcctgggagacgctggtcgtttccgcggaccgccggattctggcggcttcccggctgcggccggttcgtcagggtatacatccactgccggtggtggtggggctggtgttactgggcgctgccgcattctggctgtggccggaggacgtggaggaagctccccccattttatcagacgttatccccgccactcccgtgccggcaccggtttacttgcctcacccctggaaggatttgatgccggtaccggtgtttctggctcgctgccgggtgtggcgcagggccgtcccggtttatctggataactggaaactggcctgggggaagtgcactcctgaaggcctgcagctggtttacagccgtcagcccggcgggacggcggctggcttcacccgcagggcgatggacgtgtttcatcgccgaccggtcatcaatctggtgtccggcggcggagaaggcactctgcatttccactggactgcgctgacatcttcggatgagccggtcccgtcggtacccgtacaactgatgcgggtggtgtcctggtttcaggcgcatcaggctactctggcgctgacggcggtgaatgaggagccggggatgcccggggatgacggtacgccgccaccggttcaggactggcaggagtacaccttcacccttaaggacgaccggctgccagaaagtctggtggggcaggcggacgaacggggaatacggataagcaaagtggttttcacgctcagcggagacagccggatgacgtacgagacggaggggcatatttatgccggtaagaaataa

SEQ ID NO: 378733 - DNA, 630 bp, Salmonella enterica
atgccggtaagaaataaggcagtcatggcaacagccagcgccacagcggtattggtactgctggttccgttgctgacggggggcgtgcgggctcagacagcccctgcgacggtgcaggaaagcggaaacgtcgctctggtcgcagaagatacggtgcagtcggaaagttccgttccacagacatcagtgactgacgacatgccgccgcttgcgcccccgggcagtatcactctggggatgctggaggatgttcagcagaaaaatctgctgctggcggcaaaggttcagaccgcgcaactgcagcgccagctggaagaagctggcagcgacgcacaggctgtggttacaaccgcgccgtcagcagcggggctggcttcttccgctccgggaacgggacagccggacaacctggtagcgctgcgggtgaaagatgcgggagcagcccggccgcaggtgctggaaatcagtggtaaagacaacaagctgtacgccctgctgcagatgccggatggctcacggccggaggtgacccgcggcagcagggtcaccatcggaaaggccacgctgacggtcagccgagtctcactgaacggcatcacgctcagcgacggttctgagttgccgttctga

SEQ ID NO: 378734 - DNA, 1806 bp, Salmonella enterica
atgaccaggggaaatcagtatcaggacgaggacagcggggttctgctgtaccacaacccggaaacccgcgaaacggagatcctgattgatgagcaccgccgcaaccagagcgccgttcagacgtcggtgatgcgattgctgggcgagcatgtccgctcttccacccggtttgtgtcccgctcggtgctgcagaactgccggcaggcgcaggaccggcaggccgcgtcgggcgagccgggcctgtccctgaaagacctggcggacgtcagccagcgccaggctgaggtgctgggatattttcagactgcgcgccagatcggcagctccgatattcatgtgacaaccagccccgggctgacccggattgaaatgcgggttcacggtgacctggtgacggtggccgaactgggggagcaggacggggagtcgctggccgctaccatcgttctgtcgatgtgtgatgtcaccgaagtccagttcttcccgatgcgtaagcaggacgggcgggtggctgcgacattcctgaagaaggtcgggctgtttggcgcccgctacagtcacacgccgacggcagacggcctgcactttgtcatgcgtaccattaatgacgacggtgaccgggtgccgtcactggcacagctcggcttcctgtcggcgcaggtggttctggtacagcgcattcttcgcctgccggaggggatggtcattctgtccggcccaacgggatcaggaaaatccaccacgctgaggagcttcagccgtatctggctggaacgaaccgggttccttaaacgtctgctgacggtggaagacccgccggaagggcgtattgccggtgccattcagacgccgattatctgcgacaaggcggatgaggcggaggtcagacgtgcctgggagcgcgccatttccagcgcactgcgccttgacccggatgcgatcatgccgggtgagcttcgagatctgatatcgatactggcgggtatcttcgccgcgcaaacggggcacttggtgatgagcacgctgcacaccaacagcgcgctgtcgatcccggagcgcatgataaccatgggcgttgaagcagggctgattctggatgcgcagctgatggtggggcttatcagccagcgtttggtaaagacgctgtgcccgcactgtaagataccgtgggcatataagaaagcggaactgagcgaagagcagcgcacatatctggagaaatactgcagcgaacccggactgtgccgtccggaggatttgtacttccgtcatccggaaggctgtgaacactgccggaagacggtggtgctgaatggccgcacggtggcgacggtggggcacggcgtcaccggacgcagcgtggtggcggaggttatccgcccggatgcgcggctgttccatctgctgaaaaccgggggcaaggaagcggcccgacgttactggatggcgaacggcggtattacccgccgtacccatctgctgcacaaactcggtgccggtctggctgacccgttggaggcggatgagaccatcccgctggacgaggacaatgtgctgcaggtggaagacagtttttctgcacaggctgcgggtaccgcagccatttccggtagtgccgccctcagcgaagagctgaaatcgctggtcagccaggcggtctcatccgggattgaagaggggctggcccgggggctgcaggaagccctgaaggtggcgctgaccgccctgcgccagaacgcggcgacgcggacaaaccagaatggcggtcaaaccagcaacagcagcggaggcgggcatgacaaatga

SEQ ID NO: 378735 - DNA, 1119 bp, Salmonella enterica
atgacaaatgaaaataacacgcgtaccgggctactgcagcggatgcgttacgggattgtccgtcgcacgttcagcggagaataccgtatccggttctatgaggcgctgcgttttctcctggccaaccaggttccgctgaagctggctctggagcagatacgcgacgcgtacacgaatttcgggcagcgctggcacccattcgccgaactggcgcaggactgtatggacgcactcagtgacaacagcgaagtaaacagtctggaaaacacgctgacccgctgggttccggcggaggaggcggcgctgataagtgccggtatgaaaagcggctgcctgcctgacgcgctggcgcaggccgtgctgctgacaacctgccgtcgccggatactgggaacggtactcagaatgtcggtttacccggtgggcctggtggcgatgctggctgccactatcctggtatttgacctctcactgataccggagctggagaaaatgtcgtcgccggacacatgggaaggtgccctgggttttctctatgcgctgaccgtttttaccgacagccacggcctgattgccaccggtattctggtggtggcggttgtctggatgttctggtctctgccacgctggacacagcctgacggggtacgacggctggctgacggtgtggtgccgtggtcggtttacaaagatatccagggggcggtgttcctgctgaatatggcctcactgctggcggcccaggtgccgctgctgaatgccctgcaactgctgatgcgttttgcctctccgtggcttgctgtcaggctggacgccatcatcgcccgggtggaggagggggagcacttcgggctggcgctgaggaattcgggctgtgacttcccgtcacgggaagcggctaactttttatctctgctgacccggggggacggagccccggacgtgattgcccgttatggcgaacgctggctggaacagacgctggagcgggtgaacagccgggtcaaccggatacgtctgctgatgctggcggcactggtgggtgttctggtgttgctggtttcgacggtgatgaccatctctcagatgggcggcagtgatataagcggggcgggctga

SEQ ID NO: 378736 - DNA, 612 bp, Salmonella enterica
atgaatgagagcgtgatttccctgaactccggcaacggaggtaaccgccgggagcctgaccgcggctgggctctgatggagcagggcgtggtggggatagttattattgtggtgatagtgtcggtcctggcctatgccctgacgctgtggctgcgtaaggatgtggcctcggaggccacgaatatccagaccatcattaccagcacgcaggggctgctgaaggattctgacggatacaacttcacctcagcggcgaaaatgaccggggcgctgattcagcagggtggggtatccagaagtatgaccatccgcggtgacgtgcaggcgggtacggccacgctgtggaacacctgggggggcgcagtaacgctgaccccgctgaacacggcgggctttaacaacggcttcaccttgacctatgaaaaagtaccgcaggcagcctgtgttcagatagccacgcgcctgagcaagtccggtgtggtggacggtatcacgattaacgctacggctcatgctgacgggaaggtgacgacagagcaggcgggggcacagtgcacgaaggacagcggacgtaccggcaccaacaaactgatattcacggtgaataactga

SEQ ID NO: 378737 - DNA, 540 bp, Salmonella enterica
gtgcggatgttacagggaatacgaacagtgccggcggtggcagtgatactgatatcgctggcgtcattctccgcgcaggcgttctgctttgaggctgcgggggcgaagtacggcatttctccgcggcttcttaaggcgatagcctgtggggaaagccatcttgacccgcatgctatcaatttcaaccgggataaaaaaggtcgggtgaagagtacggattacgggctgatgcagattaattcagtccatatccctgaactgatggcgatgggggtgattcacagtacagatgacctttaccgtccctgtctgaatgttcagaccggtgcttggatactggcgaaacattttcaggtctgcggcataacctggaactgcctggggtcatataacgccggattccgggcagatcgcaacgaaccccgggaacattacgcgaaccggatctggcggatttacagccggatgcctgcagtcacgacacccactgctacagtgacaaaaactgccggaaaggcagtaggaaaaggagggaaatga

SEQ ID NO: 378738 - DNA, 150 bp, Salmonella enterica
atgaatgtgattctgtggatgtggatttttgtaccatggttttttgcttttatctgcatgggaatttcctgcggactggcgaagctggtgcggatatatcaggcgacggatcagacgatggcaataccccgccagagtaactcccggtga

SEQ ID NO: 378739 - DNA, 675 bp, Salmonella enterica
gtgagaaccctcatagcaacggcatttccggtggagtatgcgctgccggtgatggtgagtgcggccctgatgtctcgcctgattttaataccggtacgtcgttttctgaccgggcagagctgtggcgttaacgcccggatgcgcacagcggaagccacggggatatgggcgatggcggttgccgcgatgctgttctgcctggcgccggcaccgttcactgaacggcttcatgccctgctgatgttgggatttctgttgcaactgggtgtttgtgacgcggcgagtggctggctgccccgacagatgacggtggcgtttctggtggcgggtgttctggcctcagcgataacggaacttcctgtcgtcatactggtacatggcgctgagacagtgctgatattcgtgatattgctgcgcctgctgatgcgcaacaaacaccagggtacgtgccggcgtctgggaacgggagacctgtggatgatgaccggaatagtggcctggctgggcctgcctgatgcggtgactgcgatgatggtcgccctggctacatttgtggcctggcacctgacggtgggaacgaggatgcgcagcggcggtccgctgggtccctggctgagtacaggatgtgtgctgatattaattcatcggctgtaccagccgctgtgggtaatgtaa

SEQ ID NO: 378740 - DNA, 1326 bp, Salmonella enterica
atgaaaagagaacgacgtattacgggaccggacagcggttttgccatgatgagcgtggcggtcgcgctgttgatagtgatgattatggccacgatggcgtccgggtatatgtcggactacctgaagtcccggcagtggcagttgatggcggcacagacgaaccggttcacccaggcggtggaatcctatgccgggcattattataccagtgccttggcgtcagccactaccacccgtcccgtgacaataacggcgcagatgctgaaaaacaccggatttttaccggcgggattccgggagaccaacagcaacgggcagcaacttaaagcgctgctgatacgtaacgcccggcatgaggaggtgctgcaggggctggttattacctcgggtggtcagccactgccttataaggcgctgcgccagatatcgctggatatcagttcgggactcgggggatatatccgtgacggtcggacggcgacaggcgccatgaacagctggacggtgccactggcgggttttggaaccagcggcggtaacggacatatcgctgttctgctgagcccggaaacgctgacgggagcgcgtgaagacagcgacaggctgtaccgctttcaggttaatggtcgtccggagctgaataaaatgcacacctcgatagatatgggaggcaacaaccttaacagtgcaggtgtggtaaacgggagatacggtaactttgacgtcagcgtggtgagtaatggcccggtgacggctggaggcgatattcgtagtacaggtgggtggataatctcgcgtcatggccgtggctggatggatgagtcacacggcggcggattttacatgacggataatgaatggatccgcagcctgaataacaagagtatttacaccggtggacagttaaaaggtggttctgtccggtctgaaagtgacctctctgcgggtggggttttaaaactcgatcagacgagttatgcaggcacctggtgttcgcaaaccggggcaataagccatgatgcttccggagggatacttttatgtcagtccggtgtgtgggtatcgagcggtaagttatcttcgtttgaagtggtcagtggtaacaatgcatgtggtcgtttcgtcaactcggttgcatactgtccggcaggaaaacagttgatttccgggggatatgttctctcaaaatggtccggtggtaatggctggaacagccctgacctgtcgatgccttcgccatctgaaaatgcctggaaaatatataccggagggggtgtttctggcggaacttgtatgcaggcaatctcatggtgtgccagaaattag

SEQ ID NO: 378741 - DNA, 288 bp, Salmonella enterica
atggctggacagcgcttttcatgtggttcgtacccccaactggcgcgtgcttatcctggctgcgttttacccgatctgagaggggtatttatccgtggactggataacgatcgcgggcaggatccggggcgcactattctcagtttccaggcagaccaaagcaatatgaccgccagttacggtggagcattacacggacatcatagaggcatgacctattactacccgggagggcaggaagtacggcctaaaaacgtggcattcaactacattgttaaagcaggttaa

SEQ ID NO: 378742 - DNA, 1572 bp, Salmonella enterica
atgttcagacagattaaaatttcttacggactcgtcgctgtccttatactgcttacgatcattcagattatctccggttcatggagtgttatgtcataccgggattacgacaggaacctgcaacagattgcctttcagcgggccagaatagccttgctggatgaggcttacgttattatttcggatacccggggggatgtatggaaaatagcctctctgatggcgcagggaaagcaaggggaggatgccgatcaaaaattggatgccatgcttaaacagtatgccgatgcagatcgggatattgacaaatactatacgctttcccggaatggcagcccggatgatatccgttacgctgatgaaatgaaggcgttttatacctcggccagggattcgcagataaacaatatccgtttgctggctgaaggggattttcagaagcttgacgagattgcccgtcagggaaatccgacggctgattttctggatgccgtaaatcgtactgaagatgatatcaacagagcggttattgaaccgtcaatagccatgtcttcaatgcttgtacgtcagggaatcattctggcggcagtgttttctgttgtctttgttctgctgacagcggcttcagctctgtggtgcagaaagtatgtcatcggcagtattcgcaggctggcaggataccagcagactattgctggtggggagttatcagtgaacattccacttgtgaagggtaatgagctggatgacctgacggctggtctttccttgatgcgtgattccctgagtgaaatggtgatgaccatcagggaaggtgcagagagtattcacgctggtattcaggatattgccgacggcaatactgacctgtcttcccggaccagtcagcaggccgctgctctggaggagacggcggccagtatggagcaactgacgaccacggtgcagaataatactgataacatccgtcaggttgcggagattgcggccggtaatgtcaccactgcgcagaacagtgcggccataacgcaaaggatggtggagacaatggtacagatcagtgaaagctcgcaaaaaatcaacgatatcatcggccttattgatggtattgctttccagacgaatatcctggcactgaatgctgctgttgaggcagccagggctggtgagcaggggcgtggatttgcggtagtagcggctgaggttcgtcatcttgcacaacgcagtgcggattcagcaaaagaagtccgagagttgattgatgaatctggggagcatgttcaggcgggtaatgaactggcagaaaaggtcagcaaaattatgaatgacattgccgacagtgcccaaaatgcaaaatcaacgatgaaggaaatgctcaattgtgctgaagagcagagttgcggcattgaacaggtacgtatagcagtgtcggagatggatcgggtcacccagcagaacgcggcactggttgaggagtctgccgcggccaccggggcaatgatgcagcagacaagcaggctgacgcaggtggtgtctctcttcaggactgaacggtcaacagccggcgcgtga

SEQ ID NO: 378743 - DNA, 1140 bp, Salmonella enterica
atgccgccatccgttcgtgtcaaaaaaatttcactattccgggcactggaccgttatctggacacggtttcggttcacaaacgggggtatcagcaggaattctggcgcgtcagcgtaattaagcgtcatccggtcgcacagaagatgatggatgaagtgacgtcggtggacatcgcatcctaccgggatgagcgcctgtctcaggtgaatactcgaacgggaaagccgatatcgggtaatactgtgcgtctggaacttgctttgatgtctgcgctctacaatctggctaaggttgaatgggggacttgccgcacaaaccctgtggaaatagtgcgcaagccaaagccgtcctctggacgtgacaggcgactcacttcatccgaagagcgacgactgtcgaagtattttcaggtgcgtaacgcagagctgtacaccatattccatctggctctggaaacaggaatgcgacagggagagatattatctctgcaatgggagcacatagatctgcaacacggtgtggctcatttacctgtgacgaaaaatggtagtgtccgggatgttccgctctcccgtcgggccaggaatctgcttcacgaattgccagtgcagctctcggggactgtttttcactataaatccaccgggttcaaatcagcctggcgggtcgcgctgcagaagcttaagattgaaaacctgcattttcacgacctgcgtcatgaagccatcagtcgcctgtttgaactgggcacgctgaatgtgatggaagttgccgcgatctcaggtcataagtccctgaacatgcttaagcgctacacacatttgcgggcgtatcaactggtcagtaaactggatacccgccgccggcagtcgcagaagattgcgacgtattttgtgccgtatccggcgatactggaagaggctggcgatggtttccgggtacatttgcacgattttgaagggatgagtgtcagcggtgatacgcgtgaatcggcgatggatacggcttcggtggtgttactgcgagctcttgcaacggcagcacagcggggtgagcgggttccccgcccgggagacctgccattaaatgccggggtgatgattaacccgctggcgggatctgtgccggtatgcgtttaa

SEQ ID NO: 378744 - DNA, 600 bp, Salmonella enterica
atgaaaaatttccccctgcagcctctgatattcctgtttaccctggtctcaggctgtacacctgctgtcctgattacctccgcatccattgctacccagactgcaacagacccacgttccaccgggagacaaattgatgacggcacgctgacactgcgcgtcagccacgccatcagcagcgccgggttaccgccgcaggcccgtgtgacatccacagtataccagggtgatgtccttctcaccggagaagcccctgatgatgccacacggcaggctgcttcagagactgtcaactccgtaagtggtgtcaggcatatctggaacgaaatccgtaccggatctcccgtcagcaccggacaaaaagtgaacgacgcctggctggcatcggatattcgtgcacggctactcctcaaccgggataccagactggctgatatcaaagtcgtcacagaaaacaacgaagtcttcctgatgggactggtcacgccggaggaaggactgcacgtgactgagctggtcagccgtataagcggcgtcactcacgtcaccacagcctgggtctttaaacgcataccggcacagatcccgccagcgggttaa

SEQ ID NO: 378745 - DNA, 468 bp, Salmonella enterica
gtgatttttgtgctttttttgttactggctttgttgttgtactgcccttgtttcacgttactgtccagtttcgggtgtgtgagcggattttcggtgttcacgctgcgacaccatgggcaatgctggcgggtgattcacctgtctgtgcgtgagcgggtgggcagaatgaatcgccgtcgtgtgaggttttatcaccaggcgtttgtgcgggcgttgaatgaggcactacagacgggggagccggtagtcttccgttcacacctgatgcgtccatcgcagatcaggctggcctgtcagatactggtgccaactcgcagacgttaccacattgtgacggtagtcattccttcttatgaacgccggctgatgatgttgctgatactccttcaggagtggcggcttatccgggtaccctcgcagggcgtgatggttgtggtcagttcagaaagaagaagagatatttcgtga

SEQ ID NO: 378746 - DNA, 192 bp, Salmonella enterica
atggcagttgctgaagatctgatgacagaagcggtattagtcgattttgaaccgaatatggtggagttcgggttaacggtaaaacaaagccgtcaggcagaaattgatgacctatatgcagagaaatggctggacgatttgctcgtcagtatgaaactcattcgttatgaactcgacgacggggtgcagtga

SEQ ID NO: 378747 - DNA, 249 bp, Salmonella enterica
atgttcagtcttattcagcgggggcaactgtatgcagatgaaaatggttggccggttactatttacgactgcaatgtcttccgggtggtgtgcagacgggaggatggcagattgcattcagtttccatccgtgagttcagccatcggtttgagcgtctggaacacaaggaataccggcaaataaaagccgaaatagagcaggaaaggcatcttaaaacattacgtgaactgcgtgtgaaatgtacatga

SEQ ID NO: 378748 - DNA, 897 bp, Salmonella enterica
atgaataatttgttaatggaaaatgttcccgcgcgccggcgaatgccgtcacagccgtttctaaaatgggcgggaggcaaacgtcgcagtctcgccacgctattgcagagactgccttccccggatgaggtggaatgtctggttgagccgtttgtgggtggcgccagtgtatttttggggacggattaccgccagtatcttctggcggatatcaatgctgacctgattgacgtgtacctgcacgtccgggatgaccctgctgggatggttaagcgcctggaaaagctgtttcttcatggtaacaatgaaacggcctaccaggaaaaccgtgacgaattcaatcgtattcagtcaacccctgagaaatcagcgctgtttatctatctgaaccagcactgtttcaatggtatctgcagatataacaaaaagggcatattcaatgtgccgtttggacggcgtaaatcggcctatataccggaaacggagatcattgcgtttgccaggaagacagagcggtgccatgtctcttttttccatgcgggatttgaagacactttgcagatgacgactgtgggtatgtttgagggaatgtcgtgcgcggtctactgcgatccgccttatctgccggttagtcagacatcggggttcacggcgtacagcggggaggtgttcaccgtggcagatcatgagaggcttgcggtacaactggcagagcttcatgccaggaagaagatgccggtagtgatatcggcgagtgacacgccattcagccacaagatttacgggcaggcggggtttcggctgtacgggcataaagtgtcaagaatggtatctgcgagcgccgcgtcgcggaagtctgcaggtgagctgacgggggtgctgaaacgcggtcagtga

SEQ ID NO: 378749 - DNA, 162 bp, Salmonella enterica
atgaatgatgtgatgagtgattttcaggcactactcattcgcgattttctggaggagaatctggagcagtttatggagtactgtaaccgtgacgggcgcgacggagagggtattgtggatgaaatccttctggttctgggggttctgggcggtgatgagtaa

SEQ ID NO: 378750 - DNA, 963 bp, Salmonella enterica
atgacaatacttacagccgtaccggcatttgttccgggtgatgaaggcgcttccctttcctccagtttgagcagtccggacctggaagacagtaatggctcaccagtgtatccaaatggcggcccctcccttgctgatgcaacaaccgcagaagcccccccggcacagcaggcttcacaccggcggggtggcgacggcaacaggcatgcagaaccggcttcccggaagaaatcgccgtcgctggtctggcagatatctacagtcgtgctgattctggggctggcgggggctgtggcatatctgtggcagacggtcagccggcaggcgatcctgttgacaagcctggacacggcgtttcgcagcgggcaactggactccctgccacagcgtattcaggcgctggaagagaaacagcagcaatatctgtcggcgacgcaggcacgaacctggtaccaggaagacagccaggcccggaaaacgctggaaacgcaggtcacacaactggtgaaagacagtgggtctctccgggcttatgtgacggcactggcgacacagcaggactcgctgaaacaactgactgacgcgctctcatcccggctggatgaggaggtttcccgaattgattcgctctcagtatggaaagcgcaacgggaaaaaaaagcagccggtactgcgataaaaccatcgccggtacgaacgcagggtgaacccgctgcgacatccctggcggtcagaaagcctgtggtttcccgcgcactccctcctccgtttgtcctgaccggcgtggagcgcaggggcggtcagtcgtatgcggtggtattgcccgccgggacaggcagcgactggtcacagctgaagatgttgtcccccggagagagttaccggggctggacgctggtcagtaccgatggtaaccgggcggcgtttcaggttcacgggcacatacaacagctgacgccatag

SEQ ID NO: 378751 - DNA, 783 bp, Salmonella enterica
atgaggatactgaaaaacagggtgatgaatattctgaatggcgtggcggtgaccggctttctgctggcggtatgcggtccggccatcgcgtcggtcagtaccggtcataacgtcattgccggcagtgacacccggatacaaccgtctgaggcggtcacgtcgcaggtacagcagacgcagaccgacaacagctcccgggaggccgaggtttggggactcagcgacacgcagtggcagcagtaccgtgatgtgatgaaaggaccccggggtgttcagtcgccggggattgacccggtgctggcgctgggtctggaagctgaatctgctgcagaacgccggcatatggcagagctgtgggtgaaacaggaatatcagcgggtggaaaaagaactggcatttcagcgggaggtcgacgcggcctggaaacgtctgtatccgggcgtactgccggtaaacatggggaggaatgcagcaggcgtggcgaacgacacacggggccgtctggcactgtttgtcaggcgggagaactgcccgcagtgcgacgcccatctggccgctattatcgccgataaccgcccggtggatatctacgtggtggacagcggcggtagtgacgaggtcatccggcagtgggcgctggcgcaccatgtcccggtggacagagtccgtagccaccggataaccctgaaccatgataacggcacctggttgaaattcggtcaggggcgtatgccggttgttttgcagcagggagagagcggatggcaaatcgccgcattctga

SEQ ID NO: 378752 - DNA, 681 bp, Salmonella enterica
atggcaaatcgccgcattctgacggtatcagcattgctgatggtgggagccacggtggtgttttccggacatgcaaccataaagcccccgtctgccgggtatccggttcctgaaggctatcggcgggtggcggaagaatacggcgtaccagctgaagcgctgtattcggtatcactcgctgagtcctcccggcgattaccccagggggagcgcccctggccctggacactgaacgtggcggggaagggttaccgctacgccacacgggaggaggcatatcaggcgctgctgggttttatgcaccaccacccgctgcggcgcattgatgtgggaattgcccaggtgaatctggggtggaacggggcatttttccacagctaccgtgaagcgctggaaccgtacaccaacctgcgggctgccgcgcaaatactgcgtcactgctatgagatgaaccccggcagttggctgcaggcggcggggtgttatcaccatcctgccggcggaaaacctgcacgtatctaccgggctattgtgcagcggaaactggcaacgctggacgcggccgcttctgattcacttacgtcatctcatttttcttatctggtcccgaccgtagcatctccgacaaccgaagaaacgacgctactgtgggctgagccgcagacaccgggaggacagtaa

SEQ ID NO: 378753 - DNA, 573 bp, Salmonella enterica
ttgcagtatatacatccacgcattctccgccatttccgggtacgttaccctgttatacgttacaccctggtgccggttgtgctgaccggactgctgaccacctctgcaatggcggccctgacggtggtggcagatctcgggggagagtccacggctccgctgtttgatgccgtgaacaatgagataaatgaattcacgcccccgcgcaccctgacgccgcagtcgtcttcagcatctcctgtgatggtggatgaaatgctgccagtgagcacaccggagatgacgcccgggcgtgtggaaaaccgcaggtctgaacttaccggtatggcaccggtgtttctggtcggagacgacgcgctttcacgcagatggctggaacaacgccggggagacctgcagcaactgcacgcgacggggcttgtggtgaacgtcactgacgttacagccctgcgggatcttcagacgctgtcccctggtctgacgctgctgccggcgtccgccagcgatattgcccggcggctggagctgacacattacccggtactgattaccgccgacggtctgtcgcagtga

SEQ ID NO: 378754 - DNA, 2205 bp, Salmonella enterica
atgagcgaccgatatgtgatggaagcgctgctgcgtcctgcggtggagctcaatacggccgtggcggcaggctgtgcggcatttgtctgcgtcagcgcgccatgggcagtggccctcgccccgtcggtcagctatgtgactgcaggagcatttgtggcactggccgcggtacgtacccgccaggggctcagaatactgcgctatcgccgcaatatgaagcgtcttccccgttatgtgatgaccagtcgtcaggtaccggtcagccgctatcgtctgttcctgggtaaagggttttcctgggagcagaagcatctccagcgtctgctggagacccggcggcctgaggtacaggcctttctgcagccgtccatggcgtaccgcctggccagaaaaacagagcgctggacagaataccggctaccctggctgagccgggtattgcgtacggatgtccagtttaatcccgtgcggcccctgccgccggcaggcggtaatcctgcgatacacggcgtggagcctgatgaaacggatgtcagcatgaacctgggggagcgggtgggtcatatgctggtactgggaaccacccgcgtgggcaaaacccggctcgcggaacttctgataatccaggatatccggcgtggaaataccgtggtggtgattgacccgaaaggtgacgccgacctgctcagaagagtgtgggcagaagcccacaggaccgggcggcaggatgaactgtacgtgtttcacctgggctggcctgaaatcagcgcccgttacaatggcatagggcgtttcggtcgtacgtcagaggtgccgggacgcctcgcaaaccagctcagcggggaaggaaacagtgccgcgtttcgtgaatttgcctggcgagtggtgaacattattgcccaggcactggttgctctgggagagcggccggactataacctggtccgacgttacgtcatgaatatcacgggactgcatgaacgctatgtggaatggtatctgagggagaaagccccgcacctgctggcagtgattgaacagcaggtggcgctgttaagccaggtgaaccagaacaggtcattacaggactatgtcctgcgtcgcgctgccattacacaggtgctcgaaagcccggaagggcaggccctggaagataccgtcctggagagcctgagcaacgcggtccgctacgaccagaagtacttcgataaaatagtggcttcccttttgccattactggaaaaactgaccagcggaaaaatggccaagttgctgtctcctgactatcgtgacatgaatgacagtcgtccgcttctcgactggcaacaggttattcgcaggaagggtattgtgtatatcggccttgatgcgatgtcagatgcggatgtggcgtctgccgtcggcaactctatgttcgctgacctggtgtcagtggccgggcatatctacaagtttggtcatgacggagaccagcctgagagcgtaataaaagagaaaaaaccgtccatcagcttgcactgtgatgagtttaacgaactgatgggaccggaatttattccgatggtaaacaaaggcggcggtgccgggattgaagtcacggcctacacccagacctggtctgacattgaagcccgtatcgggaacgcggcaaaggcggcccaggtgaccggtaacttcaacaccctcattatgctaagggtgagggagaaaatgacggcagaactgctgaccagccagttgccagaagtggatgtgtacaccaaaaccctggtttccggcttcactgatatctcgaatccggagcagggggcgcacttcacctcaaacacccaggaccgggtgagcagcgtcagaatgtcgctgatttcgacagcggagcttatcagtctgccgaagggacaggcattcgccctgctggagggggggcggctgtggaaaatcaggatgccgttgccgtctgatgccggtgatgttgtgatgccgccggatatgctggcgatggttacggatatgcagaagggttaccgtaccggtgacgcctggtggccgccgataacgacctttgcggacctggtcacaccggtcagcgaaaatacgcagccagacccgacaactgtgatcccgagagctgaagcggcagtacaaccgccggtgcctgacaaagccggggatatggagacagaacccgaaggagacgatgagtaa

SEQ ID NO: 378755 - DNA, 747 bp, Salmonella enterica
atggtgaaggaagagtcccgcccgaagcaaaacaccgctccgccgaaaaaaccgggcctgctctggctgctgctctggcgtctgccgtggcatattgccggtattctgctggcgtcgctgtttctgagcctgatggtggaatatgcggggctgatattctggtggcctgagcagggagcgcagcacgcccgggtaatgatggagacggagctgcgcttcctctcgtcggactttacccgaagcctggtgatgtcccagccgtcagtgacagtgatatcgtgggtacgcgagggataccggtggttcacggagaacgccggtctgtcagacaccatgagtgccggcaacggccacggtaatctgttcacgcggacggtggcgaccagtggggcgtggctggccgtgcagttcagggtgttcctggaggcaatgctgtatctcacagtggtgtttgtggtacgggtgagtattctgtttctgtcagtaccgctgtttgtgatggcggcggccgtggcgatggtggaagggctgagcctgcgtgacctcaggcggtacggggcagggtatgagtcgagctttctgtaccatcatgcacgggggctgataaagccgtcgctggtttgtccggttatggcgtatctatcgtggccggtggcagcgtacccgaatgcgttcctgctgccatcggcgctgttgtttggtatggtactgacggtacaggcgtccacgttcaaaaaatacctctag

SEQ ID NO: 378756 - DNA, 237 bp, Salmonella enterica
atgctggaaaaccaccccgcgctaaatgaccaccgtctggcaagttatgcagcgtggatatcgctgacccgcacccttcatgaacagaatattctggactcagaacgacttagccgccatttgctgtctcacttcaacgccctacgggcctgtcagcaggaaggcgcggccgaactggtaatgaagtatcgtcttgcctttgaagatatgctaaaggatagtaaagacgtttcctga

SEQ ID NO: 378757 - DNA, 906 bp, Salmonella enterica
atgaaaaaaacgaaattaatattgtttggtatcattctggtggcgtttacctccactgctacatatgcggcggagaagttcaaggttatcaccacctttactatcattgctgatatggcgaaaaatgtggcgggtgatgcggctgaggtcagttcgataaccaaacctgatgccgaaattcacgaatatcagccaacaccgggtgatatcaagcgtgcccagggcgcacagttgatactgtccaatggtatgcatctggaaacatggtttaagcgattttatgagaacatgaaaaatgtgccggaggtgacggtcacaacagggattgttcctatggggataaccgaaggaccgtataatggcaaacccaatcctcatgcctggatgtcaccggataacggacttatttatgttgataatatccgggatgcgctggtgaaatacgatccggcgaatgctgatacttacaggcacaatgctgaggtttataaacaacagataaccgccaccattgaaccgttgcgtgagcaggtggaaaaagtaccggaagaacaacgctggctggtcagcagtgaaggcgcattttcttatctcgcccgcgatctcgggcttaaagagctctacttgtggccgattaactcagaccaggaaggcacgccccagcaggtccgtaaagtggttgagcaggtgagaaaatatcatatcccggcggtcttcagtgaaagtactgtgtcagacaagcctgcccgacaggtggcccgggaaaccggttcgcactacggtggtgttttatacgttgattccctgagctcggagaacggaccggtaccgacgtacattgatttgctgaaggtgaccacaggtaccgtggtcaaagggctcctggacgggatgtcgaagaaatag

SEQ ID NO: 378758 - DNA, 723 bp, Salmonella enterica
gtgatttcaggagacaacagtgcgctttttgccatggtttacagaatgctgcagtcgaaacaggtgcatgtgctgtataccgcagaaaaagccgaaaagctgtataccagaatgtctgccgtcgcagatgaaaatgaggcggtgaccgatgggatcaccgggctggtcaaccggatgtattccctgcgtggcaggctgaaaaataagctgggctcactgaccccccgagagaggcgatacgggaaccaggttatcgccctgctgagcgacctgattgaagaaaatgagaaaatacagggaaagatgactgtgtctgtaaatgcgatgcgttgtacggcgcacagcctgcaggtgacggtccttaaggccgttcattatcagtggcgggaaagagtttatatgtcagttctggaaggaaaagacacgtttccccctgaggatgagtatcactgcgttctggggcgctggtatcatggtgaaggccggactgcctttggctcgctgcctgcatttgtccgactgggggatgcgcacagcagacttcatctggcgctttcagaactggtgcatgaatcgcgccgggagaagcgcactccggagtcggtactgaaaaaactggatatgctggaaacggccagccaggcggttattgcagcgctggatgagctggatgacagtgtcgtccgacagagtactgtcggcgacgtttcgtctgagctctga

SEQ ID NO: 378759 - DNA, 315 bp, Salmonella enterica
atgtcccgtcgtttttacctcattccggtcattgtgttgtcgctggccgtgtcgtcagccttcgcatctgaaaaggatgagctggctctggtgatgcgccagcttgaccagttgcaggcctcccttgatcgcgcgcaggccctcagcgcacaggacgcaggggacggtcgtttttattttgattacacccgcgcgaccggagacctccgggcgatgcagcagggcatttcacagtaccttgaaccgtcacgcgctcagcccaggctgccacaaggttacacggtcggcggacattaccgacgggaacgcccgtga

SEQ ID NO: 378760 - DNA, 237 bp, Salmonella enterica
gtgaacggtgtgcagcgtgcggcttttattgttggctccggtgggctggagccggcgaatattaaacatctggtgactgcgcttttctttgcgttgctgttcctgctggccgcctggatgatacggaccgtatatgtaggctggtcgaaccaggacgtgaaggcgggggctgccgggatgtttgtcgtgcgtctgattattctgcttgagctggcgatgctcttttacagctattaa

SEQ ID NO: 378761 - DNA, 339 bp, Salmonella enterica
atgacactgattatccgtctgcgtggtgcggtcacgttctgttccggtcttttctggtctctggccgcccgtgcggatttgcccaaaatcgccggaggcgcaaactccgccgacgtgatggaggatgtcaaaattatgagccgcaacggggtttcctacggggcactggttatatgcgccctcgctttcatcgtggtggtcatctcctgtgttggtacctatcacaagattggggacggcaaggccagctggtttgactttggcgtccgcgtggtagtgggcgccattatgattgtgctggccatctacttcctcaacaaggccgtgacggtcatctga

SEQ ID NO: 378762 - DNA, 267 bp, Salmonella enterica
gtgacggcggtgtttgtggccccgattgcgggctggattgcctttcccatgctggtcattctgatgcccctgccggtggcctggttcagcggtgaatggctgatacgttacaaacgcaacaagccggacaactacctctggcagcacgtcatcctcctgcttgcccgggtgaccggcagcacggaaggcagctgtcgttatggagggtaccgtttcttcacggactgtccctgcggggaaatccggcgtaccccgaggtgtcgctga

SEQ ID NO: 378763 - DNA, 657 bp, Salmonella enterica
atgagccgcttccgtcacgcgctgtctgagcgcgacaaccatattctgacgcttcgcatcacctgcggtgctctgggtgttctggcagcgttttcgatggccggctggatgctggccccccgggacctgacagtgcatgttcccccagacctgcgttccggcagcacgcagaggtggtgggaggtcccgtcttccaccgtgtacagcttcgggttctatatctttcagcagcttaacgcctggccgaagaatggcgacagcgactatccggccaaaattgcacagatgagtccttacctgacgccgggttgccagaatttcctgaataaggatgtgaagctgcgccgcactcatgatgagctgaaagacagggttcgcatggtgtatgaaattccgatgcagggctataaccgcaacagcgtgagggaaaacagccgcgacagctgggtggtgaacctggacctggtggcagatgaatactatcacgcagtgctggtcaagcgcgccctgacccgttatccgttgcgggtggtgaaatgggagggcgacccggaaagaaacccgttcgggctggcgctggactgttatgccagtactccgcagcggctgcaggtctccgggctcagtgacctggacaattcagggaggagtgaatga

SEQ ID NO: 378764 - DNA, 897 bp, Salmonella enterica
atgaggtactgtcgctgtccgtccgtactgttgtttttactgggggcgctgtgcagtccgttcagccatgcggtggagctgatgaagtgggagcgtattccgctgcaggttccgctgacggtgggtcaggaacggatagtgtttgtggataaaaacgtgaaagtgggctttccggcgtcgctggacggaaagctcagaatacagagcagcggcgggacggtgtatctcgatgccagagcggcttttcctgccacccgtctggtgctgaaggatgtggaaagcggagaaattgtgctgatagatgtcagcgctgccgaaggaaaaacggtgcgggagccggtacagattgtttatcgcggcacggtagagagcgccacccgccgcggacaggctgaaggggataacggttcttcaggtgtggaggccgggcacgcgggcaacagacataaggctgcaacgccggcctcccgacaggacgctaagctgaacggcccgctgccggtggtgctgacccgctacgcggcccagatgctgtacgccccgctgcgtacggtggaagtcctgccgggtatccatcccctgccgctccgcctgccggcacacatcaccacgctgtatccgtctgagctccttgatatccgaccgctggccgcctggggccggggagagtacagcgtggtggcgctgagggtgcgcaataccggtaaggggaaagtggtgacggacccgcgggtgctggtcggacggtttgtggcggcgaccttccagcaccgttggctgggacctgccgggcagcctgaagacaccacaaccctgtatctggtgatgcagggacgtccggaatcggcctttattgctgaaccaccgaccaccgtaaagaagggaggcaaacgctga

SEQ ID NO: 378765 - DNA, 1485 bp, Salmonella enterica
atggccaccctgaaatccaacgcactggtgaaagtgctagttccggcagttctgctgggcgcggtcggtgttggcatgcgcgcctgtacgtccggaacaccggagcagacggcgacacagcaggttcccctgccgcagctgacgccggaacaactgcgtgagctgggaatagaaggcgacacgccgcaggacaccctgaacaccctggtggggaagctcggggaggtccagcgccagcagggcgacatcatgaaagagaacctggctctgaaagaagagaaccggaagctgcaggccggcaacggtcaggtggatcagcgtattgcggacgccgtgtcggaggctgaagaccggacacagaaggcacttgcgcagcagaaaaccacgctgacggaccagtttaacgccatgctgtccggactggcgccgggcggtggtgcgtcatccgcacaggcaggaagcggtgctgatattcccgtggggctgggactggagccgggacatgataccgacatttccgccggcagtgacggcttccgctgggctgagccgcaggacgcggtaccggctgacccgcagcagggcgggcagggacagcccccgcattttgccacttcatttctggaagataatcctctcacccgggagaaaaatgcgcttgagcgtaatgcgaaccaccgtcaggggctggataacggtcaggacaaggggacggttgacccggtgtacaccctgccggagaacgcaaccctggtgggaagtcgggctgtgacggcgctgctgggacgggtgcctgtcaacaacaaagtgactgacccctatccatttaaggtgatgattggcagggacaacctgacggcaaacgggattgagctgccggaggtggagggagccatcgtgtcgggtacggcaagcggagactggacgctgtcctgcgttcgcggcagcgtcacgtccatcacgttcatcttttccgacggcacggtcagaaccctgccggcaccgtcggacaggaccgacaacagcggcagtgaaaacggcagcgggtcggggaacggcggcagtattggctggctttcagataacagcggcattccgtgtatcagcggagagcgtaaatccaacgcgtcctcgtacctgccgaccatcggtctgctggcgctgggtacatcggcgggcgatgcgctgacggccagccagtacaccagtaacaccaccgacagcaggggtatcacatcggcgctgaccggaaatgccgggcaggcggtgctgggccaggcgctgggaggcagctttaaggacgtggcgcagtgggtgaaggagcgctacgggcagacctttgatgcggtgtacgttcctccgggggcacaggtggcggtgcacattacgcgccagctgaatattgactatgccgaaaaagggcgccgggtgaaatatgacttcacgctgccgggcagcgatgaccataccggcggactggattag

SEQ ID NO: 378766 - DNA, 408 bp, Salmonella enterica
atggtgacactgattaaagtttgtatgcctgcgaccgcgctggtgatgttgctggcaggctgcagcagtaaggaggcgatactgccagccggggacagcacgatgatggatttatggcagcaccggtcgggcagcgtgccgcaggggatgcaagcccgggaagccctgcgccggccgctgacggggttggagcagcgcggagaacagagtcaggcagaaagctacagccgcacgcaggagagtgaaatcagccagcagttcccgcggctgccgaaccccgacatggtgatgtatgtgtacccgcatctggcagacggcagatcgccggtcccggggtacagcacggtcttttctttttacagcagcccgcagtatgccctgcctggcgaacggacggaggcgctgtag

SEQ ID NO: 378767 - DNA, 2805 bp, Salmonella enterica
atgttcagcctgttttccggtaaacgctcgaaatctgtaccccggatactgcacccgtcagggcgtgagccgctgaagcgtgagggaaaactgacccgtcgcgacgaggcaaaaatttatgcacacggtccgtcgtttattgatttcctgccgtgggtggaatatctgccggaggatgaatgtctgctgcttgatgacggggtgtcggtcggtgcggtgttcagcctgagcccggcgcagacggacggccgctcagcagaacgtctcgaagaaatccgtgacatcaccgaggccgcgctgcagaacgggccggaagagcgcagcagccaccagtgggtggtgcagttctactgccaggatgaagcggacctgacggctgagatggacctgttgcggggctatgtcagtcccgccgcgcagggcagcgcgttcacacaggcctggctttcggagacagagcgtcatctgcaggtcattaaccggccggagggactgtttaaggatgagatggtgaccggagtcagctggcgcgggcagatacgtcaggtgcgaatggtggtgtaccgctatgtgaactcacgacagcgggagtcttatcccccggtggttcagcttcgtcagacctgcgaccggctgtctgcggcgctgagccaggccggtgtggtgtgccgccggcagaacggggaacaaatccatgcctggctgctgcggctgtttaaccccgccccgtcgtggattgaccgccagacgctttacaggacggccgcctggcgtgacagccgccaggatacgctgccggtggacacggatttcagcgaatcgctgttcttcacccgcccgcgcagtgaagcgaaaaaaggagtgtggtggtttgataatgtggcacaccgagcagtatcggtggaaaacctgacgaaaccgccggagccgggcctgctgaccgcagagcgggagcgtggtgaacgtattaacgcgctgatggacatgatgccgccgggcacggtggcctgtctgaccctgctcgtacagccgcagaatgagctggaggaggaatttacccggctgggtaagcgggccctcggggataacgtggagtctgagcgtacccgcgaccaggtggaggaggcccgggcctggctgaaggaaaagcacaagctgtatcgtggtgccctgacctttctgctgaaggcaccggacatgaagacgctggaccaccatcatctgtcgctaagtaccgtcctggtgaacgccgggctgaaaccgctgaatcctgaatatgacctttcgccgctgaatacctacttgcgcgccctgccgatgtgttttaaccctgagctggacaggaaccggtggtatacgtggctgacttttgtgcagcatgttgccggtctggcgccggtatacgggcgctcaacggggatgggaaaccccggtatcagctttttcaaccgcggcggggagccgctgcactttgacccgctgaaggaccgtaaaaacagcgcgcacctgctgctgtttggtccgaccggcgccgggaaatcggcgacgctctgcgtggcgctgtgccagatgctggccatgtaccgttcccggctgtttctggtggaatcaggcaactcgttcgggctgctggctgactactgccggagcctggggctgacggtgaacaaagtcagcatcaaccccggacgtggcagctgtctgccggtattccctgattcgcatcttatcatgacgctttcgccggataagctggttgtggacgaaaaccagctgaaggacatcggtgatgttgatactgatgatgataataatgatgagcgtgatgtactgggcgagatggagattgcagccatactgatgattacgggcggggagaaggatgaaaagctgagccgtgctgaccggggactgctacgccgggcactggtcatgacggctgagcgtgtgtacggggaaaaacggcagatgctgccgtcggatctgaaggcgacgctggaaacgatagccacggacaggtcagagaagcccggcggcggtccccgctggcacatgaagatgcaggccagggcatcggagatggcgctggcgctggagctgatgaccgaagggtttgaaggtgagctgtttaaccgtgagggggaagcgtggccggaagctgacgtgaccatcgtggacctgggttacctgtccagggaagggtatgaatcgcagatggcgctggcggtgatatcgctggctaatacggtgaaccatatcgcagagcgcgaccagtttgagaagcggaatacgctctttgatattgatgaggcccatgttgtgacggccaaccctctgcttgcaccttactttgcgaagaagtcaaagatgtggcgaaaactggggacctggctgtggctggccacccagaacctgaaagacttcccggatgagtcagaaaagatgctgaatatggcggaatggtggatatgcctgacgatgccgccggatgagatagagcaggtggcgcgttttcgcagtctgacggaggagcagaagcagatgctggcgtcggcgaagaagggacagaaagtgaacggtattccctgctacacggaaggggtggtgatgggcagcaatctgaatgcgctgttccgttcggtgccaccaagtctgtatctggcgctggggatgaccgagaaagatgaaaaggcacagcggcgtgaactgatgaaggcgcacggctgtacggaactggaagcggcgttcatggtggcgcgggagctggacagaagacgcggaacgggagtggtgaatgagacttaa

SEQ ID NO: 378768 - DNA, 471 bp, Salmonella enterica
atgtcttataaacacattgctgtggcagtatcaaatacaccggaagattatactttggtcaacagggctctgttagtcgccggacagcggcaaacccgtttgacgctcattcatgttgatgatgaactggcggagctgtactccggtgtgtatggggcggatgcagcgcagataatcagcgaactggaaaacagtcagatggagcatctgcagcaacttgtaaaaaatacagaatggcctgggctgcagcttaaggtggttcggggagagttgcccggtacgctacttgaaatcattgatgaagaacactgtgatttgctcatttgtggacatcatcatactttcctgaacagaatgttgcctgtttacagagggctggtaaataaagtcagggcggatttattgatagtgcctgttgatgatactgccgtgccggtcgcaggtgatgacagtgatgatgtggttcaatga

SEQ ID NO: 378769 - DNA, 147 bp, Salmonella enterica
atggcggtggaggctcccaatgtagacggagagaataaagaggaaatgttgagtaacattcccggcaaagtggtgctggcaggagataccgacgaagacctgtatctggtagaccgggaaatcgccccgatggaaaacagcatctga

SEQ ID NO: 378770 - DNA, 753 bp, Salmonella enterica
atggtcagaacatatttgtcttgcctgattggggttatatcattaattgctggtatgtcagaagcagtagctcagcaagtgagtagtcagagatacggaattattctcggcgcaagtcgggtggtttatccgcctgatagcaggggggtgacgttgagtgtaactaatccggaagattatccaatactggtgcagtcacaggtcatgaatgaagataaaaaaacagaagcgcctttttatgtcactccaccacttttccgtctggaaggaaaacaacagaacactctgcgggttgtccgtaccggaggaatatatccaacagacagggaatctctggcctggctctgtgttcggggtatcccaccaaaagacggggatgtctgggctcaggataaaggcactgctttacagtcttcagctggtgttaccatgctgatgcagttatcaatcaacagctgtattaaattattgattcgtcctgaaaacctgtccggcaacccatcgggtatggcaaaaaagcttacctggaaagttaatggcaggcaactgattgctactaattcgacattattttatatgaatctgggttcattatcatttaacgataaaaagataagagaagattatattcccccgcttggagaacgagttttcgctctacccgaaggtaccggggagcatgggaaaataaaatggacagttattggtgattatggtgataaaagtcaggtccagtcagtggaaataaaataa

SEQ ID NO: 378771 - DNA, 2511 bp, Salmonella enterica
atgcgccattccattctggctttatttgtcagtgcggtattgtttccgccggcagtgtttgcccgcaattatatatttgatgcgtcaatgattggtgatggtaaaagcagtgtggatgtcgccctgtttaatgaagggcttcagcttccgggtaattatgatgttagtgtgttgatgaatggtgagccggtggacaataccaccgtaccttttcatctcgcagaagaaaaaggccaccggtacctgattccctgccttaccgctgagcagctttctcgttatggtgttgatacagataaatatacggtgtcctcctccagtgctggatgtgctgatctgagcgctattccgcaagcgtccacgtactttgattttaaccaacagcagttggccattgtggttcctcctcaggctatgctgccgaaagttacgggtattgctcctgaggttcagtgggatgatggcatttctgccctgatactgggctgggatgccagtacacagcataacgaataccgggggcagtggtcttcccggtctgactcacaatacgttcgtttgcagccgggagtgaatcttggtgcatggcggttacgtaatgcctccacctggcagaaaaacagcagtcggccagggacgtggcagagtgcttacacatatgcggagagggggatagacagccttaaaagtcgtctgactctgggagaaagctacacctccggtagcgtgtttgacagtgtaccctttcgcggtgtgatgctggcttctgatgaaaacatggtgccctatgaccagcgggcttttgcacctgtggtacggggcattgcccgtactcaggcaagggtggaggtcaggcagaacggttacctgatgaccacccggattgtacctgccggtccttttgaaatcagcgatctgccatcgaccggcagcagtggtgacctgctggtaagggtgctggaaagtgacggttcacagcaggagttctccgtaccttataactccccggcagttgcgctgcgtcagggatacatgaagtacagtgtgaccggcggagaataccgttcttcatcagataacgtgaaacacacgccggtgatgtctgctgagctgatgtatggactgccatggaatctgacggtgtatggaggggtacagacagcagaacattatcaggctggctcagccggactcggtgccatgctgggaaggtggggagctctgtcggtagacgccaccgcagcacgttcgcagtggaatggtggaacacagcagacaggccagcgctggcgcctgcgttacaacgaaactcttgataccggcacatccctgagtatggccagtgaggaatatgattccgggggttacagcagcctgacagacacactcaacacctggtgtgaaggtgaccattattgcggttattaccccggctatcatcctctgcagcagaaaacacggaccagtgtcactctgagccagtcgttgtatggcgctggaagcctcagcctgaatggttcccgccagacgtatcacaacgaccagagccacaggaacagttggggggctgcctggagcacgatgctgtggagccgactgtcagtcagtctgaactggtcacataaccagaatactgaccgtaacgggcgtgtttcggaagaaagcctgaccagcctgtatctgagcctgccactgagcggctggtcatcagaggctccggtatacgccacttatcagatgaacggccagacgcacggggacacaaatcatgagctgggtatgtatggcgacacgctgaaccgccgcctgcactgggatatccgtgagcgctaccgtgacggggcgggagatgacaagaccggcagcgccctgtatctggattaccgcggaacctatggtgaactgaccggcaactataactacagccgttaccagcgtctgtcaggtgctggtctgaaaggtaatctgctgttgaccggagacggactgacagtagggcagcctcagggggacacgctggctctggttgaagctccgggtgtatcaggcgcgccggtcggaagctggccgggagtaagaactgattttcggggatacaccatgctgggttatctgacgccttaccagataaacaatattgatattgacccggcggggctgccggatgatgcggcgctgccgcagaccacgatgaaagtggtgccaactaaaggggcggtggtccgggcgaaattccacccgtcggtcggtaaacgtgtgctgctgacgctgttgcgcccggcaggcagcccggtaccgttcggcgcggtggcttctgttgaaggaaatgacgccggaacggggatcgtgagtggtggcggaaaggtgtacctgacggggatgcctgatgaggggcgtatcaccgtccgctggggagcaggacaacagcaacagtgtacggcagaggtacatgtaccggcacaggcaggacctgccggtgtgtattctgcgaatgcggtatgccggggataa

SEQ ID NO: 378772 - DNA, 486 bp, Salmonella enterica
atgaaaaactttaagattctggcagtggccgctgccctgagcgcagtaatgaccggttctgcttttgctgaaggtcattatcagtctggacaggcattgtctattaccacgaccttcaactcagcggctgcaagctatgccgaagtagtgtctaagcacatagaagttattaatggtgatgtgccctctagtactattctggcacaggttactaacctgccggcaaattcaataatttttgacgcccaatctgaagatgaaggccaactgaagtttagcgatggaacccacagctttaatgcaattgcctataaaagcggggagaaatccaacgttgtctcagctggtaaaagcttaccccttgttaaaaacacttatgtgactcaaccaggtgatgtcatcgacatttctcctgtatccaatctcacttctgctgttgcgggtgtttatacatcaactccgacggtttacacctgggtggattaa

SEQ ID NO: 378773 - DNA, 939 bp, Salmonella enterica
atgagtacgttaatccgaattaatgttacaaataacagcccgtttttacatactttcttctttttccagcagccgtctgtctataccggtggttctgaggttttttctaacagcctgttgtccactgccattcttcctgcggctcagggcggcagtgtttatacatttttactcaatcttcagtattatgccggggtacagcaacgccatggacaacttaccattggccagccctccggctacgcttctgcaatacagtcgatagaactcacgccggccacaggagcggtgaataactgcaccacaatgattaataagcctgctctggggctgaagccgccggtacaggacagtggtgtgcagaaaggcgcattccgtattatatctccgacatacaaccccacgcttgagcagtataatggtggttcggctgtgcgcatgatagatggttctgtggtactgtcaaactttgtcactgttaacccgggcagtaacctggactgtcagcctgttctgaagttttatgttcaggtgggagaatatacagccgggaccgttatgaatttcaccagttcatcggttgatgcggcgctgtgtgatgcaacggaagggtataccacatttaatgttgtatacaatgctgacggtacctggacagtcactccgggtgtaagcaagatgtctgcaaaagctgatgctcacggtaatcttctttttgacgagcaggacctcaatacagatatttataatgaggcaggaacggatgtcatttgtcgtggatatacgacaaatacaacttcaccgtttaccgtgactcatttaacttacccggatcacattcattatttgggcgcatacatgttatccgtggatggcggaccccgtaccggcactaactgtacactaaagaataatgcgacagcgcagttcacacactga

SEQ ID NO: 378774 - DNA, 267 bp, Salmonella enterica
atgtggtcatcatttgctgccgggattaaggggccgatactgaataaagtgaaatcacgtccgcaatgcagtgatgaaggctcgatggtagtatgcgcctgtattgccagactgaataagaataatactgatatgaacgaatttgatggactattgtgggagaatagcttgtcacggaaattacgacattactcacggaccgtttctggtctcttagtttgctgtgctgagcttgttaccagccatgaacccaatcatatccattag

SEQ ID NO: 378775 - DNA, 369 bp, Salmonella enterica
atgaaaccatgtaacattgacagtgatttgacagtattttcccggctagaaaaagaagctgagaggctgggtttaaaccgctgtgaactggcacagttacttcagttgaacagttatgattatatgtgccatcgcaacggcatgatgtcacttgattgtacactgttttctgccagtatattttctggcttaaaagaggctggtatggatatgttttacattacgacaggtgttccgcacgaagcgaaccatacacaaaaagctttagctatggcatcacatataaacgactttccagttcctgagcgccgcttactaatggatatgattgggttcatggctggtaacaagctcagcacagcaaactaa

SEQ ID NO: 378776 - DNA, 345 bp, Salmonella enterica
atgaaagatgattatcacctgcccgtaataacccgccttgagcgcgaggcccgccgtctgggtatcaaaaaagcaaagctggcaatggcgctggggttaaatgagcgtgaatacaattatgtcagtgatggctgggaagatttgaatgtctcctgccttacgccatacgttcacagtatttttatctcaatgggcattgatttattctatgtgtttacaggtgtgtacagagatggattgtgccttcagtgccaggaaagatttattaaccgctgggtaaatgatattccaccattggagtattatctcgtcgatcaccttgtaatccgcattcgatacggctaa

SEQ ID NO: 378777 - DNA, 399 bp, Salmonella enterica
atgtcagcaaaaacactaaagaacgactgggatttaaccgcaacagatcgtctcctcaaagagaagaaacgtcttggtctcagtgatggtcaaatggctaagattctggggcttcatatatatttctactacatcatcgctgatgagaaacctgtttttaagctttacaaaatgtctggagagatacaggcggcactcgataacgcaggatttgatctcttctatgtgatgaccggagaatatcgcagtgacaactatgaactcatgctggaagcgtttgattatgctattcaggagttaccccccgatgagcagggtgatattcgtatactgattgaacctgtatatgaaacactggtgaaagccacaaatgctggaaagcgttcaactcatcactga

SEQ ID NO: 378778 - DNA, 222 bp, Salmonella enterica
atgagtatttacgagttttgcctcatagggttaaggcacgtaaacgataagcatttcagttcgatcacgtcaacaggactgtgcaaagacgtggtctttttatttctacatgaaggagtgaaactattcccggaagtaacgcaggccgtaataacagccattgcacaactgcgtctcctgcatgctgataactcaagtctggccttgccgtcaggtaattaa

SEQ ID NO: 378779 - DNA, 504 bp, Salmonella enterica
atgctgacagtacgttatttggcatattttccatctgccggcattaatgtccagaacaggcatagaataagtgatgaaaccagcaggaacgtctctcaaatcactttcgtcgtcgttaaggtaaaacgtgaacggttcgtgtacatgctacagatagtgatcgagcatatcgaaaatagcgagagttgtgaatctgctcatggttttttatctgctgcgtatgaaataaaaaggatgacttataagagtgttcgatttgactaccgtgttagagcctgtttatacaggctcatttttttaccagtgcataactcacggctttattcgggcgtatcgcatcatcgcagaagtaatcgtgcattatcacggttttggcttatttgctgtcagccagggaggatgcctcaaaacacgcgcggaacaacggtgacgtcggtaaaaaaatctgcgggcacttctgtcacatcgttggtttgccagagccacaccagaaggaatggctga

SEQ ID NO: 378780 - DNA, 198 bp, Salmonella enterica
atgttgaagaaagtactgttttttaagaagtcgatttactggtctgaaatactaccgttcatcattttcagatggttgatggttgtgatgcagattatctgcatcactgtgttactggtcggtacgtttgatgtcgctctcaataatatcggagaaccacgagaaggctctctcggcactatcattagagatgaataa

SEQ ID NO: 378781 - DNA, 669 bp, Salmonella enterica
atggactccagtatcattactgacctgttaatcagaattgctcttgccggacttcttgggggcctgattggtatcgaacgccagttacgcgcaaaagaagcagggctgagaacacatgttcttgtcggaataggcagcgcaatgttcatgatcgtatcgaaatacggttttgaagatatcatcagggaaaatcatgttgatcttgatcccagccgaattgctgcccaggtcgttagtggtatgggttttctgggggccggcactatcataattcaaaaacagatagtaaaaggactgacaacagctgccggcatgtgggttacggctgccattggtttggttattggtagtggtttgtatgaaattggaatttacggcgcttttctgacattaatcgtacttgaggtcttccgccagctcagtaaccggctactgaatcaccactgcatattacaaatgaaaatcagccccgattgcctgtccatggtttttagtgttcttcagaagagacgcatacgattttcgtttcgttctttaaaagaaagtgcttcagaggataaagcctgggagttgtttctgatactgacattacgtcccaaagagtcagtgaataaccttgctccagcgctgctgggtattgaaggtgtcaaatcagtaaacatccgatag

SEQ ID NO: 378782 - DNA, 228 bp, Salmonella enterica
atgtcatcaatttattctgttgaatatcaattggttataaatattttaaaaagtgaaaggcttaaggcggggttaacccaaaagcaatttgccgaaaaagtgggtaaaccgcagtcattcatttcgaaagtggaaagtggtgagagacgtctcgattttgttgagttcatacatcttgccagaatactttctctcgatccctgtgagattatgcttaaaatcccatag

SEQ ID NO: 378783 - DNA, 384 bp, Salmonella enterica
atggtcagactcagatattccactgcagtggttgtggagaagggggaaggagatttgttatttgacagtctgccgcaatcggcaccagttacgggacaggcacaggcgatgatgcttcagcaactgatcaatcatctgagaaccaggttacccggatcggtaaatattacctgccatcctcaccgtattggccatcgtggtagcgtggccatggcgtttgaaggtgaaaccgatcgggtggacgtactcattacggtgaacggcaggacactgttcccggaagagaaagaatatacgcgcgcaccgcgctggtatattgatgtggtggatgccgtggacgcggtatatctgatgttgacgctgaacgccggaatgatgaagtaa

SEQ ID NO: 378784 - DNA, 774 bp, Salmonella enterica
atggtctggctaactggattaattattggtgtgctgatggggctaaccggtgcaggaggtgggattctggccgtacctgcgcttatgtttattcttgatttacccatcacgaaagcttctcccctggccctgattgccgtaagtactgcggcggtaattggtgcgtgtataggcttaaagagaaaggaaacacgttatcgcgctgctctgttaatggcggtcagtggcatgccttttacatggcccggaatatgggcggccgcgcatgtatcccatacattcctggttttcatattctctttctgcatgctgctcgtcgcttaccgttttcttgtccccgggaaaaaaagtaacagacgggtgttatgcgaacaatcatcagaaacagggcggctggtatggcactggtattcagtactggcagttgcagcggttggtgctttatctggatttgccaccggattactgggtgtggggggaggttttattattgttccggctctgaagcgtttaacccgtttatctatggcatcggttactgccacttctttatgtgttatttcactgacaggagggactgctgttctggcggccaggcagaatggtatgctcgtgttcgatacaactgtcggggcattcctcgccgctgtatgtaccggtttactggcaggccggtggggggtgcaacgattaccaggcaacagcgtatcacatatattcggcggtcttctggtgattgttgcattgagtatgttgatatcaacaataaggtga

SEQ ID NO: 378785 - DNA, 135 bp, Salmonella enterica
atgattaaacatacattgcctgataattcagaacaaaattcagagcgtgtcgattttgaaaactatcatagtcagctatccgcaatcattaacatctgcaataaaatggataaggttgttacgttttgtctttga

SEQ ID NO: 378786 - DNA, 771 bp, Salmonella enterica
atgcatcagattgaacggcttttattgctggttctgggccttctgcccacactggcgctggcagaaacgccccctttgccggagccactggctgcccttgagaaacaagggcttgagtttaagggcgaattcactattaagcccgattttaaggggtatgtgatggagtacgatggccagggaaccaccgtttttctctcatcagataaaaaacacgcttttgttggaaacctcgtggacagtgacggaaataatctcagtacgccatggattgaaaaatacgtctatgcacccatggcccgggaaatgtggcagaaactggagaaaagccgctggattcaggatggtaaagacaacgcagcacaaaaagtttatgtattttttgatccgtattgtccttattgtaccgagttctggcagaaagcccgtccctgggttgatgctggtaaagttcagttaagacttatccctgtagctatcctgcggccagatagtaatttgaaagctgcggctatcatgatgtcaaaagatcccgttaaaacgcttcatgactatgagagttcacactggaaaacccggctggataagcctgaccctgttcccgcagatattacagcagccctgcaggataacctgttactgatggaaaaacttggcagtaatgccacacccgctatctattatctgtctcctgaaggccgtctgcagcagcaactgggactgccgccggatgatgacacgatgaacacgataatgggtggtaagccttaa

SEQ ID NO: 378787 - DNA, 342 bp, Salmonella enterica
atgagaattgtttttcatgtaccagagctttcgcgcagtattccctgcctgaataatgtgagaaattatttgaatcaggcaaccgaagcgcaggaagaatctgtacaggtaatttttaacgctgatgcagtcaaggggttggtccggggcgaggagagcgctgaacgctggcgtatattatgcgaacaacacgcctgtattcgattgtcagtctgtaataactctctaaaggggtattctctcacccctgaacaactgattgataccatgagagttatcccggctgcggttgtgactctggtggagcttcaacaccagggatggatatatattcgtccataa

SEQ ID NO: 378788 - DNA, 381 bp, Salmonella enterica
atgaaccggatattacagcatctgttatttcccgtaatgatgttcccgctatcagtaattgctgttgatactgaggtcaccctgcagtgtgatgggagggggacagtctcagtagtgtttgccgaatatggactggttaccgaatcatggtctccggctttttttgaaacaggaacccaaaaaaaggatgttcatctgtcttcaggcaaaccagtcgccgtgtggcaattcaataatggtgaccacctttttcaggttaaaggtacgacaggctggtttgccagatacaggggcgatctcccgggaactttacacaagtgtgagttcctggaacaaatagtgttgcaaccagaaaatttacccctgaatccttatcggtga

SEQ ID NO: 378789 - DNA, 1032 bp, Salmonella enterica
atggaaagctcgccgaagaaaactcctcgtaacaaagttcccgccctggttctggttctgctcgcgctggtcgtcatggtgtttgtcatctggcgggtagacagcgcgccctcgacgagcgatgcctatgcctccgccgataccattgatgtggttccggaggtgagcggtcgtattgtcgagctggcggtggtggataaccagcaggtgaaaaaaggcgatctcttgttccgtatcgacccccgtccctacgaagccagtctcgctaaggcggaagccgcgctcgccgcgctggataaacagattatgctgacccaacgtagcgttgacgcgcaaaaatatgccgccagctccgttgaagcgacggtcgccaaagcgcgtgcggcggcgaaacaggccaacgatacgctgcaccgtaccgagccgctactgtcggaagggtttgtttcggcggaagatgtcgatcgcgccagaaccgcgcagcgtgctgccgaagccgatctcaatgcggttttattacaggcgcaacaggccgccagcgccgtgagcggcgtcgatgcgctggtcgcgcagcgcgtcgcggtacaggcggatatcgctctgactaaactgcatctcgacatggcgacggtacgtgcgccctttgatggccgcgtggtgtccttaaaaacctcggtcggtcagtttgcttccgcgatgaaacccattttcacgcttattgatactgaccactggtacattatcgccaacttccgcgaaaccgagttgaaaaccattcatgccggaacgcccgccactatccgcctaatgagcgacagtggtaaaacgttccagggcaaagtagactccatcggctttggcgtactgccggacgatggcggtatggtaattagcggcctgccgcgcgtatcgcgctccatcaactgggtacgcgtagcccagcgctttccggtgaaaatcatggtcgaaaaacccgatgcggcgctatttcgcattggggcttcagcggtcgccacccttgagccgcaataa

SEQ ID NO: 378790 - DNA, 324 bp, Salmonella enterica
gtggctaagaattacgtggaagacggcaaaaccatcgacattgtggcgactgcgccactaaagagcggagatctggtacaggtcggcgatatgttcgctgtggctgtgaccgatattgccgccgggagcgccggaaccggtatcgcagaaggcgtgttcagcgtaccaaaactggtaacagaagacatcgcagccgggaaaaaggtgtatctgaaggacggagcagtacagacagacgcgaccggcggactgccgtacgtcggggtgacgtgggcaccggcagcaaacggcgacgggatcgttccggtaaaactcaatgggtga

SEQ ID NO: 378791 - DNA, 291 bp, Salmonella enterica
atgggtgacctttttgacacactgaatgagcgcatggatgcgcttactgctgatcggttcggtgtaacggtcggtatcaacggaacagattacatcgcggttgagtcggattttttcgcggaatttggtccggtggaggggaatggtaaaagcctggtagtattcagccgggactatgctccccgccgcggagacagtgttgtttaccgggatcgccggtataccgtcacaaaaataagacgatttaacgggaagccgcaactgacgctggaggaagacaatggaagttaa

SEQ ID NO: 378792 - DNA, 564 bp, Salmonella enterica
atggaagttaaaggcttgcaggaggcgatatctgcgttaaagaaaatcgaccgccagtatgttaaccgggcaaaggtcagagcgattaacagggtggcaaagcgggtggtcagcgtgtcagtgcgttctgctgccgcgcaggttgtggtcggggataaccagcgacaggggatacccgtcagaaccatcaggcatcgcgtaaaagtcaggctggcacgggcggacaaacccttcgccaacatttacgtcaactgcaatccgctgacagccatcaggcttctgagttcgccgccatcagctccggcaaggggaaaaaaaggtaagccgctacgtgtcggaaaataccgttttgaccgggggtttatcgcgcaggccccgaatggattctggcaggtatttgaacgcaggggcgaatcgagatatccactgtccgtggtgaaaatccctgtttcggatgcactccatcaggcattccggactcaggccgttttgcagatgaaaacggagatgccaaaagaactggcgcatgaaattaactatgaactgagcaggtttaagtcatga

SEQ ID NO: 378793 - DNA, 405 bp, Salmonella enterica
atgagcatacacagtgaaatccgcagggccattatcaccaccctgaaagccgctgatgataagggggataccaccttttttgacggccgcccggtggtgattgaagaaagcgatctgccggcggtggcggtatatctgagtgaagcacaatgtacgggcacggaagtggacggcgatatctggagcgcggtactgcatgttgaggtttttctgaaagccacgcagccggacagtgcgctggatgagcggatggaaaaccaggtatatcccgctctcggtaatgttcccgggctgggaaaccttatccggacaatggcggcacagggttacaactatcagcgcgatgatgaaatggcgatgtggggctcagccgatctgacttacgacatcacctattccatgtag

SEQ ID NO: 378794 - DNA, 762 bp, Salmonella enterica
atgacagaagcaacagtacctaatccacttgcgccggtaaaaggcgcaagtaccacattctggatgtataacagcgacggcgaccccttttccagtccgctcagtgataacaactggctgcgactggcgatggtaaaagacctgcagcccggggaactgaccgcagacgcggaagataacaacttcctcgatgatgaaaacgctgactggaaaagcaccactcagggccagaaatctgccggggatacgacggtgacactggcatggaaacccggagaagacgtacagaaaaaactgctggcgctgtttgagtccggtaaggttcagggctggcgcattaaataccccaacggggttgtggatgtgtttaagggctgggtcagttcgctgggtaaaacagttcagagcaaggaagagatcacccgttcagtcaaaattactggcgtaggccgcccgtacatggctgaagaaggtgcgccggaggtggtcagtgtgaccggactgacagtggcaccggcaaatgccacagtgaatgtcggcgccactacagccgtcacgtttacgataaaaccggataacgcgacagataaatccctgcgcattgccacctccgatccggcgattgccgcggtgactcaggctgataacgttgcgacagtgaaaggtgttaaagccggaacggcaaaaattattggcatgacgtcagacggtaactttactgccattgcggatatcaccgttcaggcagcggcgcaggcataa

SEQ ID NO: 378795 - DNA, 399 bp, Salmonella enterica
atgtttttaaaaaaagacacgctcaactatggcgctgactccgctgtattgtacgagctttccggtctgcaacgggtggaatacctggagtttctgcagaaacgtacagcgaaatatgacgcggacatggatggcgcgacggaaacggataaacgcgtggcgtatatgcagatggcgatggagatcaacgcctggctgatatcccgctctctctttaatggcgataccactcaggcggtggatgcgctttatcagtccatacagacaacgtggtcgtatgaggcgctggattcgggtgcggaaatggtgctggtactgagcggattgtctgcggatgcggaagataacgccagtgatcccggtgagaaaccggagaatatgacgccggaaaagtcctga

SEQ ID NO: 378796 - DNA, 306 bp, Salmonella enterica
atgcaactggccaaacattttcgtcgtcctgactggcggcggatgctctcggaaatgagcgcttcggagctgggagaatgggcggagcatttcagacaatacagtttcagtgacacattacttgatgcggagttttccacgctgaagtcactgatagtggcgctggtgtcaggggagaaagtcgcagcggaggatttcagcctgctgccgggggcagaaccggaacccggtaaagatgaaaacgaactgattgaagcggcgacgggtattttagggggaatgagatttgagccagaaagtcggtga

SEQ ID NO: 378797 - DNA, 1122 bp, Salmonella enterica
atgaaaaagttaacagtggcattatcagcagttgcagcggcgattcttatgtcgggaatggctaatgcggctgagatttataataaagatggtaataaactcgatctgtatgggaaggtcgatggattacactatttctctaaagacaagtctaatgatggtgatcaaacctatatgcgtttaggtttcaagggcgaaacccagattactgatcaactgacaggttttggtcagtgggaatatcagattcagggtaatcaaccggaatcaaccaacaagtctaaaactcgtctggcatttgctggtctgaaattcggtgattatggttcatttgattatggtcgtaactacggcgttctgtacgacgtggaaggctggaccgatatgctgccggagtttggtggagattcctatactaactctgataacttcatgacgcagcgtgctaacggtgtggcaacctaccgcaacaccaatttcttcgggttgattgatggactgaatttcgccctgcaatatcagggtaaaaatggtggaacaaacgaaactaacaatggcagagatgtgaagagccagaacggtgacggctttggtttatctgcggtatataacattgatggattcagtgcaggtacagcttacagcaattcagatcgtacaaatgcgcagcaatccgagacctataatgatggtaaacgagctgaagcgtggacagcgggtctgaaatatgatgccaacaatatttatctggccgctatgtatgcccgcacccgtaatatgacgtgggttgatattggtaagggcagtcggattggtaaagaccttggattagcaaaggattctggtgcatttacaaataaaacagacaactgggaggttgttgcacagtaccagttcgattttggtctgagaccttccattgcttatctccagtctaaagcccgtgatacaggatatggagatatcgaccttgtgaaatatacagatataggtgcaacatattatttcaataaaaatatgtcagcctatgttgactataaaattaatctgctgaaaaacgacaatccggctggtttggctactgacaatattgtcgctacaggtctggtatatcagttctga

SEQ ID NO: 378798 - DNA, 3351 bp, Salmonella enterica
atgagcaaaggtggagggaaggggcatacaccacgtgaggcgaaggacgatctgaagtccacacaacaactgagcgtgattgatgccctcagtgagggaccgatagtcggcccggtgaacgggctgcagagcgtgctgattaacaacacgccggtggtggacgcggacggtaacagtaatattcacggcgtgaccgtggtatatcaggtgggggagacaccacaggcaccgctggaaggttttgaggcttccggcgcggaaacggtgctgggtgtggaagtgaaacacgataatcccgttacccgtactgttgtctcagagaatgtcgatcggctacgcttcacctttggtgtacagatgctgcaggagaccacggacaagggggaccgtaacccgtcctccgtgaatctgctgatacagtttcagcgtagcgggatctggaacacagaatttgatatcactattaacggcaagatcacaacacagtatctggcatcggtagtggctgataatttaccgccccgcccgttcagtgtccgcatggtcagggtgacgccggacagcaccaccgacaggcttcagaacaaaacgctgtggtcgtcgtatacagaaatcatcgatatccgacagggttatcctggcacagcggttgccggtctgctggtggatgcggaacagtttggaagccagcaggtcacgcgtaactaccacctgcgcggacgtatttttcaggttccctcaaactatgacccggatacccgcacatacaccggcctgtgggacgggacgtttaaaccggcatacacgaataacccggcgtggtgcacgatggataaactgacccacccccgttacgggatgggcaggcgtatcggggtggcggatgtggataaatgggcgctgtacgccatcgcgcagtactgcgatcaacaggtgccggacggatttggcggcacggaaccccgcatgacgcttaatgcgtatattaccacccagcgtaaggcgtatgacgttctggcggatttctgctcggtgatgcgttgtatgccggtatggaatggccgcaggatgaccttcatccaggaccgcccctccgataaagcatggacctacaccaacggtaacgtggtgggcgggcgctttaaatacagcttcagtgccctgaaagaccgccataacgcgatagaagtgagatacaccgatccgctgaatggctggcaaacctccacggagctggtggaagaccatgcctcacagatacgttacgggcgcaatctgctgaaaatggacgcgttcggctgtacctcacgtggacaggcgcaccggacggggttgtgggtgatgatgacggagctgctggaaacgcagaccgtggatttttctgtcggtgcggaaggcctgcgccatacaccgggcgatattattgagatctgcgacaacgattacgccggggcttcggtcggtgggcgtatcactgacctggatatttccacccgcacgctgacgcttgaccgggaaataacactaccggaaagcggcaccgccacgctaaatattgtcgggcctgacggtacgccgttcagtacggagattcagtcgcagcccgcaccggatcgggtggtaatgaaagtcctgccggaagccgtgcagccatacagtatctgggggctgaaactgccctccctgaagcgccgccttttccgttgcgtgcgtattaaggagaatgacgacggcacatacgccatcactgccttgcagcacgttccggaaaaagagtccatcgtggacaacggggcgcactttgacccgttaccggggaccaccaacagcattattccgcccgctgtgcagcatctgacagtcagcacggataacgacagtaccctgtatcaggccaaagcgaagtgggacacgccgcgggtggtaaaaggtgtgcgttttgtggtgagactgaccacaggcagtgggaacgagggcgatccggttcgtctggtgacaacggcgacgaccagcgaaacggagtacgccttccacgaactgccactgggtgactacacgctgacagtcagggcaataaacggttactggcagcagggtgaaccggcgtccgtggcattcagtattcaggcaccggaagcgccatccacgattgagatgacgccgggttattttcagataacggtgacgccgcaccagactgtctacgatgccagtgtgcagtatgagttctggtactccgccacgcaactggcgactgccgccgatattcagtcaaaagcacagtatctgggcgtcgggtcattctggataaaggatggactgaaaccactgcatgatgcctggttttacgtgcgcagtgtaaatctggctggaaaatcagtatttgcggaagcatccggacgtccgggggatgacgcgaaagggtatctggatttttttaagggactgattacggagacgtatcttggtacggagttgctgaaaaaaattgacctgacggaggataacgccagcaaactgcagcagttttcgaaggagtggcaggacgctaacgataaatggaatgccatgtggggcgtcaaaatagagcagaccaaagacggcaaatattatgtggccggacttggactgagcatggaagacacgcctgacgggaagataagccagtttctggtggcggcggatcgcattgcttatattaacccggcaaacggaaaccagacgccaggattcgtcatgcagggcgaccagataatcatgaacgaggcgtttctgaaatacctgagtgcgccgaccatcaccagtggcggtaatcctccggcattttccctgacgccggacggaaagctgactgcgaaaaatgcggatatcagcggccatattaacgctgtgtctggctcgtttaccggagaaatcaatgccacctccggtaagttttctggcgtgatagaagcaaaagagtttgtcggtgatatctgcggctcaaaagtcatgcagggcgtgagcatcagggcgacgaatgacgaacgcagcacatcaacacggtataccgacagcgccacctatcagatagggaaaaccatcacggtgatggctaactgcgagcgtaacggtggctccggcgccatcaccgtcacgataaacattaacggccaggtgaaaacggcggaggttatgccgtataccgcagggattccggccatgtatcagaccgtcgtcttttcggtctacaccacttcacctgtggtggatatcagtgtctctctgagggttggcgggcagtacaccactgaagcttccgtctggccgctggtgatggtttcccggtcggggaacaacttcacaaactga

SEQ ID NO: 378799 - DNA, 2436 bp, Salmonella enterica
atgcccgtagttatctctggtgtactgaaagacgggaccggaaaaccagtgcagggatgtacagttacgttaacggccagaaaaaacacagcaacagtaatagtaaatacggtggcgtcagaaaatccggatgaggccgggcgctacagtatgaatgtggaaccggggcggtattctgtttctctttttaccgagggttatccaccatcccgtgttggcgatattacggtatatgaggactctctgccgggaaccctgaatgattttctgggtgccgtatcggaagatgatgttcgtccggatgcgttgaaacgctttgaagacatggtggcggaggttgcccgccagactgatgaggcttcccggaatgccaccgccgccggacaggcatccgggaaggcgcagacatcagcagatcaggcagcggaaagcgccacggcggcagcgaatgtagccggagcggcagcagcatcagccacacaggcggcctcatccgcagcgtctgcggagagcagcgcaggtacggcgaccacaaaagccggggaggcatcagccagcgcggcgtcggctgatacagccagaacggcggcagccgcatcggcagccgcagcgaaaacatctgaagcgaatgcagatgcctcccgtactgccgccggcgattcagcagttgccgcagccgccagcgcgacggcagcgcagacatcagcagcgcgcgccggagcatccgaaaccgccgcgaagacgtcagaaacgcaggcggcttccagtgccggtgatgcaggtgcgtcagccactgcggcggcagcgtcggaaaaggcggcagccacatcggcagccgaagcaaaaacatctgagacaaacgcagcaacgtcagcaagtacagcagcggccagcgcaacagccgcctcgtcatcagcatcggaggcatccacccacgccgccgcatctgataccagcgcatcactggcggcgcaaagcaatactgctgccggagcagcagccaccagagctgaagatgccgcaaaacgggctgaagatattgctgccgcagtacatctggaagatgccagcctgacgaaaaaaggcatcgttcagttgagcagcgccacggacagtgacagcgaagcgctggcggccacaccaaaggcggtcaaagatgtcatgagcgagacgcaaaccaaagccccgctggacagtccggcactgaccggtacgccaacggcaccaacaccggaaataacagcttcaggtcttgaaattgccacggcagcgtttgtggttgcgaaagtggcacagttggttggttctgcgccggaagcgctggacacgctgaaagaactggctgacgcgctgggcaatgatccgagttttgccaccactgtactgaataaactggcgggcaagcagccactggacgagacgctgacggcgctgtcaggaaaaggggctgatggccttatcgaatacattggtttaaggaacacaattgataaggctgccggtgctttgcctgctggtggtacagctgttgcggcaaacagactggtgtcacgcggcgcacttccggcattgacgggtacgacaagaggcagcgatagcggcctgataatgggtgaggtttacaacaatggttatccgacaccatacggaaatattttgcgtctgaccggaaccggagatggggagatattaatcggatggagtggggttaacggtgcgccagcgccagcctatattcgcagccatcgtgataccgccgacgctgagtggtctgaatgggcaatgctctacacctcgctcaatccgccgccggattcgcatccagtaggggcgccgatagcatggccgtcagatgttaccccggctggctatgccattatgcagggacaaacgtttgataagtccacgtacccgttactggcaatagtgtttccatccggagtcatcccggatatgcggggctggacgattaaaggaaagcctgaggggcgaacggtattgtctcaggagcaggacggcattaaatctcacgcccacactgccagtgcagccgcgacagatttaggaaccagaaccacgacgtcatttgattacggctcaaagcagacaaccgggtttgactacggaaataaaacaacaaacacgactggagggcacgcacatccgcttggtgttaacaatgccagtggacagaggaatccagacgcattgtcgggtaattccacgatggtgaatacgacattgtacaccggacaggctggtgatcatgctcatacagtttatatcggagcacatgatcactgggttggtattggtgcccatacacataatctggttattggcgctcacggacatgctgtgtcagtggatgcgacaggtaacgccgaaaataccgtcaggaatattgcatttaattatatagtgaggcttgcatga

SEQ ID NO: 378800 - DNA, 468 bp, Salmonella enterica
gtggatgccgccattacggcattttttggcactcagttacaaagacgcgttcagaaatatattattcaggaatatctgggagaacagccagtcggcaccgcctttgttattgacacgggtaacagtaagcatccgtggctggttcacgccccgacgatgcgcgttccgctgataatcgacggcaccgacgcggtttataacgcaacaagagccgcgttactggcaatttttcagcacaataaaagcgccggggaagacagggaaattaaatcagttgtattccctgcgatgggggccgggtgtggtaaggtatcctcggacagtgtcgcccggcaaatgaggctggcgtgggacagttttactaacccatccacagaaattaactggcaatacgccaatgcccgccagagtgcagtatcacgctgtttccctcgatactcaccctcacgactatttcctgaattttga

SEQ ID NO: 378801 - DNA, 729 bp, Salmonella enterica
atgacgtttaaaatgagtgataccccacagacaattaaagtgtataacctgcgttcagatacaaacgaatttatcggggcgggcgatgcatatattccacctcacaccggactaccggcaggctgtaccgatattgcgcctcctgatattccggccagccatacggctgtatttgataccgaaaaacaaacgtggagcctgttcgaggaccatcgcggaaaaacggtttacgatacaacaaccggtaatcaggtctacatttccgaacccggcccgttaccggaaaacaccactacacaagctcccgcatcaccgatagataaattcgaaaacggccaatgggtggctgacctgaataccgcgcttatccagaaacacgccgaaatcaacgcctggcgcaacggccaggaaaacgcaaattacgtatttcagtttaacaatcacaactgggactacggcaaagcgacgcaggagagattaagtctctccgtacaaatggctaaatcaaataaattacccgaaggctttatctggacggatgccgataacaatgacgtaccaatgtctgccggggaattattaaatctcagcgacgctatcgaccaggcgatgtttacaacgggactaaaaatccacctgcgccagcgggaaatgaaagaagaggtggataaactgaccgacgcacaggctgttctggactacgttgtcggctggccggaagggagttaa

SEQ ID NO: 378802 - DNA, 141 bp, Salmonella enterica
atgtcgcaaaaatcgctatccactatcgcaatttgcattgcggtagtgctcgtaatctggatgttacgcggttcgatgtgtgaactgcgattcagatttgcgggagcggagattgcggcgttcttacaatgtaaagagtaa

SEQ ID NO: 378803 - DNA, 507 bp, Salmonella enterica
atgaagataaaactcatagctacaggcagccagggtgatttttacgatatgtttctggatgatgatagcgggaagctttttgtattatgcacctgtcctgctgctcagaaaaactggatgtgcagacatgtgcaatgcctttttcgcatggatgagattgatatagaagatatgttcctatatgacaaaaagaactcgaaagcatccataggccaggcaatgcaactattacaacaaaatccatttgttaccatgcgattccagaagttaatcaacaccattgatgaacttgagcaagcctttgaaggtgtaaaaaacatcaacaaagagtgtgttatctacatcaaggaagaaatgctcgctctaactcatcccgaccatgaaccaccaaaatttacgattactgatcttgatgccatttataaataccttatagagaacaaaataatagagtacagaaacactcttgaaaatattttaaaaaagctaaatggcggcaaaaaatga

SEQ ID NO: 378804 - DNA, 1299 bp, Salmonella enterica
atgcgagttgtcatcctggggagtggcgtagttggcgtgaccagcgcctggtatttaagtcaggcgggacatgatgtcaccgtcatcgatcgcgaatccggcccggcgcaagaaaccagcgcggcgaatgccggacaaatttcaccgggatatgcggcgccgtgggcggcacctggcgtaccgctgaaggcgataaaatggatgttccagcgccatgcgccgctggcggtgcgtctggatggcaccgcgtctcaactgaagtggatgtggcaaatgctgcgtaactgcgatacccggcattacatggaaaataaaggccgcatggtgcgtctggcggaatatagccgcgactgtctgaaaacgctacgcgccgcgaccggtatcgaatatgaaggccgccaggggggaacgctacagctcttccgcaccgcgcaacagtatgagaacgccacccgtgatatcgcggtgctggaagatgctggggtgccgtatcagctcctggaatccagccgactggcggaagttgagcccgctctggctgaggttgcgcataaattgaccggcggactgcgcttgccgaatgatgaaaccggggactgtcagctctttacccagcgtctggcgcacatggcggagcaggcaggcgtaacctttcgctttaatactcccgtggaaaaattactgtacgaaaatgaacagatttacggcgtgaaatgcgccgatgagatcattaaagcagatgcgtatgtcatggcgtttggatcgtattcgacggcgatgcttaaaggtattgttgatattccggtatatccgctgaaaggctattcattaaccatcccaatcgtcgagccagacggcgcgccagtatcgacgattcttgatgaaacctacaaaatcgccattacgcgttttgataagcgtattcgcgtggggggaatggcggaaatcgtgggctttaataccgacttactgcaaccgcgccgcgagacgctggagatggttgtgcgcgatctctttccgcgcggtggccatattgagcaggccacattctggaccggcctgcggcccatgacgccggacggcacgccggtagtgggacgcacccgttataaaaatctgtggcttaataccggacacggcacgttaggctggacgatggcctgcggttcaggccagttgttaagcgatatcttgtcgggtcgtacgccagcgataccctacgacgatctgagcgttgcgcgataccgttccgattttacgcccacccgtccgcaacgtttgcatagcgcgcataactga

SEQ ID NO: 378805 - DNA, 981 bp, Salmonella enterica
atggcaaatgaaaatagaataacatttacaatgttacttaatgattattttgaaactcatcacctcagggaggatacccgctggagttatgagaaagtgatcaggacgtttattaattttattggtgaagatgtacagcctgccgatatttcgaaggtccacgtacatcagtggcgacagaaagtgttatatgaacagaaactgtcaacatggacctggaataataaagtccggcatatgcgggctgtatttaatcacgctattaagacagggcttttcattcaggaagataaaacatttgaaaatccattttataaagtagtggtcagacaggaaatgaaaagtaagaagattctttcgagtaagcagatggccggtctgtacctggttatggaacgccatgaaatcatggaagcccagggtatatggaagggggggcgatgcgcgcttatgccggcccgtttctggcttaccgttctggacacgctacgctataccggtatgcgccagaatcagttactgaatctgaggatgggcgatattctgagggatgaagatatgattgtcctccaggcccgatcgtcgaagaaccacaatgaaaaccgggttccggtaacccctgtattgcgtgacaggctctatccgctgatggatgagcttgcattacgtggaatgaaagaaacagatcaactgttcaatatttcatggttttttgcgggaaggaaagccgcggggaaccgtatgggagtgtattccatccgtgcatttttccgtcgtctttcccgtgaatgtgggtatgcaataagcccacaccgtttccgtcacacgatagcaacggagctgatgaagctgcccggaagtaacctgaagatagtgaaagatctgctgggacattcaagtattcacaccacactggagtatgtggacggggatattgaggggataaaagaggcactgaagaaatacagcgggaaaaaataa

SEQ ID NO: 378806 - DNA, 1554 bp, Salmonella enterica
gtgacgacggtaacgacggtgacgacagtgctgatgaagatgtggcgtaagcttttcgggctcagtgccactaccggtaaggcaaaggaaaagacgccggaagcgcggggatatctgcggtcgctgacggcgcaggagatactggatacggaaaaccgtcaggggttgctgaaacagatacgcgataacagcctgatgacaaaagaggggacagaaaagtactacctgcagccgctgcgccactgcgtgaacctgatgcagcagttgccggccacggagaaggaacatcatgcggtggtgggcggtctggtggacttcacgctgaagagggtggcttacgcgctgcggttatcccggggatacatgctgccgcagggggccggagcggaggagcagtcagcgcaggcggcgacctggaacgcggtgatattttatgccgcgctgtgccggtccctgacggtgtttggccagctggaaggggagctggatgacggtagtttctggaatccggggctgtctgtgccgtcacggccctaccggctgcgtttctgtcagggcagggaggaaagggcgcaggcgctggcggtattgctgggaatgcggctgctgccggaggacgtggttatctggctgggcaggacgccggcggcgctggacacgctgctgcgtattatcacgggggaagagcgtcccgggtgtgtggtgtcggaaataatcagtgaggcgtctgttctggccggaggtcagttggctggcacccggaatacacctcagccggttgttcctgagcctgtggtacccgctgcggtcgcgtcagttgtggcgccgggaatggtggttccggcaacagagcaggaacaggctaccgttgctgctccggcccccgggatggtgctgcggtcggccctggaggggagcgaggctgcagtaaccggaaatacggttgtaccgtcaactccgcagctagcatccgtgccggaagaacccgcagatcagacaattggtgacgtgatagcgctgatgggatttgctgcaaaaaacacaccagagacagcagatgtggtactccctgaagacgggaccggcagtcataaacataacggtgtggtggaatgtatattttcagaagatgctgccgtggctcaggtggaggaaggggcggatggtgagaattacggtgtacagtttctctcctggttacttgaacagataaacacgggaacattaaccgtcaataacagtgactcttcgctgcatgttgtcagtggattgctgtttgctccggttccaggaatattcagggatttcctccgggaaaacaaaatgcagccgaggctcagaaaaaaaatacaggaagaatttgagtcacttggtgtgcatttcgctgtaaaaggaaagggactttacagttttcagcgataccctgaggaagggagagtgggagatccggaagcacagtttggctatctgattaaaataaggaaaatagcaccggcattttctgtcagtgaagacagtaagtatgtttttattgcaaataaatacaatatgtaa

SEQ ID NO: 378807 - DNA, 1518 bp, Salmonella enterica
atgtcttattctgatacacccgaacagtctgccgtcattgcctggcagggaacgcgtctggttgtcggcgcgtttgccggtacaggcaagaccaccaccctgcggcgttttgcggagcagagccctgatgagcggatgctgtatgtggcctacaaccgcgccatacgcgatgaggcgcagcagaagtttccgtacaacgtgacctgcaggacatcgcatcagctggcgtttgccgtgacgggaaaacatttcggcccgcggattaccggcaacctgaaggtgaccgatattgcccgcgccctgaacagcaaaaactggcgtctggcagggaatgtgctgttcacgctgaaccattttatgagcagcgcggatgaacaaatcatggcgatgcacacgcccggtgaggaggaactgtccggggaggagcaggcacagacgctggccgctgcccgacaggtgtggctgacgatgaccgcccgccggggcgatttccccgtcacccatgacacctacctcaagctttaccagctcagtcggccgaatctgtcatcccgctattccaccattctctttgatgaggctcaggatgcgaatccggtgaccagcgccattgtgctgaaccagacctgcagggtggtactggtcggtgacccgcatcagcagatttaccgtttccgtggcgcggataacgcgatgaatgccccggagcttgacggtgctgaccgtctgtggctgacgcacagtttccgctttggccctgaagtggcgaacgtggccaaccggttgctggcgctgaagggggagacgcgtaaggtgaccgggaaaggcgggccggaccgtgtggtggaaactctcccccggacatgcggtcaccgtgccgtgctgcaccggacggtgtgcggcgtcatcggtacggcactgcattactcgctggcaggaaagaaggtgtactgggtggggggaatggaaagctacagggtggaggacctgctggacctttactggctgtcggtggacctgccggagcggatgaagaaggacaccctgacgcagaattaccgggactacgcggaatactgtgaagtggcggaagagacgggagacccggaaatgaagcagtcgatgaatatcctcgaccagtttttcccgcttccggacaggctgaaaacgctgtggcagcagcgggtggcggatgagcgtgaggcggatgtgacggtatgtacggcgcaccgcagcaagggactggaatgggacacggtgaaactgtatgacgactttgccgatatcctggacccggaaatgccggcggacaaacgggatgatgagctcaacctgctgtatgttgccaccacgcgggccagacggacgctggtccctgacccggtggtactggaggtgctggcgcagcccccggcagaggatattctgtcccgccagagtgagggcaacagtgaagctgtggataatggtgacgacggtaacgacggtgacgacagtgctgatgaagatgtggcgtaa

SEQ ID NO: 378808 - DNA, 318 bp, Salmonella enterica
atgaaaaagttcactattccgttttattgtacactgattctgttttcagcttatacctgcgccatgacgccggacaatacagccgccaccatacggaataacgctcaggaagccatgtctcaccatccctcagtcagcgcagaaaataaaccttacacgctgaaactggataataaccgggtcatcattccggcgggcaggacgctgatgatgccatcggatgaagcgaaaaacatcatcacgcacatggtgaattacaacggcattcaggaagcgggaaatataataacagcaggcgatatgtttattctggaataa

SEQ ID NO: 378809 - DNA, 312 bp, Salmonella enterica
atgaatacagaacaaagtctgcatgaaatgaattatacctggttaagcctggctcaaaaaatgctgctgaaagacaaaagtgtggccatgttcaggctggggctgaatgcccggattgccggtattattggcagaatgacagagaacgagctgcataaattatcggcacatccacattttatctttaccctgcgcattcaggaccccgacgctctggagtgtctgctgcaggattcccgggttgaccatctggccccaatgcatgcagcaatgctgtgcctctcagacaccgggggacgccatggcatctga

SEQ ID NO: 378810 - DNA, 516 bp, Salmonella enterica
atggcatctgaaagcattttacaggaactggaggacacccgactggccgtggagctgatatctctgggtgcccggatgcagttactggagcatgcggtcggactcagccggggtaaaatgacccggctttaccgggaactgcggggaatgcccccaccaaaaggcatgcttcccttttcatctgactggtttatgaactgggaacacaatgttcactcatccctgttctgcaatatattcgacagcataaaaaaacagtcccccggtgagtcatcaataaaaatacttatccaggcttatcgcgcctatttgaaatatgccgacacgacagaaacgctgtcactcacccgggcgtggatactgaggcggttcgtagattcagggatactgagttatacccactgctgcaaatgtggcgggaaatttataacgcatgcaggtgaacctgttcacggttaccagtgcgccatgtgtcacccgccatcgcgggcggtaaaaaaagccgccatggaataa

SEQ ID NO: 378811 - DNA, 1104 bp, Salmonella enterica
atgggcgcattaaaaaacctgccgattcgcgtcaccgtgatgggcatcatggttatgatgttactgctggtcatcgctgacagtctgatgctcttcaccgccgaaaccgttaccggctggcgtcacattacctcagcagccatcattgtcatggctgccgtgatattaatcatgacaaacatctatctggtccggtgcctgatgaaaccactggccgaactgaaacaatatctgctgtccattgccgatggcaacctgaataaccgtatcaccctgtttggcaataactgtgtcggtcagctctatccgctgattgccaccctgcagaaaaataatgcggaaatcgtcagctccatacgcatatgtaccggcgacctgcacaaacagatgcgtacgctgtctgatgaaaacagtgccctggcagcccgcaccgagcagggggccgccgccagcatggaacaactcagcgccaccgtcggcctgaacgctgataatgcggttgccgccagtgagatggcccgtgaggtcgcttcatcagcacaggatacctgtgagatggttgtccgtgtgaaaaacactatggcagaaacagaggctgcttccgttaagattaacgatatcaccaccatcattaattccattgcgttccagactaacatcctcgcccttaacgcctcagtggaagccgccaaagccggagaacagggacgcggctttgccgtggtggccagcgaagtcaggaaccttgcccagcgttgtgcggagtccgcaaaagatatcgccgcactcatcacctctgccaccaccctgatacaggagggggtggctctggctgagaatgctgaagtatccatgagtacaatgaatgattccatcagcaacgtctcgcacgttatcggggaaatcgccatcagttctgaagaacagaacagggggatacagcaggcccgcatggccgtgaatgaggttgaccggataacccagcagaataaccggatggcagaacagtccacctccctggtgagtgctctgcagcaactgactgaacagttaaaccacgaagttgatttattcaggctgccggacaacacactactgcactga

SEQ ID NO: 378812 - DNA, 543 bp, Salmonella enterica
atggccttttcctggacggaagaacgaattaattacctgcgggagaatgccgggaaactgacatcccgggatatggcggaagcactgggtacaaatatcacggccgtccgtaacatggcggtaaggcttaaactgagtctccgcgtgagaggatacacgtatgaacaggccgataaggtgcatgagttgtatgcctcccggggagatatttcggtccgggagattgcggggaaaacgggactttcatacggtgccgtcagttatatcctgtacgccgccaaccggaaaacaagacaactgtacacccgggtgagatttattgaatttgagacagaggagcgcgtaaggtttggtatacagacggaactggttgatgcccgccgtacctgcctgaaaagactgaccagcgagccgggtacgcaggatatctggctgctggacggtacgcattttacggcaaggaatatttattttacagaacggataacgtccgcgaccgtcagaaaccggggagggtggcagaacgctaccggtccgggttaa

SEQ ID NO: 378813 - DNA, 471 bp, Salmonella enterica
atggacaacacaccgcagacttatgccacacctcccctgcagcagaaaaaaacagcccagagcaatcatgacccgttcgtgatcccggcgtcattacaacagtatgccgacgaaccactctatatcctgatcgccctgtggtgcctgcaacagaacgactggatcagccgcatggccatttcagaagccttcggtatcactgaccgccgcgcatcatttcagatgtcctatatctcccgccataaaaaacgggttgactgcgagatacgggttatccggaccgacaattcacaacgcttttatcatgaaatcagagtaaccggcgtggtgctgagcggagatacggtaagagcagtcccggctcagtccaaaaaaagccccctgaaacgcagtcgggtgggcaacgccacgccagagctacgcaatatgttgcattctctgatgggctcgcgcagagtctgcgaggattga

SEQ ID NO: 378814 - DNA, 399 bp, Salmonella enterica
atgacgaatcttgatgaaaaaatgaaagccatgctggcggttcagttacctgttcaggccactaccggggaagacggtctgccggatatcggaccaaagcggtcactgcgtatgtacaatgacaccacactgatttacaacgagaacacgggaggcaggacgctgcaaaatattcgcgcgggctcaaaagtggcagtggccgtgattgaccgggagaaccgggatggatatcgctttatctgtacaccggtgattgttgaagacggtgatgcttatcagaacgcgctggattttgcgcagaataacggtatgcagcagccactgtgtgcggttgtcctgcagattgatgagatatacagcctgcgttcgggggcggacgccgggaaaaaaattcagtaa

SEQ ID NO: 378815 - DNA, 219 bp, Salmonella enterica
atgtttccagagtacagagaactgattccgcggataaagaatgagaacgctcatttttcagtactgtttcagcagcacaatgagctggatcacgaggtatcaagggaggagggccgtcctgcgcctgacagcatccgactgatgaagatgaagcgggaaaaattacacctgaaggatgagatgaatcgtattcttcgctcttactctccgggggagtaa

SEQ ID NO: 378816 - DNA, 1734 bp, Salmonella enterica
atgaaaaggctgtttaatcttatgatgttgattgctggtgactacgcgcctcaattccgtaagactctcatttatgcggcattcgcgtctgtattacaggctcttgcctgtacgatctggttgccactccttcatgagttatccagaaacaaacttaatatcagccagatagttttttggttgctggttatgattattacgattgttctcgaagcatggttgagaattaatgaacaaaagtttacctatcgttactggcataaagttattgaagcacgtcgaatggctcttggtaatatactttatgcgatgcctcttcagatgttaagacgtcgtgaagcaggtgatattgcagaaaccataggggctaatgtaatgatggctgcatcagcaatatcttcactgtctgttatctttgtacagttaattattgtaccagtggttctggtgggtgttattcttattacggactggaaaacgggattggttttatttgttgcatgtattgccacaatacctttagtaagaaaagtacaaaaggatactcgttcaggctacagtgatgttgatgctgcagatgcccgtagtgcagcatatctcattgaatacgttcaggggcttgctgtttttaaatctgttgggcaggcaggggctgctgctcagcggcttgagcaggcattcaggcatcaacatcaatatcagagccataccagaaaatcatcagtattatggattgctggcggacagcttattattcaactggctttagtattgactgtagcgtttggtacgagcctggtggttcatgcacaattatcatcgaccactctggctgcaattgttgtaatggcagtatttttaagtgagccactgggggttgttgcgactatgagcaaattatttgaaatggcagacacttcactggagcgaattcgagatctgttagctgaaccccctatgccgatagtatctaattcagagaaaaaagtcgtaaatcattttgatattcaactggataatgtgagtttttgttaccatggaggaactgagtttacattaagaaatataaatttgacgttacatagtggtacaatgactgcgatagttggtgcatcaggctcaggaaaaagtactgtaacgcgattaataacccgatttgcagaccctcaggatggaattattcgatttggaggatatgatttaaggaatttttcacccgaagaactaatgcgttatatttcggttgtctatcaggatgtatggctatttgataccagtattaaagaaaatatagccatcggaaagccagacgcaactcagaatgagatagaaaaggctgcccgacaagctaatattcatgaaacgataatgaaattccctctggggtacgacactatagttggtgaaagtggctgtgcattatcaggtggtgagcgtcaaagaatttcaattgcacgagctattttgaaagatgctccggtcatcattcttgatgagcctacatcggcactggattccgaatctgagtatgctgttcagaaagcaattgatgctttggtatacaataaaacagttattgttgtagcacatcgcttatcgacgatagctggagctgatcagattgtggttctggaaaatggacgtatattacaacagggtacacatcaggaattgattattcaggaaaaaagccgatattcgcgtatgtggaatagtcagaaaatgacaagataa

SEQ ID NO: 378817 - DNA, 1788 bp, Salmonella enterica
atgcgcggatttgaagttatcgcccgtctggtgcaattatctccgggggttaaatatcgtctgttagcgggtatgttgatgagtggattaggcggtattataactgtagtgggaatgggatgttgcgggatagtagtaagcttagtgcttaaaaatatcgttagctccggggagttgattccctggcttacaggagctttcctgggtcttacaggtggatatttattccgtagtattgctgagggtatgacacatgaagcatcattccaactggaggtagtactacgtcgccagttagttgctgtactggctacgctcccactggggaaggtccagcaaatcgggagtggtggaataaaaaaaattattcaggatgatgttaaggggctacatgctgctgttgctgatgccactccgtttgtgggattagggataggtcaacccctggctgctgttgtactactggcgtgggtacagtggaaacttctgctgattgttattctgatgttccccatcgtcgcagtatgtatgatgcttatgacccgtgatcatattagattacgggcgcagtataaccgggccagcgaagaagttaatgctgctgtaattgagtttgttcagggcatgccggttgttcgtacgtttgattcaggtcgggttgcattcagtcgtttcagcagaaaagtcgaggcattcagtacggcagtatctgagtggcttgaagtatccagacgttcggggattgcaaacaggattctgattgcaccattaccaacactaatgatactggcgcttttttctgttcctttgctttggttcggtgaaattactgttggtgagctggtaatagctttaatggttggcactttgcctgttcaggctgtgatgcccttgatgtatctttcaaatatgctcaatgatgcaaaggcaggagcgcaccgaatatatgatattttaacgatgactccgttatctgagcctgaattggcagaatatcctgagcgttatgacattcagtttgagaacgtaacatttggatacgatgataatcgccagcctgcgcttaaaaatgtcaatttaacgatcaaagagggggaaacttgtgcgcttgtaggagcctcaggttctggtaaaacaactttaataagaatgattccccgattttatgacgtcagtagtggaaccgtacgtattggtggaacagatgtgcgaaatatggacagcagaaagctattacagctagttagcatcgtatttcaggaaccatttctgttttctggcagtgttctggataatattcgtcttggtaacgagcatgccagtgatgaggacgttcaggcggctgctaaaatggcaaatgcgcatgaatttattatcaatgaactcagtaatggctatcagactgaggttggagaactgggatgtcgcttgtcaggggggcaacgtcagcgagttaccattgccagagcaattctctcgagtgcaccaattgtaatacttgatgaagcaactgcatttaccgatcccgaaggagaggcggaaattcatcagggattggcgagattaatgaaaggccggacggtaatagttatagctcacaggctggcgactatcacaggggcagataaaatttttgtgatggagaatggtcaggttgttgagcaagggacacatgaaaatttattaatgtcagatggacactatacccgtctgtgggatcactataatcaggcatgccgttggggggttcgtaatcgacaggagggtgataatgaaaaggctgtttaa

SEQ ID NO: 378818 - DNA, 1758 bp, Salmonella enterica
atgatgttgtgccctgtctgggcgcgcggagaactgtatattggaggggctggacttgcatcggcttatctgggggatgccgataagacacaacagcattttatatcacacccagaaagtactgaacgtctgtaccgtacaggtgatgcaggacgatatctacctcacggtgaaattgagtttcttggacgtgttgacaatcaaataaaaataaggggatatcgtattgaacccggtgaaattgagaatacattaacaggttttcctggggtcaaagctgcaggtgttgtacttagcaataaatcggggggcaataaattgttggcagtggtccagggaaataacattgctttatctgaactacgtgtttatttatccgagcgtttacctggatatatggtaccgtcttatatctttctgacggatcatttgccattaacctccaatggaaaaatcgatcgtaaagttcttacgaactgggagtgtgagacctcatctgataatattgtttaccatgaagtacaggatgctcttcataaaaaaattaaggagatgtggcaagatgcgctggacattactgagctgaatatgagtgataacctctatgatttgggcgctgactcactagtgatagccagtgtggcagggcgtatacgtaaagaaatagaaagcgcttcgtctatttcatttgacgtattagtacgttatatgctgaattatcctcaagttggagaattagtcgactttatcaggggctctgttccagatggtaactttaatttagatgaggtaaaggaagaaaaacaaattatagaaaatggaatgcaatttgattttggtgtgttgactcgttatgggggaggtgatacagaaattttgagagtcatttttcacgcgggcttaggaacaatggattgttttcgtccacttatcagggaactggataatcaacaaaaggggcgagtagttggaattaccattaaagatggagagcgttattgcgcattaccttcagaacaggtaattgatacactggcggaagaatacactaaacatattatttcacaaggatgtactcacattcagcttattggttactgtcttgggggactttatgcaatagaagttgcccgcagattaactgagcagagtgtcgatgtgagtgatttagttctcattagcagccatccaattctaattgaagttgaagatgatatgttaattgaactactcttcataccgaatttgcatattaatctgcaacagactgggtttagtgatttgcatatagataatgtaattgatgttcttgtgaatattttcaataaaaacaatggaaggcttccggcaggtgctttacagcaaactgaaggcgcggtacatgcactgttttctttaatggggagttatacgcgagaacaacgtttcgaaaaatatattgaagccgtaaagcgtgaaacaggacaggagttaccttttgagatggctcttaatatgttcaacgtatttcgtcaaagcttttttgctgcaaattattatcctgcgccctatattggtaatatttgttttttactaccggaagaatcatcagggtttgcaccacatatggatgaaagcactcttgattactggcgtgatatttgtctgggagaactggagattatacctattaaaggtaaccatttttcctgtattgaagacggtaatgtgtccggtgttgcaaattttttggaagaaaaaattactaaaggaagataa

SEQ ID NO: 378819 - DNA, 1290 bp, Salmonella enterica
atgacggacgtgacagcagacacggtaactgtggtggttgccgggcggtgccagtgggcggccgggctgcgctgggcggtgcagggacatatgccggcgcgaaaaagtgccggtcagcgttctgtggtgaaaaaacgcgtcactgccgggcgcacacgccgcgacggtccggtactgactctgacggtccggcagggacggcggggagaccgggtgaccgcgagcggtcgcatgacttcgcgtccgcggggaccgatgtattcactggcggcggcgttcagccgggtcagcggtgataacgcttacggagtataccggctggatgagggccggtacgtgtttctggccacggtggacggtctgccgtcggtcatgggggatgtggccggtacagcggaggacaccggacgggccctgcagcagttcctggcgtttaacaccgtgccggaagggggctgggcggtcacctccccggcgaatgaaccgctgccatgggacactctgattgcttctgcgggacgccgtgtactgaaggtgtcccggctgcggccggtccgtcagggcataaagcccctgccggtggtggcgggactggcgctgctgggggcggcggcattctggctgtggtcggagggggaggacgacctgcctcccgttctggcggacgttattcccgctgccgcccccccggaaccggtgtacctgccgcatccctggaaggagatgatgccggtacaggcgtttttgtcccgctgtaaggcgtggcgggaaacggttccggttgcgctggactgctggcaactggcccggggagagtgcagcgcggacggcctgctgctggtttacagccgccagaccggtggtacggcggcggggttctcccgccgggcgcaggcggtgtttcaccgcctgccggtcattaacctggccgcgggcgggggcgaggggacggtacagctgccctggacgccggcagcgttcgtggatgagccggtaccgcccgttgccgtgcagctgatgcgggtggtgtcctggtaccaggctcaccaggccacgctgacgctgacggcggtgagtgaggcgccgggcgtgcccggagatgacggtgccctgccgccggtgcaggactggcaggaataccgcttcaccctgacggacaaccgggtgccggagatgctggccggcccggccgacgggcaggggatacggataagcaaagtgacgttcacgctcagcggggaagggcaacagtatgagacggaggggcatatttatgccggtaagaaatag

SEQ ID NO: 378820 - DNA, 681 bp, Salmonella enterica
atgccggtaagaaatagagcagccacggctgcagtcagcgccacgacgatactgatactgctggcactggccggccccggggcgcgggctgacgctgatacagcggtacccggtacgggcagcgccactgctgcggaaactgcgggtacttcgccggtcacggtttctcctgaaaccggggtaacggtggtcacagccgggagtgatgttgcgacagcagcgactggcgcgtcagcttccacaccgccggtaccgccgccgggcagtatcaccctgggcatgctggagcagatacagcagaagaacctgctgctggcggcacaggtgcagaccgcgcagttgcagcgccagctggcggaggcggacagtgaggcctccgcatccaccggtaatgttgccgtcacacaaccgggtaccacgctgtcatcagcagccgtaccgggcataccggggcagcaggaggggcgtgccttatcccgtacgccggtcgtgccccgcccgcaggtactggaaatcagcggtaaagacaacacgctgtacgccctgctgcagatgccggacggctcacagccggaggtgacccacggcagcagggtcaccatcgggaaaacctcgctgacggtcagccaggtttcgctgaccggcgtcatgctcagcgacggttcggaactgtcgttctga

SEQ ID NO: 378821 - DNA, 1803 bp, Salmonella enterica
atgggcaggggacattcagcgcagggacatgacgaggacagcggggtgctgctgtaccacaacccggagacgcgggaaaccgagattctggtggatgagcaccgccgggttcagcctgacgtgcaggcggaagtgatgcggctgatgagtgagtatgcccgggtctccccgcggtttgtctcccgctcggtgctgcaggcctgccgccagtcgcaggggcgccggtcagagtcagacgaaccggggctcagcctgaaggacctggcggacgtcagccggcgccaggcggaggtgctcggatattttcagacggcacagcgtaccggcagttccgacatccatgggaccaccagtcccgggctgacccggattgaaatgcgaattcacggtgacctggtgacggtggccgaactgggggagcaggacggggaggcactggccgccaccatcattctgtcgatgtgtgacgtcaccgaagtgcagttcttcccgatgcgcaagcaggacgggcgtgtggcagcaaagttcctgaaaaaggtcgggctgtttggcgcccgctacagccacacgccaaccgcggacggcctgcacttcgtcatgcgtaccattaatgacgatggcgaccgggtaccgtcactggtgcagctcggttttctgccggcacagataaccctgatacagcgcattctgcgcctgccggaggggatggtcatcctgtccggtccgacaggctcagggaaatccaccacgctgaggagcttcagccgtatctggctggagcggaccgggttccttaaacggctgctgacggtggaggacccgccggaagggcgtattgccggcgccattcagacgccgattatctgcgacaaggcggatgaggcggaagtcaggcgcgcctgggagcgggccatctccagcgcgctgcgccttgacccggatgcgattatgccgggcgagctgcgcgacctgatatcgatactggcgggcatcttcgccgcccagaccgggcacctggtgatgagcacgctgcacaccaacagcgcgctgtccattccggaacgcatgataaccatgggggtggaggccggactggttctggacgcgcagctgatggtgggacttatcagccagcggctggtgaagacgctgtgcccgcactgtaaggtgccgtgggagcagaagaaagcagaactgagcgaagaacaacacgcgtacctgacgcaatattgcagtgaacccggggtgtgccgtccggaagacctgtacttccgccatccggcaggctgtgaacagtgccggaagtcagtggtactgaacggccatacggtggccacggtgggacatggcgtgaccgggcgcagcgtggtggcggaggtcatccgccctgacgccaggctgttccacctgctgaaaaccgaaggtaaggaggtcgcgcgacgttactggatggcaaatggcggtatcacccgccgtacccatctgctgcacaaactcggggcaggtcttgtcgacccgctggaagcggatgagaccattccgctggacgaggacgatgtgttgcaggtgccggtggacagcgggcacgccggtacccgtactgacggcagtcccggtaccgccctcagcgaagagctgaaggagctggtcagtctggcggtttcatcagggattgagcaggggctggcccgggggcttcaggaagcgctgcaagtggcgctgaccgccctgcggcagaacgcagcggcacagcgcagcagcaataccgttaacaataacaacggaggcggacatggacaatga

SEQ ID NO: 378822 - DNA, 1119 bp, Salmonella enterica
atggacaatgagaacagcgtacgcagcggaatgctgcagcggctgcgctatgaagctgtccgccggacgttcagcggggagtaccgcatccggttctatgaggcgctgcgcttcctgctggccaaccaggtccccctgaaactggcgctggagcagataagcgaggcgtacacgaatttcggtcagcgctggcatccgtttgcggagctggcgcaggactgcacggacgcgctcagtgacaacagcgaggaacatagtctggagaacacgctggcccgctgggtgccggcggaagaggcggcgctgataagcgccggtatgcagagcggtaacctgcccgacgcgctggcgcaggcggtgcggctgacaacctgccgtcgccgcattctgtcggcggtcctgaagatgtcggtgtatccggtgggcctggtggtgatggtggtcctgaccgtgctggtcttcaacctgtcgctgataccggagctggagaaaatgtcatccccggacacctgggagggcgggctgagttttctttacgaactgtcggtgtatgcggacaaccatggcctgctgacggggggcgtgatggtggcagctgccgcatggatgttctggtccctgccgcgctggacgcggcctgacggactgaggcgggtggcagacgtgtttgtcccctggtcggtataccgggatatccagggggcggtgttcctgctgaacatggcgtccctgctggccgctcaggtgccgctgctgaacgccctgaatctgctgctgcgcttcgcctccccgtggctggcggtgaggctggaggcgattatcgaccgggtggcagaaggggaccactttggactggcgctgagaaactcgggctgtgacttcccgtcacgggaagcggctaactttttatccctgctgacccggggcgacggcgcgccggacgtgatagcccggtacggcgagcgctggctggagcagacgctggagcgggtgaacgtccgggctaaccggatacgtctgctgatgttgctggttctggtgggtgtcctgctgttgctggtctccgccgtgacgaccatctctcagatgggcggcagtgatatgaacagggcgggctga

SEQ ID NO: 378823 - DNA, 627 bp, Salmonella enterica
atgacagagaacgtgatttccctgaacgcgccgggtaccggtaataccggcgatggcaacaggccggagcccgaccgtggctgggcgctgatggagcagggtgtggtgggactggtgattatcgtggtgatagtgtcggtactggcctacgccgtcacgctgtggctgcgcaaggatgtggcttcggaggccacgaatatccagaccatcatcaccagtacccaggggctgctgaaggacacggacgggtacaacttcacctcggcggcgaagatgaccggctcgctgattcagcaggggggcgtgtcaaaaagcatgaccatccgcggagacgtgcagtcgggaacggccacgctgtggaacacctggggcggggcggtgacgctggcgccactgaacgctgccgggttcaacaacggcttcaccctgacctatgagaaggtgccgcaggcggcctgcgtgcagatagccacgcgcctgagcaaatccggcgtggtggacggtatcaccatcaacgcgactgcgcacgctgacgggaaggtgacgtctgagcaggccggaacagaatgtacgaaggacagcgggcgtaccgggaccaacaaactgatatttacggtgaataactga

SEQ ID NO: 378824 - DNA, 576 bp, Salmonella enterica
atgcggacggcagacgccacgggaaagagggggcgaaggtacccgccccggaaactgcagacagtgatactcctgacgacagcgatactgtcgctgtcgtcattcccggtacaggcattctgttttgaggcagcaggagcgaagtacggtatttccccccgcctgctggaagcgatagcccggggagaaagtcatcttgacccgcgtgccatcaacgtgaaccgggataagaaaggacgggtgaagagcacagattacggcctgatgcagattaactccacccatataccggagctgctggcgatgggcgtgattagcagcgcggatgacctgtaccgcccctgcctgaatgtacagaccggggcctgggtgctggcgaaacactttcaggtctgcggtatcacctggaactgtctggggtcgtataacgccgggttccgggccgaccgccatgaaacccgggagcactatgcgaaccggatatggcggatttataaacggctgacggcaatgccgacaatcgcggcgacagcgacaaaaaccgccggaaaggcaaccaggaaaggagggaaatga

SEQ ID NO: 378825 - DNA, 558 bp, Salmonella enterica
atgttgttgtggatatggattctggcaccatgggtttttgctcttctctccctggggcttgcctgcgtgctgacggagatactgcggctgagaacggcccggaacagaaggaataaccgggacgacgtgagtttattaaccgggggactggcggatgaaatcgactgtttcttcgacagttatatggcgtctttcggtcacgccctgcaggtgacggaagacggggatgttctgcgggtgtggttttatgcccggcagcgttacttcagtatttatgaagacagtgccggtggtgtgtcgcaactgcccccggagacccgacgggcagttattctggcgtacaccacggcccgcagcatgctggatggactggcggcgcacacgtcactgctggaaaaacacgaagcgcagtcactgaccggaacggcgggaagtgcagacaatatcctcctgcagcggctgacagaaaatacacgccagctgaaggtacttcacgaaatgatgtgtgcggtgacggaacaggcgctggcacaactccggcagggggatgtccggtga

SEQ ID NO: 378826 - DNA, 675 bp, Salmonella enterica
gtgagaaccctgatagccacggcgtttccggtggagtatgcgctgccggtcatggtcgccgctgccctgacggcccgcctggtgctggttcctgtccgtcgctttctggccggacagggctgtggcgtgaacgcccggctgcgtacggcggaagccgcaggaatatgggcaatggcggttgccgcgatgctgttctgcctggcgcaggcaccgttctctgaacgtgtgcacgccttgctgatgtcgggatttctgctgcaactgggtgtgtgcgacgcggcaagtggctggcttccacgtcggatgacggtggcgttcctggtggcgggtattctggcttcactgataacggaacaccctgtcgtcctgctggtacatggcgctgcgatggtgctgatatttatggttttgctgcgcctgctgatgcggaataaataccgggatacataccagcgcctgggaacgggagaccggtggatgattgtcgggatgacagcctggctggatttacccgatatggcgatggcgctgataacagcgtttgcggggtttgttgcctggcacctgacggtgggaacggggatgcgcaacggcggtccgctggggccctggctgagtgcgggctgcgtactgatattaatccggcggctgtaccagccgctgtgggtggtgtga

SEQ ID NO: 378827 - DNA, 1422 bp, Salmonella enterica
atgaaaacagaagcacgtattgcagggcctgaccgcggttttgccatggtgggcgtggcggccgcgctgctgatagtacttattatggcgaccatggcgtccgggtatatgcaggattacctgaaatcccgccagtggcaactgatggcggcgcagacgagccggtttacgcaggcggtggagtcgtacagcggacgttattatgcagaagtacaggcggcgagcaccaccacaaagccggtgacggtgacggcacagatgctgaaaaataccggatttttgccggcagggttccgggacaccaacagcaacgggcagcaactgaaagcgttactgatacgcaacgcgcagcatgcggaactgctgcaggggctggtgataaccacggacgggcagccgctgccgtataaggcgctgcggcagatatcgctggatatcagtgctggtctgggcggttatatccgtgacggccggacggccgtgggtgccatgaacagctggacggtaccgctggcgggatttggaaccagcggcggtaacggacatatcgctgttctgctgagtccggagacgctgacgggagcgcgggaggacagcgaccgtctgtaccgtttccaggtgaacggccggccggaactgaacaaaatgcacacgtcgatagatatgggcggcaacaacctgaacagcgccggggtggtgaacggaaggtacggtaactttgacgtcagtatcgtgagcaacggtccggtgacggcaggcggtgatatccgcagcacaggcgggtggataatctcgcgccatggccgtggctggatggatgaaacccacggcggcgggttctacatgacggataatgaatggatccgcagcctgaacaacaagaatatttacactggcggccagttaaaaggcggttcagtccggtctgacggtgacctttctgccggggggattttaaagctggaccaggtgaacgttgcaggcacctggtgtccgcagaagggggcgataagctatgacagctctggtggaatacttacgtgccagtacggtcgctggggaggaattgacagttatcccattggaagccctattccgtggccttcgacgacacctcctcccggatattttttaatggccgggcagagttttccctgtggtccataccctcaactggcacatgtttaccccggctgtgttttacccgatctgagaggggtatttatccggggcctggataacggacggggtctggatccgggacgcggcatcctcagttaccaggaagaccagagtaatatgacacccagtgctggcggagggttgcatggccatcatcatggtatgacctattactatcccggaggtcaggaggcacggcctaaaaacgtggcattcaactacattgtcaaagcgggataa

SEQ ID NO: 378828 - DNA, 1572 bp, Salmonella enterica
atgttcagacggattaaaatttcttacggactcgtcgcagtcctgatactgctgacgattattcaggtggtttcaggtacatggagcgtcaggtcatatcttgattatgacagtaacctgcaacagatcgccttccagcgggagcggatcgccttactggatgaggcttatgtcatcatttcggatacccggggagatgtctggaaaatggcgctcctgatggctcagggaaagcagggagaaaatgccggggtaaaactggaggcaatgattaaacgctatgacggggcaaacgtggatatggataaatattacgccctgtcccgcaatggtagcccggatgatatccgtcatgctgaacagatgaagacgttttattcgtccgcccgtgattcacagctcaacaacatccggctgctgacggctggtgattttaagggacttgacgagattgcccgccagggaaatccgactgctgacttcctggatgcggtcaatcagacggaagaggccatcaaccgggatgtgatagcgccttccatcacgaagtctgatgcgcttgtccgtgaggggattattctggcggtggtgtttgctgtcgtgttcattctgctgacggtggtttctgcattgtggtgccggcagtttattaccagcagtatccgcagactggccggataccagcaggccattgccggcggggacttatctgtggacattccgcttgtgaaggggaatgaactggatgacctgaccgcaggcctttcctcgatgcgcgactccctgagtgaaatggtgatgaccatccgtgccggcgcagagagtattcacaccggtatccgggacattgctgatggtaacgttgacctgtcctccaggaccagtcagcaggctgcggcgctggaagagaccgctgccagcatggaacaactgaccgccacggtggcaaataataccgataacatccggcaggtgaccgggattacagccgtcagcgccgccaccgcacaggacagtgcggctatgacggccagtatggtggaaatgatggtgcagataagtgacagttcgcaaaaaatcaacgacatcatcggacttattgatggtattgctttccagacgaatatcctggcgctgaatgcagccgttgaggcggcccgggctggtgagcagggacgggggtttgcggttgtcgcagcagaagtccgccatctggcacaacgcagcgcggattcagcaaaagaggtccgggcgctgattgatgagtccggagagcacgtgcaggccggcaatgaactggctgaaaaagtcagccgtacaatgaatgacattgcggaaagcgctctgggcgcgaaatcaacaatggaggagatgctcagttgtgccgaagaacagagcaggggtattgaacaggtgcgtatcgcggtgtcggagatggatcgtgtcacgcagcagaacgcgtcgctggttgaagagtctgcggcggccacaggggcgctgacggagcagacgaacaggctgacgcaggtggtgtccctcttcagaacggagccgtcgtccaccggcgtgtag

SEQ ID NO: 378829 - DNA, 1146 bp, Salmonella enterica
atgctgccatccgttcgtgttaaaaagctttcactttcccgtgcgctggaccggtatctggacacggtttcggttcacaaacgcggatatcagcaggagttctggcgtgttggtgtgattaaacgtcacccggtgacacagaagatgatggatgaagtgacaacggtggatatcgcagcttaccgggatgaccgcctggctcaggttaacccccgaacggggaaaccaatatcgggtgacacggtccgtcttgaactggctcttctgtcatcgctttataacctggcgaaggtggagtggggcacctgtcgtgcaaatccggtggaggccgtgcgcaaacccaaagcctcacccggacgtgaccggcggctgacctcttcagaagaacgccggttatcgaagtattttcaggcgcgtaatgcggagctgtacacgatattccatctggcactggaaacgggaatgcgtcagggcgaaattttgtcgctgaggtgggaacatatcgacctgcagcacggcgtggcgcacctgcccgtcacaaaaaacggcagtgtccgggatgtcccgctctcccggcgggcccgtcaactgttgcagcaactaccggttcagctttctggtccggtgtttcactataagtcatccgggttcaaatctgcctggcgggcagccctgcagtacctgaagattgagaaccttcattttcatgacctgcgccatgaagccatcagtcgcctgtttgaactgggaacgctgaatgtcatggaagttgccgcaatctcaggccataagtccctgaatatgcttaagcgctatacgcacctgcgtgcttaccagctggtcagcaagctggacgtccgccgccgacagtcgcagaagatagcgacgtattttgtgccatacccggcggagatggaagatacggctgatggatttcgggttcatctgcatgattttgagggactgagcgtcagcggacatacccgggaggcggctgtggacgcggcgtcggtcgtgctgctacgccggcttgccactgcggcacagcacggagaacgggtcccccgaccgggagacctgccgttgcatgccggggttatgattaacccgctggcggggtctgtgacgggagggctgtgctgctga

SEQ ID NO: 378830 - DNA, 156 bp, Salmonella enterica
atggaatccgtcatcaggaaagtctgcctgtattttccggttctcgtcaccgcagtcctggctttccgggtatggaatgccgggcacatcatgcccgctgcactgctgaccaccctgtgttgtaccctcgcgttcgtggcgattgcgacggaataa

SEQ ID NO: 378831 - DNA, 474 bp, Salmonella enterica
gtgatttttttcctgtttctgatactggcgctgatactttactgtccgtgtttcatgctgcagtctgtttttgtgcggaagaaaggatttgaggtgttcacgttccggcaccggtggcgccggtggcgggttattcacctggcggtgcgtgagcgggtgggcagaatgacacgccgccgggtatggttttaccacgatgcgtttctccgggcactgggggaggcgctgcagtccggagaaccggtactcttccgctcacatctgatgcggcccgcgcaggtcaggctggcctgtcagacattaacctcctcctgcagacgtcaccacattgtgacggtggtcattccttcttatgaacgccggctgatgacgctgctgatgctgctccaggagtggcggttcatccgggtaccggaacagggtgtgatggtggtggtcagtccgcaacagaataacccggtatcccgtggctga

SEQ ID NO: 378832 - DNA, 897 bp, Salmonella enterica
atgaatccgacttacacagcattaattgcattactgcgtacaggaagtgtccgtccggtggcagacactgtattaaacgacgcaaccagctcacagttctccgttcgtctgcgccctgaatcccggctgttttttgatgcctgcgctgaacgtctgggaatatcccgggcagcgctgtttggtatgctggccgatggcgtgatagctgaagtccgtaacgatacggccgataaggccgtgaggctgtacgagcgtttctgtctgctgatggacgcgcacggtctggatgtgacggagcaggcccggctgttgaaatcgtggggttttcttcccagcgtgctgtccagtcgggagcggacgctcgacctgctggacgtatcattgctgcagcaactggctgactggttttatgtggacgtggactggctgcggatccgttcgtcctgcccggtccatgttcctgatagcgacagtgctgataactggtcagccgtgacagaatacctgcgtatgctgccgggaatggatggtgccggcgggccggttgagctgatattctgcttcagccgcagtgtgtccgggggacccgtccgtgacgtgggattgtgcctgcgctatgggcgggtgaccggggaagtgacggtgccggttgtcagatggcacggtatggcggtatgggaagcgccttatacacaggaagtgttccgtcgcctgcagtcgcttgccagtgactctccgcgcggtgagcagctcagaactccacctgattcatatccgcgtatccggtgtcgttatttccggctgtctgcccggcaactgcaggggctgtcccggggtgaaatactgcccgtgatggtactgaatcatccactgggggaatatccgggaataccgtga

SEQ ID NO: 378833 - DNA, 1215 bp, Salmonella enterica
atgaaaaacagtattcgcgccttttctttatctctgctgccgctggcagtattaatggcaacaacggggaatgcgtcggccacagggtatttcgaagcccgtaacagcgcaatgggcgggacgggggttgcctcgtcgcattatggtgcggccgcgctggccaactcggcgctgatgactcattacggcgataaagatgatttcagtctgatcctgccggccgtgggggtacaggtctccgacccggaccaccttcaggacggggtggacggtgtgcgggatgcgtggaaccactatgacgacgccctttccgccggtacggtcaccgccggtgacgcgcaggcgctgaaggaccagttgatgagattccgtgacaccggcgcaacagcgcaggccggggcaggtatcgtggccacggtgcccaacggtgcggtgccgtttgcagtgatggtgaaatcgtgggggacagcttcagtaaacgggagcgtcagcgaccaggacctgcagtatctggacgatgtaatcgccgggaaaattactccgtctgaggcggacaaagacaccctgacctcaaaagcgcgtgggcgggccgcagtgataaccgatgtgggcgtggcgctggcccgtgagtttgaaagcggtggatttaaatactcggtgggagtgacgccgaaatggcagcgtattgatacgttcaactacaacgtcaccgtgaaggactatgacagaagcgattttgacggtaaccagtaccgcaacaccaccaccgggtttaacgccgatactggtgttgcagcagacctggacgacaactggacgctggggctggcggtacagaatatagtcccgcgcagtatcgatacccgtgaagtcaacggcattaaggaaacctttaaaatccggccgcaggccacggccggggtgtcctggcacaacagcctgttcacggcagccgccgacgttgacctgacgccgggcagcagctttaacggcgacccgcatccccagtttgcacgcgtgggcggggaatttaacgcccggtcatgggcgcaggtgcgtgccgggtaccagcagagcctggaccataatgagggcagcgcgttcaccgccggtatcggcatttccccgtttgatgtggtgcaccttgacctgaccggcctggtgggcacagaccggatgtatggtgccgtggcgcagctgagcgtcacattctga

SEQ ID NO: 378834 - DNA, 651 bp, Salmonella enterica
atgacacaaccagccaggaaaaaagagaccgccacgcagctggcgttgctggaagcagaactgacggcagcccgcagggtgacagccagacacagggttgcggtggagaaagcggaaaaacgacttgatgctgctgaggattctcaggctgacgtacagtaccggtatgactgtgccctggtggcctcctggggcgacacgcctgactggctgacgttgctggatggtgatgagagccggagctcagtgatgtatgagctggcgcgcgaggggctggaacgactgggactcgggacatcaatgattaatatggaaaccgggcagcgtgtggtctggctggggttcagcacggacagtgaagccgaactacagcagaagctgcgcggggtacagtttattctgccgtttgtgaaagccgggagtcatggccagcgggaaatcagtatcagccagccgcggcgcgataaatttgcgctgtccctgatggtggatctgcgcacacaggcagtcagtgtgctgaagcgggtgtatggctgcgaaaaagagcgtaccggttttccggggctggaagccgcgctgcggtacatccgggataaccattcggataccagtattgaagccggtacaccgcatgcgttattaacatcctga

SEQ ID NO: 378835 - DNA, 279 bp, Salmonella enterica
atgagtaacacatccacaccctttcttatggcgcggattgctgcgctcagtctgacggaacatcagactgacattctgcaggcggttgacggatttgtcgtggacggtgaactgaacattcgccagttgaaactccatgcccgccacacacggaacaggctggcagacaccgggattgcggtaaaactcaatcatgccctggagctggtatcgggtgctcatggtttccgggactggcaggcggtacttgccggtcttcgtgagagagacggggtatga

SEQ ID NO: 378836 - DNA, 591 bp, Salmonella enterica
atgagaagactgaccgaccgggatatacaccacatgtacgagcggctgcagcggtatccgcgagctgtccggtgtctgacgcgtgatgatgtgctgaaactgctggatgagattatctgccggcgtatggaggagaggctgcctgcggagaagctactgtcgtgggtaaccggcagcgtggcattccgccctcaacccgttcccggaaaacgggcatggctgaaggaccacctggcccatgcggtcatcacgctgggcggtctgtatcagtatccgttttcggcgtcctgggatgcgctgctgtgccggctgctggattcgggcatgattacagggagtgacgggttcacgctgactttcgcgctgaacgggcagacgatgatggtgtggcgtgccagccggtggtatgggtacggaacactgtttgcggttaacggtatcccactgtcagacagacaaaagtggcgaccgcgctttgtcaccctgcgacgcctgcatgcggtggcggtgcaccatgatatgacccggcgaactgacgggccggacccggtatctgtcccggggcagatgatgcctgacactgagcgctga

SEQ ID NO: 378837 - DNA, 351 bp, Salmonella enterica
atgagaaaattaatcagtatagtcagcgatatgaaatcactggaaatcatcagaaacatcatccgggaaactttactgggtaataccattctgggtttaactgcatccggaatcttttacataaacagtaacaactggccatacctgatatacatcgtggcagatccgatattaataactattttcctgacggtgtttgcatggttaactgtaataatacatcagtatttccaggaactggtaaaacataaaaacgcgttatcctttatgatgtttttcatctggttcccgggcatggaaattatcattactttcaacatggtaacattcataaaaggaatacccgtttaa

SEQ ID NO: 378838 - DNA, 375 bp, Salmonella enterica
atgtcagtggctgaaaatctgatggaagacgcagtattaaccgactttgacccgaatatggtggcgtgcggacgcgcggtaaaacagacggtcagactgaccttcggatgctggcggtacaggggaacgtttgaggtggaggtcagggggaatattaccgggctggatgcgattcgttatgcggtggagcttttgtatgaaagtctgccgtcagtggtggtgacggacgacgacctggagtgcgacatgaaaatggcgacgattgaactggatggtattacctgcgatgacgacgacctccggggtgaggaatggctggccgacatgcttgtcagcgcagaaatcatccgctatgagccggacgggacgctgtga

SEQ ID NO: 378839 - DNA, 249 bp, Salmonella enterica
atgttcagtcttgttcagcgggggcaactgtatgccgatgataacggctggccggtcatggtgtacgactgcaatgcccgccgggtggtgtgccggcgggaggatggccgtctgcgcccggtctccatccgtgaatttaacagcaggtttgaacgcctggagcacgacgaatacaaccggataaaagcggaaatggcacaggaggagaatattaaaaacttacgcgcactgcgcgggaggtgtggatga

SEQ ID NO: 378840 - DNA, 141 bp, Salmonella enterica
atgaaaaacagcctggaagatttgcataaccatctggcgtataacgcagtgatgaacctctggtacgccggcttctccccggaatacagtcaggccacgctggcgatagcgcagataaaaatggctatagcgcgtcggtag

SEQ ID NO: 378841 - DNA, 204 bp, Salmonella enterica
atggtaaaaacgcatacgggaaaggttgaagtgacaacagcactgggaaaaatacggaaaaacgtcggactttaccggtcagagaaggcgtgggtggttaccgccggggaaacttacagtccggagaccgggcagcgtaacggcggcacaatgcgggccagcgtgctgttactggacaccatcagaacattgcccgggaagtga

SEQ ID NO: 378842 - DNA, 906 bp, Salmonella enterica
atgaataatttgctaatggaaagcgttcccgcgcggcggcgtatgccgtccctgccgtttctgaaatgggcgggaggtaaacgtcgaagtctggacacgctgcagcgctggctgccctctccggatgaggtggagtgtctggtggagccgtttgtgggcggggccagtgtttttctcgggacggattaccgccagtacctgctggcggatatcaatgccgacctgattgatgtatatcttcacgtcagggacaacccgtcggggctggtcaggcgcctggagagactgttccttcacggtaacaacgaaacggcctaccgggaaaatcgggaagagtttaatcgtattcacgccggtccggagaaatcagcgttatttatctacctgaaccagcactgtttcaatggtatctgccggtataacaaaaagggcatcttcaacgtgccgtttggccggcgaaagtcggcttacataccggaagcagaaatcatggcgtttgcccggaagacggagcggtgccacgtttcgtttttccatgcagggtttgaggacacgctgaagatgacgacggcggggatgttttccgggatgtcgtgcgcggtgtactgcgacccgccgtatctgccggtgagccagacagcgggattcacgacgtacagcggggatgagttcacggtggcggaccatgaacgactggccggttgtctggcggagcttcatggccggaaggggatgccggtggtgatatcggcgagtgacacgccgctcagccacaggatatacgggcaggcggggttccggctgaacggacatcaggtatccagaatggtgtcggcaagtgccgcgtcacgaaaggcagcgggcgaactgacgggcgtactgatgcgcaccaggggtgaatgttaa

SEQ ID NO: 378843 - DNA, 162 bp, Salmonella enterica
atggatgatgtgatgagtgattttcaggcactgataattcgcgattttctggaagagaatattgagcagtttgctgagttctgcaaccgtgacgggcgggacggagagagtataatggctgaaatcttcacggtgttggctatgctgagcggtgatgagtga

SEQ ID NO: 378844 - DNA, 201 bp, Salmonella enterica
atgacagattattttacgcatatatatggtctgttacgtgagggtgatggaacggtgcttattattttatttttaggtattctttgtttctggtggtacttgctcatcttaaccctggcgattatcagggttatttctatgattactggtttactcaggaagcttatcatcagatacagaagtaagaaggccaatcgatga

SEQ ID NO: 378845 - DNA, 219 bp, Salmonella enterica
atgacacggaaaaccagaaaaataaacacctcactcagttcatacaataacaatgaggaaaggataaaactgttatcagaaaccagagagatactggattatttttatgccaacaccagtaattcaagaatatccccatggtttttcgcatcagggatgattctctcttccctcataatctttgcatattattatatcaaaaataacatccttttctga

SEQ ID NO: 378846 - DNA, 966 bp, Salmonella enterica
atgacaacactcacggccgtaccggcatttgtgcccggcgatgaagaggcctccatctcctcatatctgagcagtccggccccggaagaccgcgtggatccaccgacgtttcagggtaacggagtttctgcggctgacgcaacgctcactaccacagaagaaacctccgcacagcaggcctcgcaccggctggggggaaatggtggccggcgggctgagccggcgtcccggagaaaagtgtcgtcacagatatggacggttttttcggggattctggttctgtgtctggtatgcgctgtggcatacctgtggcagacggtcaggcagcaggagatcctgctgacctcgctggacacggcgtttcgcagcggtcgtgtggacgccctgccgcagcgtgttcaggcgctggaagagaaacagcagcagtacctgcctctgacgcaggcgcaggactggcgtggagaggatggtaaggcccgggaggcgctgaaagcgcaggtgacgcagctggtcaaagacagtgagcaggtccgggctgacgtgacggcgctggcaacacagcaggatgcgctgaagcagctgacggacacgctgtcgtcccggctcgatgaacaggcctcccgtatcggtgcgctgtcagaatggaaaacacagcgggaagaaaaggcaaccggcacagcgacaaagccgtccccgaaggtgagccgtgagtcggctgccacgtccgcgccggtgaaaactcccgtggtttcccgcgccctcacgccgccgttcgtcctgacaggcgtggagcgccggggcgggcaggcgtatgccgtggtgctaccagccggggcagggagtgactggtcacagctgcatatgctggttcccggggagagttaccggggctggacgctggtcagtaccgacggtaaccgggcggcgtttcaggttaacggccgcatacagcagctgacgccatag

SEQ ID NO: 378847 - DNA, 756 bp, Salmonella enterica
atgcaaatgctgaaaaaaatagcgctgaccgccatgacgctggcctgcttcgggccgatgtgcgcttctgccgtggcatcggtcagcgccggccataatggtaacgccgttgcccgccagacggagacggtgaaatcgcaggaacagcagacacagacagacaacagtgtccgggagtcggcggtctggggactcagcgacacacagtggcaacagtatcggaatgtgatgaagggcccccgcggtgtccagtcgccggggattgacccggtgctggcgctgggtctggaagcggaatctgctgcagaacgccggcagatggcagagctgtgggtgaaacaggaataccagcgggtggagaaggagctggcgtttcagcgtgaagttgacgcggcctggaagcggctgtatccgggcgttctgcctgtgaatatggggaacgcaaccggcgtggcacacgatacgcacggacgtctggcactgtttgtcaggcgtgagagctgcccgcagtgcgatgcccgtctgaacgctgttcttgccgacaaccggccggtggatatctacctcgtggacagtggcggcagtgatgatgtcatccgccagtgggcgctggcgcaccatattccggtggacagggtccggagtcgccagataacgcttaaccatgataacggtaactggctgaaattcggtcagggtcgtatgccggtggtgctgcagcagggggagggtggatggcaaatcgcggcattctga

SEQ ID NO: 378848 - DNA, 660 bp, Salmonella enterica
atggcaaatcgcggcattctgacggtatcagcatttctgatggcgggagccacagtggtgttttccggacatgcaaccacaaagccgctgtctgtcgggtatccggttcctgaaggctatcggcgggtggcggaagagtacggcgtaccagcagaagcgctgtattcggtgtccctggcggaaacttcccgacggttgccgcagggggagcgcccgtggccctggaccctgaacgtggcgggaaagggataccggtacgccagccgggaggaggcataccaggcgctgctgggctttatgcgccattacccgctcagacggatagatgtggggattgcccaggtgaacctggggtggaacggcggatatttccggaactatcgtgaagccctggagccgtacaccaacctgcgggctgccgcacaaatcctgcgtcactgttatgacctgaatcccggcagctggctgcaggcggcggggtgttaccaccatccggcgggcggaaaaccggcccggacctaccgggccattgtacagcggaagctggaaacgattgcttctgtggaaccccgtccacgcagtgcggctcattcatccccggtgacagcgactgaaacggcgctgcggtgggcggagcctcagataccgggagagcgctga

SEQ ID NO: 378849 - DNA, 570 bp, Salmonella enterica
atgaaccgatacatatcacatcatcttcataccctgcataccaccgtccggcacaccctggtgccggtcgtgcttgttgggctgctgaccacctccgcgatggcggcactgaccgtggtggcggacctcggcggcgagtccacggctcccctgtttgacgccatcaacaatgaggcgaatgagttcacgccgccgcggtcgctgtctccgccatcaccatcgcagccgtccgctcccgccactgtggatgagatgctgccggtgaccacgccggagatgacgccgggcagggtggaagtacgcagtctggcgcttgcgggcatgacgccggtgtttctggtcggggacgacacgttgtcccgggactggctggcgcagcgacgggctgacctgctgcgtatgaacgccacgggtctggtggtgaacgtgagtgacagcgccgccctgcgggaactgctgtcgcaggctccgggtctgacgctgctgccggcatccgccagtgatatcgcgcgtcgccttcagctcacgcactacccggttctgattacggaccgcggtctgtcacagtga

SEQ ID NO: 378850 - DNA, 582 bp, Salmonella enterica
atgctgcaggtcatactccttctttttctgctgtcagcaggcgtcgttgtcactggctggttctgccggacacccggtgcccgggttcgtcgccaccgccgttaccggcagacggcagagcgggtcctgacccgactgccgcaactggtctcagacggcgcccggctgaactacctgcgcagaatcaacccgtacgtgtttgaggaactgttgttgctggccctggaaaaacagggcctgaaagttatccgtaacccgtcatacagcggggacggtggacttgatggtcaggtgctgattgccggtgaaaggtggtttattcaggccaaacgctacagccggagcatttcaccgcagcatatccgggattttggtgaactgcttgcccgtgaaaattgttgcggtttttttatccacaccggacggacggggcgtaaaagccgtgatggtctgcagacgtacccgcaggtacggctcgtcagcggacagcggctgctgcacctgctggcagggcgtgcggactggtatccgcataaaacaaatggagaatacataaatgtccatgaccgttgttccttttga

SEQ ID NO: 378851 - DNA, 1314 bp, Salmonella enterica
atgtccatgaccgttgttccttttgattatacgctgcccgcccggtaccgggacagggtgactcactaccttgagcacctggtatcgggggacgactgtaatgatgtgttctcccccgtaccgtataacctgcccccggtgttcagcgctgacctgctgaaggggctccggcaggcaggagacgccctgctgaaggtaccgttcatgccggtgatggtggaggtgagtacgggggtgaaaatgctgctggactcagaactcttttttctgattttcgggccggaggtgctttacggctcagccggtctttccccggaacagaaggaaaaacatcatatcctgctgaagctgcgcttcccgggagaggatgataagtcgacagcggaacattccccggagggcatggcaacggccagtcttaaccggcatctcgcgggctggtgtgcctttcaggaatcggtgatgcagaaaaaggccggcaatctggcccgcgggcggctgctgtctcaggtgctgaaatggcaacagcagcggcgtgattttccggagacagtctggggcgccatgatgctgcagatgctgccgccggatgagagaatgccggagcagttgttccccctgatggtccccgaactgatgcggctttttcgtgacggccttaagctggtgactgaaggtgaaatggcgctgtttcggggatgcagtctgaaaaccctccgtgaatatccgctgctgcgggcgctgacggacggcatcctggctgatgatgccgggacgctgatgcagtaccgctcagcgtggctggacgccgcgccggcatggctgcgcgacataatgccgacagtccacacgccggcgccttctgttgaaaccgaccacaccgaactgctggcgctggcgtttgatgattttcatgcgctggtacacgccacggcgtatgaacatgccgtcagtactcttgaagacgatggcagtgacctgctgtcagttcccctgagcgctgaagacgcggtgcgccaggggaaggttatcagaatgaaaaatgccggaaccccgcagatggtactgccggagcacaatccggcggtacctcaggggctgatgcttccctgccctgagatggagcggatgcattttgtcatgagggataaccatcacacctttctgttatcgctggagaatattctgctttgcctgcgtgaggcagaaaaacagggtgaggttccgcagattgatgaggcgtggtgggacgcgctgtcgtggagttaccccgatattctgtcggtggacggcagggatactgaccctttgtaa

SEQ ID NO: 378852 - DNA, 189 bp, Salmonella enterica
atggtcataaaagaaacaatgcaggacgattcacaacagaaagcgttgcctgatgtgacgaacagtgacggggaatgttcatcaggtccggaggctctcgccggtacagataaaagcgaatggccgtcggtcacgcagggccacgtccttacgttcctggtggtcaggtctgaccgggaggacacctga

SEQ ID NO: 378853 - DNA, 2205 bp, Salmonella enterica
atgagcgaccgctatgtgatggaggccctgttgcgtcctgcggtggagctcaataccgccgtggcagcaggctgcgcggcatttgtctgcgtcagcgcaccatgggtggtggcgctggcaccatcagtcagttatatgacagcaggagggtttgcggccctggccgcggtacgtacccgccagggactgaagatactgcgctaccgccgtaacctgaagcgtcttccccggtatgtgatgaccagccgtcaggtaccggtcagccgctaccgcctttttctggggaaaggctttgcctgggagcagaaacatctccagcgcctgctggagacccgccggcctgaagtgcaggcgtttctgcttccctccctgccataccgtctggcccggcgaacggaacgctggtcagagtaccgcctgccctggctgagccgcatactgcgtaccgacaccccgtttaatcccgtccgtccgctgccgccggcaggcggcaacccggcgatacacggcgtggagcctgatgaagagacggtcagcatggacctgggggagcgggtgggtcatatgctggttctgggaaccacccgcgtgggcaaaacccggctggctgagctgctgataacccaggacatccggcgcgggaataccgtggtggtgattgacccgaaaggcgacgccgacctgctgagaagggtatgggcggaagctcaccggaccgggcggcagaacgaactgttcgtgttccacctgggctggcctgaaatcagcgcccgttacaacggtatcggtcgttttggccggacgtctgaagtgccgggtcgtctggcaaaccagctcagcggagaaggcaacagtgccgcgtttcgtgagtttgcctggcgggtggtgaatattatcgcccaggcactggttgccctgggagaacggccggactataacctggttcgccgttacgtcatgaacatcacggggctttatgagcgttatgttgaatggtacctgagggagaaagctcctcatctgctggcggtggttgaccagcaggtggcactgttaagccaggtgaaccagagcaaggggatacccgaccacattctgcgccgggcggccatcacgcaggtactggagagcccggaaggccaggctctggaggataccgttctggagagtctgagcaacgcggttcgctacgaccagaagtacttcgataaaatagtggcttccctgctgccattgctggagaagctgaccagcggaaaaatggcttccctgctttcaccggactgccgggacatgaacgaccgccgtccgttgctggactggcagcaggttatccgtaacaaagggattgtgtatatcggtcttgatgcaatgtcggatgcggacgtggcgtcagccgtgggtaactccatgtttgccgacctggtgtcggtggccgggcatatctacaagtttggccatgaaggtgacctgccggcaccggcgggaaaagcgaaaaagccgtccatcagtctgcactgtgatgaatttaacgaactgatgggaccggaatttattccgatggtcaataaaggcggcggtgccgggattgaagtgacggcctacacccagacctggtctgatatcgaagcgcgtatcgggaatgcggcaaaggcggcccaggtgacgggtaacttcaacaccctcatcatgctgagggtgagggagaagatgacggcagagctgctgaccagccagttaccggaagtggatgtgtacaccaaaacgctggtctccggctttaccgatatctcaaatccggagcagggggcgcacttcacctcaaacactcaggacagggtgagcagtgtcaggatgccgctgatttcgactgcggagcttatcagcctgccgaagggacaggcattcgccctgctggaaggcggaaaattgtggaaaatcaggatgccgctgccgtcggatgcggatgatgtggtgatgccaccggacatggagacgatggtcaccacgatgcgccagggctatcggacgggagagtcctggtggccgccgataaccaccctgacggacccggtcacaccggtcagcgaaaatacatcgccagacccggtgcctctggttccgacagctgaagcggcagtacaaccgccggtgcctgatatcaccggggatacggaggcagaatccgaaggagacgatgagtaa

SEQ ID NO: 378854 - DNA, 744 bp, Salmonella enterica
atggcgaaggaagagtcccgcccacagcagaacacgtctccgccgaaaaagccgggcctgctgtggctgctgttatggcgtctgccgtggcatattgccggtatcctgtttgcttcattgcttctgagcctgctggttgagtacgcgggcctggtgctctggtggccggagcagggagcacagcatgccagaaccatgatggagacggagctgcggtttctgtcggcagattttacccgcagcctggtgatgtctcagccgtctgtgacggtgatgtcgtgggtgcgtgagggataccggtggctcgcggaaaacattatgccagccggcaccctgaataacggcaacagcggtaatctgttcacacagacggtggcggccagcggaacatggctggccgagcaactcagagtgtttctggaagcaacgctgtatatcacggtggtgtttgtggtgcgggtgagcattctgctgctgtcactgccgctgtttgtgatggcggcggcggtggcgatggtggaaggactgagcctgcgcgatctgcggcgatacggggcggggtatgagtcgagctttctgtaccatcacgcgcgggggctgataaagccatccctggtgtatccgtgtatggcgtacctgtcatggcctgcggcggcgtacccgaatgcgtttctgctgccgtcggcaatgttgtttggcatggtgctgacggtgcaggcgtcgaccttcaaaaaatatctatag

SEQ ID NO: 378855 - DNA, 141 bp, Salmonella enterica
atgctgcaaaaaccgtcttttaccatcacatttttaatggcggtggtactcataatctggatgttgcacggatcgttatgtgaagtgcacatgagtttatggggtgcggagtttgcggctttcttacagtgtaaacagtag

SEQ ID NO: 378856 - DNA, 726 bp, Salmonella enterica
atgccagtcattaatgatggtgatgtgtttaaatatatataccggactcttcagagtaagctggtccatgtacagtacacggcagagaaggcctcccggttacgaagcaaaatgtcctgtgccgcatctgagaaccagcggatggcggaggggatgtctgagtttgttaaccggatctattccttacggggacggataaaaacaaagagccgctcactgccggtgcgtgaaaaaaggtatgcaaaactggtggttaatctgcttgatgacctgatggcgcatacgacggatatgcaggactcggtgtcccgttcggcagggctgatggacatgtctgccagcagcctgcagctgacggtgctcaaggccgtacattatcagtggcgtgagcgggtatacatgtcggtactgaacaaaagtaacaccattccggcagaagatgagcatcattgcctgctggggcgctggtatgacggtgaggggcgggaaaagtttggaacgctgtctgcttatatccggctcggtgaagtgcatcgtaaattgcatcaggccgcggcggaactggcgaaagaggatatgacacaccccggacaggaacggatcctgaagaaactggaggtatttgaatcggtaagtctggcggtgattgcagcgctggacgcgctggatgacactatcgttaatcccggtaaagtggacaggccacccgtttcccgcagcgaatga

SEQ ID NO: 378857 - DNA, 315 bp, Salmonella enterica
atgtcccgtcgttacttactcactccggttaccttgctggcgatgtcggcactctcagcttttgcatctgaaaaggatgaactggccctggtgatgcgccagcttgatcagcttcaggcgtcccttgaccgcgcgaagaccctcagcgcacaggcgtcaggggacggtcgtttttattttgattatccccgcgccaccggagatatccgggcgatgaagcaggggatttcacagtatctcgacccgtcccgcgcccagccccgcctgccggaaggggatgcggtcagcgggcagtaccgccgggagcgcccgtga

SEQ ID NO: 378858 - DNA, 237 bp, Salmonella enterica
gtgaacagcgcacagcgtacggcctttatcgccggctccggcgggctgaacccggcagatatcaaacatctggtggtggcgctttttttcgcgctgctgtttctgctggccgcctggatgatacggaccgtgtatgtcggctggtcgaatcaggacgtgaaggcgggggcggccggcatgtttgtggtgcgcctgattattctgcttgagctggcgatgctcttttacagctattaa

SEQ ID NO: 378859 - DNA, 339 bp, Salmonella enterica
atgagactgattacccgtctgcgtggtgttgccacgttatgcaccggcctcttctggtccctggccgtccgggcggatttgcccaaaatcaccggcgggggaaattccaccgacgtgatggaggacgtcaagagtatgagccgcaacggggtggcttatgcggcgctggttatctgcgccctcgctttcattgtggtggtcatctcctgtgtcggtacctatcacaagattggggacggcaaggccagctggtttgactttggcgtccgcgtggtagtgggcgccattatgattgtgctggccatctacttcctcaacaaggccgtgacggtcatctga

SEQ ID NO: 378860 - DNA, 381 bp, Salmonella enterica
atggcagcgattgattttattcctgaccggctgaatgtccgtccggtggtgtggcgggggtttaccgtcggggaactgggcgtggcggcgctgtgcggggcctgtccgggactggtaatggcggtgtttgtggcaccgttcgcgggctggattgcctttcccatgctggtcatcctgatgcccctgccggtggtctggctcagcggcggctggctgacgcgttataaacgcaacaagccggacaattacctctggcagcacgtcacgctgcagcttgcccgggtgaccggcagtacggaaggcagctgccgttatggcgggtatcgtttcttcacggactgcccctgccgggaactccggcgtaccgggaggaggcgctga

SEQ ID NO: 378861 - DNA, 657 bp, Salmonella enterica
atgagccgctttcgtaacgcgttgtccgaacgcgacagccatattctgacacttcgcattgcctgtggcgtactgggtattctggcggtgttctcaatggcgggctggatgctgacgccccgggacctgaccgtgcatgtgccgccggacctgcgttccggcagtacgcagaaatggtgggaggttcctgaccctaccgtctacagcttcggcttttacatctttcagcagcttaacgcctggccgaaaaatggtgacgcggactatccggccaggattgcacagatgagtccttacctgacgccgggctgccaggattttctcaacagggatgtgaagctgcgccgtgcgcatgatgaactcagggacagggttcgcatggtgtatgaaatcccgatgcaggggtacaacggcaacagcgtgcgggaaaacagccgtgacagctgggtagtgaacctggacctggtggcggatgagtactatcacgcggtgctggtcaagcgcgccctgacccgctatccgctgcgggtagtgaagtgggaaggtgacccggaacgaaacccgttcgggctggcgctggactgttatgccggcaccccgcagcgactgcaggtgtcggggctgagcgagatgggtaacacggggagtcgcgaatga

SEQ ID NO: 378862 - DNA, 906 bp, Salmonella enterica
atgaaacgcggtcgcagccttttaatgttgttactggcgggcatgttgtgcagtccgctcagtcacgcggtggagctgatgaagtgggagcgcatcccgctgcaggtaccgctgacggtgggccaggagcggatagtctttgtggacaaaaacgtgaaagtgggatttccggcgtcgctggacggaaagctgcgtatccagagcagcggcggggcggtatatctcgatgcgcgcgcggttttcccggcgacccgtctggtactgaaggatgtggaaagcggggagatggtgctgattgacgtcagcgctactgacggcaaaacggtccgggagccggtgcagattgtgtaccacgggacggtggagagcgccacccgggccggtcaggctgacgggagcagcgcagttgcttcagacgcagggcgcaatggtggcaggcgtgaactggcgccagccccggcctcccgtccggccccgaaactgaacggtccgctgccggtggtgctgacccgctatgcggcccagacgttgtatgccccgctgcgtacggtggaatccctgccgggtgttcatccccttccgcttcatctgccgtcacacatcaccacgctgtatccgtctgaacccgttgatatccggccgctgaccgcctgggggcggggagagtacagcgtggtggcgctgaaggtgagtaacaccggcagcggaaaggtggtgacggacccgcgtgcgcttaccggacggtttgtggcggcgaccttccagcaccggtggctgggaccggccgggcaaccggaggacaccaccaccctgtacctggtgatgcaggggaggccggaggcggcgtttattgcagagcccgcggtggcaacatctgcgaccactgggaagggaggtaagcgctga

SEQ ID NO: 378863 - DNA, 1479 bp, Salmonella enterica
atggccaccctgaaatcaaacgccctggtgaaggttcttgtcccggcagtcctgctgggcgcagccggtatcggcatgcgggcctgcacgtccggtaccccggagaaggcagcgacacagcaggttaccctgccgcagctgaccccggagcagttacgcgagctgggaatagaaggcgacacgccgcaggataccctgaacaccctggtgggcaaactgggcgaggttcagcgccagcagggcgacattatgaaggagaaccgggagctgaaggaggagaaccggaagctgcaggccggcaacggccaggtggaccagcgtattgcggacgcggtatctgatgcagaagaccggacacagaaggcgctggcgcagcagaaaaccacgctgacggaccagtttaacgccatgctggccgggctggcaccgggcggtgcatcttcatccacaaccacggctcagacgggcggcgatatccctgtgggactggggctggagcccggtttctccggtggcggggatgcagacggtttccgctggctcgacccgcaggatggggtaccggcagagcagcagggagggcagggacagacacctcattttgccacttcattcctggaggacaaccccatcacccgtgagaaaaatgcgctggagcggaacgcgaaccaccggcaggggctggataacggccaggacgacggaccggtcgacccggtgtacactctgccggagaattcaaccctggtggggagtcgcgcgatgacggcgctgctgggacgggtgccggtcaacaataaagtgactgacccctatccatttaaggtgatgattggccgggacaacctggcggccaacgggattgagctgccggaggtggagggtgccattgtgtcgggtacggcgagcggagactggacgctgtcgtgcgttcgcggcagcgtcacgtccatcacgtttgtgtttaccgacggtacggtcagaaccctgccagccccgtcggacaggaccgacaacagcagcagtgaaaacggcggcgggaccgggaacggcggcagtattggctggctgtcagataacagcggcattccgtgcatcagcggagagcgtaagtccaacgcggccttatacctgccgactatcggcctgctggcgctgggaacctcggcgggtgacgcgctgacggcccgccagtacacgaacaacaccaccgacagcgggggtatcacgtcggcgctgaccggaaatgccgggcaggcggtgctgggccaggcgctggggggcggctttaaggaagtggcgcagtgggtgaaggagcgctacgggcagacctttgatgcggtgtacgtcccgcccggggctccggtggcggtacatatcacacgccagctgaatattgactatgccgaaaaagggcgccgggtgaaatacgacttcacgctgccgggcagcgatgctgacggtggagggctggattag

SEQ ID NO: 378864 - DNA, 411 bp, Salmonella enterica
atggtgaaactgattaaaggatatctgccggcgatggcgctggcaatgctgctgtcagcgtgcagcagcagtaaggaggcaatactgccggccggggacagcacgatgctggatttatggcagcaccggtcgggcagcgcacaacaaggaacgcaggcccgggaagccctgcgccggccactgacggggccggaacggcagggtgaccgtacgcaggcggagagctacagccgcacgcaggaaagcgaactcagccagcagtttcctcggctgccgaaccccgacatggtgatgtacgtgttcccgcatctggccgacggtagcgcgccggtgccggggtacagcacggtctttcctttctatacccatacgcagtatgccctgccgggcgaacggacggaggcgctgtag

SEQ ID NO: 378865 - DNA, 2826 bp, Salmonella enterica
atgttcagtcttttttccgggaaacggacgaaacccgaacctgccgtgccccatccgtcagggcgtgagccgctgaagcgggagggaaaactgacccgccgcgacgaggctaaaatctatgcgcacggcccgtcatttattgatttcctgccctgggtggaatacctgccggaagatgaatgtctgctgctcgatgacggggtgtcggtcggcgcggtgttcagcctgaccccggcacagacggacggtcgttctgcggagcgtctggaagaaatccgcgacatcgcggaagtggcgctgcagaacgggccggaagagcgcagcagtcaccagtgggtggtacagttcttctgccaggatgaaacggacctgacggcggagatggaccacatcaggggctatgtcagtccggctgcacagggcagcgcgtttacggaggcctggcttgcggagacggcgcgtcacctgcaggttatcagccgcccggccgggttgtttcaggacgaggtggtgacaggcgtcagctggcgcggccagttacgacagatacggatggtggtgtaccgctacgtgaacccgcggcagcgggaaacatacccgccagtggttcagcttcgccagacctgcgaccggctgtcggcagcactgagtcaggccggcgtggtatgccgccggcagaacggggaacaaatccacgcctggctgctgcggctgtttaaccctgccccgtcgtggattgaccgccagacgctgtacaggacggccagatggcgtgacagccgccaggatacactgccggtggacacggatttcagcgaatcgctgtttttcacccgtccgcgcagtgacgcgaagaagggtatatggtggtttgatgatgtgctgcaccgtgcagtgtcggtggaaaatctgacggagccgcccggaccgggacacctgacggcagagcgggtacgcggggagcgtattaacgcgctgatggacatgatgccgccgggtacggtggcctgcctgaccctgcaggtacagccgcagaatgagctggaagaggaatttgcccggctgggtaaacgggctctcggggataatgtggagtctgagcgtacccgagaccaggtggaggaagcccggtcctggctgaaggagaaacacaagctgtaccgcggtgcgctgaccttcctgctgaaggctccggacatgaagacgctggacaaccatcatctgtcgctgagtaccaccctgatgaacgccgggctgaagccgctgaatccggaatatgacctctcgccgctgaacacctatctgcgcgccctgccgatgtgctttaacccggacctggaccgtaaccggtggtacacgtggctgacatttgtacagcattttgccggtctggcaccggtgtacgggcgttcaacggggacgggaaatcccggcatcagctttttcaaccgcggcggtgagccgctgcactttgacccgctgaaggaccgtaaaaacagtgcgcacctgctgctgtttggtccgaccggtgccggaaagtcggcgacgctctgtgtggcgctgagccagatgctggccatgcaccgtgcccggctggttctggtggagtcagggaactcgttcggtctgctggctgactactgccggagcctggggctgacggtgaataaggtgggtatttatcccggcagcggggtgagcctgccggtgtttgcagattctcacctgatactgacgctgccaccggaacaactggtgctggatgagaatcagctgccggagctgaatgaggatactccggatgaaccggataaaaatggcgcgccgggcggtgacaaacgtgatgtgctgggtgagatggagattgccgccatcctgatgataacggggggtgaaaaggacgaaaagctgagccgggctgaccgggggctgctgcgccgggcgctggtgatgacggcgcagcgggtgttcgaagaaaaacggcagatgctgccgtctgatttgaaagcgacgatggagtcgatcgccacggatatgtcagaaaaacccgggggcggtccccgctggcacgcgaaaatgcagtcgcgggcatcggagatggcgctgtcactggagctgctgacggaaggaacggagggcgagctgtttaaccgggaaggggaagcctggccggaagccgacgtgacggtggtagacctggggcacctttcccgggaagggtacgagtcccagatggccctggcggtgatatcgctggccggcagggtgaactatatcggtgaacgtgaccagtaccataacagggccggtctcttcgtgattgatgaagggcatgtggtcacgacgaacccgctggttgccccgtattttgccaaaatctcgaagatgtggcgaaagctgggatggtggctgtggctgggaacgcagaacctgaaggactacccgaatgagtcagaaaagatgctgaatatggcggagtggtgggtgtgcctgacgatgcccccggatgagatagagcagatagcacgttttcgcagcctgacggaggagcagaagcagatgctggcgtcggcgaaaaaggggcagaaagtgaacggcattccctgctacacggagggggtggtgatgggcagtaccctgaacgcactgttccgctcggtgccaccgagcctgtacctggcgctggggatgacagaaaaggatgaaaaggcgcagcgatatgaactgatgcaggcgcatggctgcacggaactggaggcggcctttatggtggcacgggagctggacagaagacgcggaacgggggcgatgaatggtgaggcttag

SEQ ID NO: 378866 - DNA, 381 bp, Salmonella enterica
atggtgaggcttagatattccaccgcggaagtggctgagacgggagcggaggggctgctgtttgacagcctgccgcagtcggcgccggtgacggggcgcgcgcaggcgatattgctgcagcaactgataaaccagctcaggtccaggctgtccgggccggtgaacatcgtctgccacccacaccgtattggtcatcgtggcagcgtggcgatgacactggaggggacgacgggccgggttgacctgctcatcacggtgaacggcaggacgctgttcccggaagagggggattacagcgcgccacgctggtacatcgatgtggtggatatggtggatgcggtgtacctgatgttgaccctgaatgccggactgatggcataa

SEQ ID NO: 378867 - DNA, 582 bp, Salmonella enterica
atgcgtaacagtaaattaatattagccgcggcaaccgccagtatgatgtatggtgcttctgtatatgcagaaacaccgtcagcaggtccgtttggctccggtcaaattaccttcaccggcaccatcactaattcaccctgtgatattgcaaccggaagtgaggcaattaacgttccactgggacaggtatctgaccgccattttaaagctgatagcgacacatcagattcaaaaccgttccagattagcctgcgaaattgttcttttgatcttgaaactccatcagatgccaaatctaagcttttactttccaaagtagcggtatccttcgcgagcacgtcatcatacgacaccgctaaacatgctgttgttaaccctgtgggtgctaaaaatatcggcgttcagttgcttgaaagtgataactccacggttatcgatttcactaagccagataccctaggtaaacaactcgtccccgggaataacgatttgagcttctatgcccgcctgattgccctgagccctggcgtcactcctggtgatgtcaacgtatccgtcacctacaagctgaaatacctgtga

SEQ ID NO: 378868 - DNA, 546 bp, Salmonella enterica
atgaataatcttatccttaagaccgagcatggacaccatatcggttgtcacacagatgacggccgcatcgcgtccggcagccggtacaaccctgaccggatactgttcacgcaccagctggtcattgagccagatgtcgagaatatagttaccgggcgccacatacccctcgcggctgaaggccgtgaggtccacgttggacaggttcccgctgtccagcaggctggcattgaactccgtggcctgggacttcagcacagagaatgtcagggtaatcagaatggcaagccgggtaattttcatggcaagtcgctttttgttgtcgtccgtgttacagaccgtccgcaggcgtggtcagatataaaagccgtccgtaccctccatggacggcttctccctggtattatttacagcgtgaaatcacaggtatttcagcttgtaggtgacggatacgttgacatcaccaggagtgacgccagggctcagggcaatcaggcgggcatagaagctcaaatcgttattcccggggacgagttgtttacctag

SEQ ID NO: 378869 - DNA, 1029 bp, Salmonella enterica
atgggaagaaaacgaaaaaacccgatccatatgccccttccccctcgtgtttaccccaataaatacagctacgtatggaaaccgacttcaaaagaatccgttactctaacgcgaatagatgagggaatacccaggctatggcaaaaatatgaagaggaggttaatcagcgtcatcactcagtgacatttgaaaaactatggcgcaagtttatggcaagtgcttatttcactgaactaaaaccaagaactcaaaaagattaccttcaacatgaaaaaaaactgatatccgtattcggccatgttctcgctgataatattcgccctgaacatgtacgaacatttatggataaaagaggattgcaaagtaaaacacaggctaatcatgagatgagtagtatgtcacgcgcattcagatggggatatgaacgtggaatggtgaaacgcaatccatgtcatggtatcagcagattcaaatcagaagctcgtgataagtatattactgataaagaatatgaggcaatttataacaacgctgatgatgttgtcagagtagcaatggaaatagcatatctgtgtgctgcccgtctttcagacgtactcggtatgcaatggaggcaggtaacgaaagaaggggtgtttattcagcaggggaaaaatagcgttaagcagataaaacaatggacagaaagactacatcacgctttcgaacttgcaaaaactttctctaatccgggaaatccggcttcatttgtcattatcggaacgcatggtagtggcttcagcaaacgaggttttagccaccgatgggaagatgcaagacacaaagcatcagtagcgctgggctatgatatcaactgcacattccatgatcttaaagcgaaaggcatttctgattatgaaggaagcagtcgcgacaagcagttgttcagtggacacaaaactgaaagccaagtgcttatttatgacagaaaaacgaaaatttctccatctcttgatcgaccaccgataaaggaaagatattccaagtga

SEQ ID NO: 378870 - DNA, 207 bp, Salmonella enterica
atgagtgaattattccttactcaccgggagttggaggatttaactggttatcgttatgccagccaacaacgaggatggttattaaaagaaggaattccatttcgaacaaacagaatgggacatccaaaagttaacagatatctgttcacctccccttccaaagatattactgatcatactgaggaacctgattttggagcaatctga

SEQ ID NO: 378871 - DNA, 567 bp, Salmonella enterica
atggatgaactgatacaacctgtaaaatccccctttgccagtaacaccgttcccgccgataaaaacaactggatgacaccaccggaaatctttgcagcactggacgcagaatttggtttttatcttgatgctgctgcaactttcgaaagtactctttgcccgtactggctgtcatatcaggacaatgccctttcatgtgactggcaaagctatggcgctgtctggtgcaatcccccctatgacaatcctttaccgtgggtacagaaggcggcggaacaatgcccgatacaaaaacagcctgtcgtgatgttactcccctccgatacgtccactgcgtggtttaactacgggcgtgaaaccgcagatgaaatccggtttataacaggtggtcgcctgtcattcatccatcccgtaacacgcaagcctggcaagaatggtaacagcaaagggtcggtattctttatctggcgaccgtggatagctccacgccgcatagtgacctttactgaccgtgacaatcttataaatgatggccgcgaattactcagtgaagtgatggtggcgtaa

SEQ ID NO: 378872 - DNA, 720 bp, Salmonella enterica
atgaacatcgacaaacgtgcgctgcgtgaagtggcggagaaggcgacaaaaggcccctggaaggtattttctgatatcgatactaaaactttttccatccacaccccgcgagataagcgctgtgagaacgttattaagtggggtgggtttgattgtcaaccgaatgctgaggccaacgctgaatttattgctgcatttaacccgaaagtcgcgctggcgctgctggatgagaatattcaactccagcgggaaaaagacgcaatagaggccgtggcgctggcgctgcgtgatgatatgcgacaggcgcgggagcaactggcagcgcttaccgctgaacctgtaagccaaacttacgagttgccagaattaatcgaaggcatggaagtatcggtagacgtcagtacctgcgattttgatgctggtcatcgctatttcggtactgtcaccgaggtatcagaactggacacagccaagaatggctgcatccttctggttcaggatgcaaagccaaatttcgatgtgaatggcaactctccggtaactccggatggttacgcacttgtacccgtcgaaccaactgacgaaatgatagcggcagcgatggaatgtgatgatgtggttttcgacagtaaagatccaaccgcattctgtgttcagtatcgggaaatatattgcgcgatggtggatgccgcaccagaaccggagactatgaatggatga

SEQ ID NO: 378873 - DNA, 243 bp, Salmonella enterica
atgaagaaaaaataccgtgactgccacctctactatcaggtggcacgtgaagctgtacaacttgaaaaggacggcgaatacgaccgggctgctaaggtctggatgaaagccgctggtgagtcaataaacagggtcaatgaagagtgggccataatgagaacaaacttctgtcatacgcaaattacacgggaaaaattcagaaaagaatttgaaagtagaaaaaatcaaggcggtgcggtatga

SEQ ID NO: 378874 - DNA, 306 bp, Salmonella enterica
atgaatctgactctacgtgatgtaaaggaaattaaggatattatttccgggcttgatgaaaaggataaggagtgtatttataaggaaactgacaggttaataaaatcgaatcctcttcctgattatattcgcacatttaaacctgatgaatttacaaacgatgcagtaacctttcttgaaaattacgatgtggattatcaggatgattccgctaccagattctgggatgaaatatacaagagaataactgttgaatacgctctcgatgttttcagacgccgatatacttataatgaggttgcataa

SEQ ID NO: 378875 - DNA, 822 bp, Salmonella enterica
atgtctcagttagacaataccgcaattcaggaaatcgttaaccttactaatgctgctttctatccagatccgattaaacatactgactgcccggctgttctggtgccatccggtatgaaagcttatgatctggaaaatttcatggtgaaccgttatcgcttccggggcaacatggacaccacatgtatcaatgacttcgcgaaatacagtaaaggttatgcgggtgaaggcgttcgctgtttcattgatgccgatgaaatgcgagcaacgaccgtattcaatatcggtacgctggcagcgccgggacatgctgataaccgcgcccatctgcaactgaagaaaacttctcccttccgttccctgcttgaagccaacggtactaaatatcgtcagaaagcgatggctgaatggattgaggactggaacgacttccttaaggcttatgatgccgaaggtaagccgatggatatcaaacaagccgctggtgctgtacgtcggcttaccattgaggccaaacgtaacgctgattacgaagaccaggacatgagcgccagtcgttcagttatggagtccgtagaggcgaaaagcaaaaacgttcttccttcatactttgagtttgagtgtatcccgtatgaggggttgactaaccgtacattccgcctgcgtttcagtatcctgaccagcgatgaacccattcttgtcgttcgtgtcattcaactggaaaccgccgaagaggaaatggcaaaagagtttcgcgatttactcgtcgggaaattcgaaggccagcagattgaaaccttcatcggcagcttctgcgcttaa

SEQ ID NO: 378876 - DNA, 357 bp, Salmonella enterica
atgaaccagtcacaaactaatgtaaacaatttcattaatgatcttgatggcggtgtattcgttaataaagttggagccgtattaagtgaagttgccctcggcgttaacagcaccaataaaaaagggaaagttattattgaaatggaaatatcttcacttgatgaaaaccgtgtcagtattgcccacaaactgaaatttaaccgccctacaatgcgtggcagtaagtcagaagaagacaccaccaacacaccgatgtatgtcaacaaaggtggtgaattaaccctgttccagaaaaatcagggacagctactcgatattaacggtcagcctgatggcaaattaaaaaccgtaaactaa

SEQ ID NO: 378877 - DNA, 1089 bp, Salmonella enterica
atgaaaacgttcctgaaaaaggcagaacgtaaacaagcgtatgccaaagttggtatatacggtgatgctggttcagggaaaacccgtacagcaacagaaatagctattggtctgtggcaaaaatatgaccttaaaaagcccgttgccatgtttgatactgaacccgcagcatcttatatcatgccattctttgaaaacgccgggatagatttctatgtctacgacgaaagtcgtgcgcttaaagatctgatggggttctggcgagaggctgaaaaagaatgctcaataattatcgtggactctattacccatatatggaaagactgtcaggattcgtttctgaaacaactgaacgacagcaggaagcgtaacaatccaaacgcccgctccgtctggcagcttgagtttcatcactggaaacccataaaagcacaatgggccaacttcaccgatttatttctttcatcaaaaattcacgccattgtatgcggccgagcgggttctatttacgagtaccagaaaaacgatgaaaacgggaagatggaacttatcaccagtggtacaaagatggctacagagaaagagatgggctatgaaccatcccttcttattgagatggtaaaacatcgcgaaaacggtcgtattattaaccgggcattagtcgaaaaagaccggactgatcggttaaacggtaaagagtttgactttcctaatttcgaaactttcgcacctcattttgattttctgaatatcggcggtaagcactttgactcaatggaaaaaagtgacagtcgctcattatttgttaatgacatatccgatgatggtttccagcatgagaaaaaacaacgggagatcatgtgtgaggaaataaaggggttgtttgtaaaaattggtcttgatggtaatggagtggataccaagaaggaacgacttgaacttcttgaagaggtatttggaacaagaagctggacggcggtagaaagcatgaacagcaaatcacttcgggaaggtttcgcaaaaataaaaaccagatacgaagataaacacgtaaagcaggagaaagaaaatgaaccagtcacaaactaa

SEQ ID NO: 378878 - DNA, 381 bp, Salmonella enterica
atgaaagatatcaatattgtaaaatctaatgtaaaagtttacacctgtggcgataaattctcagagctattctgtaatgaaaaatcatgtggttacattgtgaaaattaatgataaccgctatcacacaataaccagtgatggtgaacaatggaaaattttcagtgatatggatcgcgccattaaagagttaattatccagtatcttaaaaagacgggagaactaaaagatacaccagaccttaccatcacttcagaagataaagaaaaactgacctcagcgcttaaagggttatttgaaagcctctttggtgaatgtgattgtcctgaatgtactgaaaaacgcgaacagggaaagaaacaacacgatactgtacattaa

SEQ ID NO: 378879 - DNA, 144 bp, Salmonella enterica
atggactggttaaaaataatgcaacatcgctatcgccttacgggtagcgatttcagtaataaccgaaaaagcgaactacggttagcctgtattctgttactcgcttatgtttccttcctgatttataccggagtatacaaatga

SEQ ID NO: 378880 - DNA, 360 bp, Salmonella enterica
atgaatctgtcagaactgttaaatgaagccagcaaagaaatgaatcgccggaataatgagaaaaaggccagtattgaagagattaaagacttcatcactcgcctgaaccagaaaccagaacgtccgtttaaatacggtgatattgtcacatggaaagacggaatgaaaaaccgcaggttcccggactatgatgaaaggggagttatcagtgaagtgctggatacaccgataccctgcccggatgatacaggatctcaatattacatggaaccgcaggatgtcaaagtcgtggtattcagggatggtgaattctgtgaatacatgttcgactcccgtcgtctgcgccatgctgataactaa

SEQ ID NO: 378881 - DNA, 183 bp, Salmonella enterica
atgttaaagagcatcattgaaaaagtgctgggcgaaatcagcggcgaattttcgcatgttatcgttcgtcaggttacgcccattgcccttccctcagtattatttactgaacacgttgtcgtatggtccttattactggtcgtggtgtcctttgtcatagagaaaatctttggcattgactga

SEQ ID NO: 378882 - DNA, 183 bp, Salmonella enterica
atggaaaagaaaactaaagagctggtaatcggtgacatggttaaaaacatcctgaacggcaagtactacccgatggaaaccgtagagcgttcaggcgctggctatatcgtgaagttgacccccgccagtctgaacggaaacagctattacgctgagtacaccacccgccatacggtgatgtga

SEQ ID NO: 378883 - DNA, 360 bp, Salmonella enterica
atgaaggttaatatgagcaaaatcgctgaaaaacaggcagtcgcgacaatcgatgctaccgatgaagcatgggaaagtggtgagctgggccgtagcgaagctcacgtaagagtctcaaccacttttaatgaaaacgaaattaatgacgctctggaactgcacccaatctcaataagacttaataaatctcttattgaggatctaaaaatgattgcggagcttaacggtctgggctaccagccattgattagacaagttctaactcgctttgccgattgcgagaagaaacagatactgcaagagttccactctcaggaaatgaaaaagcagcggaagaagaaatcacctaaagcagcctga

SEQ ID NO: 378884 - DNA, 720 bp, Salmonella enterica
atgagtaagaaaagtattgttacagaaaaagacatccagatagctgaacgcctacgcaagatctgggatgcaaaacgagcacagctttcgatgagtcaggagaaagctgcggaaattcttggtttcaaaacacagggggcagtaagtcagtttcttaatgcaaaagttccactaaatacagaaaatacattgaaatttgccgcattactggaggttccggcagaagatataaatcccggattagctgaactgttgcgtagtgtaaggctgcatagtccagactatcatcagcacatccataataatttttataagtatcctctctttacaacagttcaggctggagcattcacggctaacgactattcgtatacagaacgtgatgccatcaaatggattgccacaaccaccaaagctagcgataaggctttctggcttgaggtaaagggtcactcaatgacggctccgcaaggaggacgccccagctttccggaagggatgattatccttatcgatcccgaagaaaaagtagagccagatgatttttgtgtggcccgtatgggtggggatgaattcacatttaaacaattgatcatggaaggcggagagaaatatttacgtcctctaaatccacaatatcctctactgaaagtcaacgaaagctatcagacagtcggtaaggtcatcaagtcacagtggccggacgaaacttttgagtaa

SEQ ID NO: 378885 - DNA, 240 bp, Salmonella enterica
atgaaacttagtgagtacctgaggctcaacgggataaggcaaagtacttttgctgcaaccgttggcgtgactcagggatttataagttcggttattaagggacggtatgttcctaaaggtcggaaggccattgaatggtcggaagcaacggaatgggctgttactccccatgaacttaacccgcatgactatccaaatgaatatgacgggttgccggatcgaactcataaagccgcctga

SEQ ID NO: 378886 - DNA, 285 bp, Salmonella enterica
gtgtacagacatcagcagatcaggacggtgatgccggagcattaccttcctgacgatgaaaactggatacaggagcaactgttacaactggacccgaccacgcgggtaaaaatagcgatgaagtacgccgaggtgtacagggaaacgtgggacaaggaaccagtaccgttcaggaaggacaacagggcacgacggagcgccaatacccggttacgggtgtacgtccagaagtacgcgagagccagcagaggttacacgctcccgccagtagcggtacggaagtga

SEQ ID NO: 378887 - DNA, 369 bp, Salmonella enterica
atgagtgaaataaaaagtaatgcgatcgctcttcttgaacaccagttagtcacaggtgagttcagaggaatgctccagaatgaactggaagacaagctcaggggcaaaggttacgccgtacaacggaattacaccgttgacatgggtaacggcagaaagtggcgggttgactacatgatcaccgcctccaatggggatcagtgcgcgatcgaggtcgacagatgctctccccgtgaacgttccgtactaaagctttgcatgttacgcgatcagggtatccccggttttgttctgctgcgtgatggtaaaaagccaatgcgctacagcgttgatggcgttgacgtgatccgcgcaactccgttcaggtga

SEQ ID NO: 378888 - DNA, 1521 bp, Salmonella enterica
atgctgaatataacccccaacctggcacaggaaagaggcttacagcttctccggtggcagtggaagagcaaccgcacgtttctgatgtactcaccgactggatcggggaagactggtcttgctgcattcatggtggacggctatgtttcccgcggtatgcgggttatgttcgttgccccgtataccattctgcttaaccagaccgccgatcgctttacgcagtacggcttaccgtgggaagaaattagctttgtctggcgaaaccatcccaaccatgacccttcgcggctgatccagattgccagcgccgacacactgatccgccgtgagtttcccgacaatatcgaccttttgattgtcgatgaagcgcacatgaagcgccgggcattactggaagtgatcagggataaagatatcaaagtcgtgggactgtcaggcacaccgtttgcttcctggatggggaaatactacgagtgcctcattaagcccaccaccattggcgaattgattaaaaacggcgtactgagcggatatgagtttttcgccccgtcgacacctgatctgaaaggagttaaaaccaccaatacactgttcggtcgcgactataacgaagagcagatcgcggccattatgggtaacgccgaccttgtgggcgatattgtccgtaactggctggagaacggtaacaaccagccgacaatctgtttttgcgtcaacgtagctcatgcgaactttgtgacccgcgagtttatcaaagcggggatcggtgcggaaatcatgacggcggaaacgcctcacgaagagcgccaggatattattcgccgttttgaagatggcgtgacgaaggtcattgtcaacgtaggtgtactggtggcggggtttgacagtgatgtacgttgcatcatctacgcccgtcccacgaagtctgaaatacgctggttacagtgtcttgggcgtggattgcgtaccgcacccggcaaagagcgctgcatcatctttgatcattccggtacggttcaccgtctcggcttccccgaagacattgagtatgacgaactgcccggcaaaaatgacggtatgaaaaccagcggtggcggtcagcaggataaaaccgagaagttgccgaaagaatgcccgaaatgtcactacatgaagccagccggggtgtatgcctgccccaaatgtggttttaaaccacttggcggcgaggatgttgaaaccgatcgcaaccgtaagctgtcccgactgaccaaaggggtaaaggtctatagccgtgacgataaacagcgctggtggcgtgagatcaagggctatcagcagtatcgcgcatccatcggtaaaccgcttaaagatggctggtgcgctaacacctacagggagaagttcggtgtctggccgaagggtttcgataacacaccagccgaaccttcaactgaagtctataacttcatcaagtcgaagaatatcgccttttacaaaggtcgccagaaagctcagcgctcagggggaacgttatgttaa

SEQ ID NO: 378889 - DNA, 975 bp, Salmonella enterica
atgttaaccagagaagcagcgaccggacactggccgaaaattttcgagtattacggtcttccccctgtgacggggaaacggcacttcaaaggcaaatgcccgttgtgtggcggcgtgggtaagtttcgctgtgatgacaaagacggcaaggggacatgggtctgcgtctgtggttccggtgacgggatgagcctggtgttacaggccacaggaaagccgtttgtacaggtctgcgaagagatagacagcctgacgggtaactcgtacagccgccccgtaacagaaagaccgtcctcaaaaatcatgtcagatcgccagaaggtgatccgtaagttttcccggctgtctgaactgcggaagactagcggggaagcctacctgcaacgtcgcgggatacttgagcttccggatgaggggatcaggttctgtgataaacagacctgtaacggtcgtgaatatcaggcgttgtactcgctggcaaccgatgataaaggggcgctttgctatcttcaccgcacattgcttgacggggatcgcaaggcggatgtggttgccgccaaaaagctgatggcgttacaggagtcttcatacctggagtatgccgggtcggtggctatacgcatgtttccgccagccgccacgctgggaattgctgaggggatagaaacggcgctctcatgtcgtcagatataccgctgtaatgtctggtcagtgatgaacacgtcgttcatggagaagttcattgcacctcatggcgtgaaccatcttgttatttttgcagacaacgaccctcacggcgcgggactggcggcagcgtttaaatgcgggaagaacaatatcctgtcccgcaatgacgtggagaaggtcagtatccgctggcctgatttaccggactttaacgacatgctgatcgaaggatgcgaggtacgccagcatgttcttacccgtaagcagaaagtagcggaggcggcgtga

SEQ ID NO: 378890 - DNA, 450 bp, Salmonella enterica
atggaaattgagatgattaaatccgcaggcgggatcttcgttcctgtatttgagcatgatttgccccggctggaaaagtttaaaaacggcgaacactacacgcttgaagccaggcttacgcgtaatccggcatttcaccggaagatgtttgcattcctgaacttctgctttcagcactggaacgcagagcacgccgggtatgagtttaccgatgaagcaacgcagtttgatgaatttcgtaaaaatctcaccattctcgccgggttctatgaggtggtgacaaccatccggggggaagtgaaataccgggcgaaaagcatcagctacggcaacatggatcaggacgagtttgagcgctgctacaacgcgatggttaacgctgcgctcaaacatgtctttggcaataccagcgatccggcacttaacaatcgcctgctggcgtttttctga

SEQ ID NO: 378891 - DNA, 561 bp, Salmonella enterica
atgaaaccacgtaagccaaaggtgtgtaaggtctgcggcaatgagtttgtaccataccgctcatttcagaaggtctgtagcggtcagtgtgcgttagtgatggtcagaagagagcaggagaagaaaaaggctaaggcactggcagataaactgaagatgcgccgtcgccttgctcagccccgcagctactggataaatatggcccagaaagcggttaatgagtatatccgggagagggatcgttataaaccttgtgtctcctgcggaacttacacgacatcacagtgggatgcaggccattacagaacgacagcggcagcgccacaactacggtttgatgaacgtaatattcagaaacaatgcattcgttgtaatcagcacctcagcggcaatctggtcccttaccgtgttgagctgattaagcgtatcggtttggcgggagttgaagaactggagaataaccatttccgccacaagtggactgtcgaggaatgtatgttcatccgggatattttccggatcaaactcaaagagcttcgcaacagccgggaggcggcatga

SEQ ID NO: 378892 - DNA, 669 bp, Salmonella enterica
atgaattctgagtggatacgcgataatatccggttggcgctgggcttcatttatattaccggcaacggccagttgggggaccttgccagtcgcccggtcatcaccacctcacgttaccgcagtaatccgccgaggtatgtgattgtcgaaggccgtaaagtccggcgtcacgcgtatccgctgaacatcagccagactcagtctaagggaacatcgcatccgctgataaatgaatgtgactatcatcttgtaccgtggcgcagggcgataaacagtacaggggaaccgttccgatcatggattctctactgttacggggattatcgttaccatcgcgaacagcttaacgttgttcctcatatatgggagatgtttctctcacgccagtcggacagacgaatcagtgggaaagtgaaacaacggttacagtcgctggcatggctggctgtacaggttgttgccagtgaaatcaagggtgacgacagggagtacaactatgcggagcttggcggcatggttggcgtcactaagcaaaactggaatgaagtttacaaatgctactggcatgacatgttagatatttgttacaagctagacgccacatccctgtataaggtggattggcagcggagggaaatcagggctatgcaatcatgctttgcagtataa

SEQ ID NO: 378893 - DNA, 234 bp, Salmonella enterica
atgacaatggacagaattaccagtcatgcctcatatggcgtcccacttgctgtaacaaatatgaccgcaatttattccttcctggacaaatttagccacgacgagtggtatgccatcggtattgctacgggcgtattcttcgggcttatcagtctggcggcaaacatttatttccagcgtcagcgtaaccgtatcctggagcaacagaaaaatggcgctaaggacaaaagttaa

SEQ ID NO: 378894 - DNA, 465 bp, Salmonella enterica
atggcgctaaggacaaaagttaaagcccttctggctggcggcgcgagtgcaatagtgatagcggcagcgatgcttggtggtcacgacggtctggaaggcaggcgccacgaaccctatcgcgatgtggcaggcgtacttaccgtatgcgacgggcatacgggaaaagacattatccccggcaaacgctacaccgatgcggaatgtgatgcgctactgaataaagacctggcactggtcgcagcccgcattgatccactgattaaggtcagtatccccgaaagcgaaagggcggcgttctactcctttgcatacaacgttggtactggtgcatttgccaggtcaaccctgctgaaaaaactcaacgcgggtgatcaggccggagcctgcaacgagcttaaacgctggacgtatgggaccgattactggcgtttgacagcgggaccacaggtgcggcgcaacttgtga

SEQ ID NO: 378895 - DNA, 648 bp, Salmonella enterica
atggaaaaagcgctgctcaaaaatatggaaatgatccgcctgatgcagtccattgaagggctgacgctgcttgacaataaagatgagtttgacaccaccagctacacgttcagcggattatccgatgtgctgatccagttcggtcaacaggtctccggggcgctgggaatcccactggtcaggctgtttggtcagtctcccgccggattcagtactggcgacactgacctttccaattactacgacaacatcaatacacagcaggaacgtcgattacgtcgtccactgcgtcgcctgtttgatatcgtccatcgttccctgtttggtgaaccattaccggatgaattcgactttgaattcaacccgttatggcagatgtcggataccgaccgttccacagtggcaaataacactgtaacagccctgaacggtgccgtggatggaggacttatgccgcttcatgccgcgatgtccgatctgaaaaacacatcccgtgtaacggggattggtgggaacctgactgacgaggatattgaggatgcgaaagaccagcctccgccggacctccgggagtcagataatctcgacgaagatacgctcccgaagagcacagatggcttacggaagccagttgaggaaagtcgctaa

SEQ ID NO: 378896 - DNA, 708 bp, Salmonella enterica
atggcttacggaagccagttgaggaaagtcgctaaagccgttggcgatatcatttccggaacctatgacggctcttcatccagtgttgacacgataaaaaatacgctttcccgttatgcagatctgattacgccgtgggcgcagcgagcggctcaaagaatggctgaaacggttgcactcagcgagaaaaaacagtggatgcaactggcgcaacatacctccggcgagctacggctgctgatgaacaatactgccgttggacatactactgacagtattgttaatgaacaggtgaagttgattaagtcgcttccactggaggcagcaaaccgggtcgatacgattcatgccagggcggttgaagccatgctgaatggcgaacgaccgggacaatttgccagtgagattgcacgctcaggtgaagtggcaaaatcccgcgcgaatatgattgcccggacagaaatcgggcgttcacagacggcgctcactcaggccagagcactgaatctgggttctgaagggtacatctggcgtactgctgatgatggtgatgtacgtcattctcacgagttgatggagggaaagtttgtccggtgggataaccctcccactcttgatggtatgaccggacatgccggaaccctgcctaactgtcgttgttactgcgaagtcgtcctgccaggactcacattacagggtcttcaatga

SEQ ID NO: 378897 - DNA, 1272 bp, Salmonella enterica
atgaaatatttctacacatcacggctgggtaacactcgttaccgcctgtcggacggctcccttttgtgtaaatccgtaccgatcgccagaaccggtaagcaggtttataccgaaaaggatctggaagaaacgcgcgttatccccgatgaagatggcgaaattgtcgttaatcgctcgccagatgaggttttcagtccgacggcaatggcgtcattcgaagcgatgtccatcgtcatagaccatccccgcgatatgcaggggaatattgtctttatcgaaccggataactggcgggagctggctcatggacacgttcagaacgtcaggcgcggaactggtgaacaggcagatctggtactggctgaccttatttttaaatcccccgaagcaattgatgctgttgacaaaggggtaacgcaaatttcctgtggctacgacgcgaagtatcgtccggtcgccaggggacaggccgaacaatacaacattgtcggtaatcatatcgctctcgttgatgatgcgcgggcgggggaccgttgttcagtaggagataacaatacaatgacaacgaaacaaaatggatggctcgcgcgtctccgccgggctgttaaaacaggcgatgcagataccttacaggatctggttgacaccgctccttccactctcacgaatgacgacgattcagcgtcgggaacccagacactggttctgcgcgttgaaggtggtacaccgtcagacaccacgactaccgcggatgaagatccaccgggaaaccccattgaaacccgtctggctgcactggaaacactggtgaaaagtctggtggaaaagggaaccggtgatgcaggcactgagcgacccattaagcaggaaaccactgatggtgagccagatgatgaagaggacaaaaagatgacaggagattcagcctaccgtcaggacatcatttcccgtggcgaaatgatcctgccgggctttgaacttcctgacgggaagaagccgggacttttcaagcgggaactgctggctgccgcctgtaaaacggctgacggtaaaaaactcattgaaccgattgccgggaaagacgccgacttttctgccatgcccattgccacggtggacagcatctttaacggggcgagtgagcttgcccgtatgcacaacaacatgatctccagtgccggggtaggtcagtttaacgctgttgccgcacagagcattgaagatttgaacaaacaggcccaggacttctgggcgaagaaaggagagaaataa

SEQ ID NO: 378898 - DNA, 498 bp, Salmonella enterica
atgccgggtcagtccattctttacgctccgggatatggttatcccggcgcttcaacccgtccgtcacattctaccattgagccggtcatgctggactcagcaaaacccttcgctgacaacggtctgccgggtaagaaagttgacggtaaatttgtgccgctggaagagggggacactgcggatgtgatttacggcatccgggtccgctcttatccatttatgtctgatgaggatgtctcacgacaactttccaccccttacaaccataccggtgatgtgatggttcgtggctatattgctgtgaaagtcagtgcaggaacgccagccgaagacggaaaggtctgggttcgtgtcaagggtcaaaccagtgacaagccgctgggaggttttgaggcggcagccgataccacagccggaaataccgttgagctgaagattgcccgcttcatgggaaatgccgatgcagatggtattgctgaaatcgctttcaacatttaa

SEQ ID NO: 378899 - DNA, 945 bp, Salmonella enterica
atgtttactattgatgctaatacggtatcgaacgccggggctttccttgtcgggcagcttgagcgttatgataccaccctgaatatgccactgctggcatacacctggagccgtgatattaaactgcgtactgatgtgtcgattgccgatgaagtcagttcgttctccaataccagttttgctgcgccgacatcggctggtgaagatggtgagtcatggatcagcaacagtaccaatgttatccctggtattaacctcagcatcactaaaacaggtctgccgttgacgccgtgggcgcgtcagttagactggacggtgtttgaactggctgccgcacaacagcttggtcgttcaatcgatactcagaagcttgacgccatgaatcaggtttaccagcttaacgttgaccgtcaggtttatatgggcagcaaaactctcgatgttccggggctgctgaatcagccagcagcaaaagtgtctcaggcggcaaaatcctgggatacctgtacacctgatgaaattcgcgactccattaatacaggtctgacaaatgcctggaaacagacggcacgagctgtggtgccggataagcttctggttccgcctgatcagtacgccattcttgttgaccgtattgtgtccacggcgggcaaccgttctgtactggattacctgacggaaaacaccattgcctacaagcagaatggtaaaccgctggatattcagcccgtgaaatggctcgacaaggatattgcgccaacgaaaggaaaaaaccggatggtgttctataccaatgacaccaaatacgttcagttcccgctggtgccgttacagcgtaccccgatggaataccgggatttgcgccagattgtgacgtactacggcaaggtgggcgtggtggagttacggtacagcgacaccatgcactatatggatggtatctga

SEQ ID NO: 378900 - DNA, 396 bp, Salmonella enterica
atgaaaaaccagacactacccactattgagcagttccgcgctgattttccccagtttgataaccgccagttgtacccggacagtcaggtggcttttcggcttgcctttgccgatcgggtgcttgatgaaaaccgcctggctgaatggttcccttatatggcctgtctggtggtggcgcattatctgacgctgtacccccgctcggcacgttatgctgcgttgggaggtgtggattcgtcgggcgtggtggtgaataagtcggtggataaagtcagcatggggtatgacaccgcatcaactcttaattctgacgggggattctggaaccggactacttacggggctgaattttttcagacgctgatgttgtttggtgcgggagggcgacagttatga

SEQ ID NO: 378901 - DNA, 618 bp, Salmonella enterica
atgaaaagtggtgtgactgttcgtaaggatatgtccgcactggtactggcacgtattcagcaactggtgaaaaaccgtgtactggtgggtgttccctcggataaggcgaatcgtgatgacgggatggaaatcaacaatgcggaactggcttacattcattcaaatggtggaaccatacgtatccccgaacacaccgccatgttgtaccgaagtatgaggccggacggggaatttgcccgaaacggacgttttgtcagaaaagataaaagtaacttttccacaacgcataccgtcccggcgcatacagttacgttaccgccacgcccctttctgaaaattggtattgaacagtcagtacccgcttttacacctgagctgaaaaaggccggagccgccattctcatgggtaaaccggatgtggccagacagtttcttgaacgggccggaatacgtgcgtcacgtgcagcgcagagtgttattaaagatggaacggtgttacaccctctatccccggcaacgcttgctgatcgacgtagccgtgggcggcggggtattaagccgctttacgataccggaattctgctccggtccataacatatgtggtggagagtaaataa

SEQ ID NO: 378902 - DNA, 387 bp, Salmonella enterica
atgccattccttgatgtcagtgatgttctttgtgatccggatttatgtgatacctcactgcgtgttacccgctccagggtagtggtggataagcagggattttcatccagacagactgaggaatatccctttaccgggattgtcaccgtggacaggtcttatgaggcaaaaatgctggagtccgggcagatgattagcggtgccattctggttgtcactgatgaaaaactgaccgccggacagaagggacggggtggggacagagtgacgtatcaggggaacgattatctggtcaaaatggtggacccttataccgcgtatggtcacggttttgttcaggctcactgtgaacttctgtctcctgacggaggtgatccccttgattaa

SEQ ID NO: 378903 - DNA, 579 bp, Salmonella enterica
gtgaacttctgtctcctgacggaggtgatccccttgattaatacttccacagaaaacggctggctgacccccactgacagtaatgatgtccatgaccaggtacttgagcgaaaaatcagtgactggatcactggcctgacgggaatgacgggggatgtcatttttccccgctggcagtctgatcctgtacggtctcgtccggcagtggatgtgacctggtgtgcatttggtgtcacagaagtggatgacggtgaaaacgcgatttttatccagcaagatgatgatgctcaactgtggcggcatcagacacttgatgtccttttcagtttttatggcccgcaggggcaaaaccgcgccgtgagctttcgcgacgggttatccgttccccagaacaacgacatgctgaagtcaaccgggctgaccttcaacagttgcggtcgtctcctgtctgttcccgatcttatcaataatcagtggcaacgccgctatgaccttccggtaaggttgcgccgcaagcttacccgccagtatggcgttaaatctattcttgaacctgatgtaattctcaacggagattaa

SEQ ID NO: 378904 - DNA, 1479 bp, Salmonella enterica
atgcaacacaagttgccagtatccggcatcgttaaggtgcaggtaagtcttgccctgcgtgcagcacaggcgcgtaatttcggttccctgcttatcgtggggacgagttcagttattgacactcatgagcgtatccggctttacagcgatatcacggatgttcagtctgattttagtctggattccccggagtatcaggcagcgcttctttattattcacagtccccgcgtccggcagatttatatattggtcgctgggtcaacacagacgcttctggtctgttacgtggtgccattctgtcagaaagcgcacaacagatgacgaattttacggccatcactgccggtaatctgacagtcagtgttgatggcactgctcaggcgctgacggcaattgatctgtcaaaggagaccaaccttaacggcgtggctgcccgagtgtcagataaactaaaaactgcgacggtcgtctgggacaattcgcgggaacgttttatggtgacatcagccacgacgggagtgaattcacaggtcgggtttgcttcatcggatgcgtcgggaagtgatctcgcgacactgatgggactgacggaatccgcaggagcattatcagtagccggaaccacagccgaggaaatcgcgcagtgtatatcaacattgtcagaattctcttctgactggtatggcctggtgattgccggtcccctggaagatgacgatatcaccaaagtggcgtcatttattgaggcggatgcggtttcccgtgttttcggtgtaacgacccaaaaaacgacagtactggatgctgatcgcagtgatgacatcgccagtaagctgaaagcggcaaaatacagccgcacgctgcttcagtattcctccaccagtccgtatgcagcggcttccctgtttggtcgtgcttttaccgtgaattttaacggattcaataccaccatcaccctgaaatttaagcaggaacccggcgttgtggcggagtcactgaccgtgccgcaggcgaaagcactgaaggcgaaaaactgtaatgtttttgttaactatgacaatgatactgccattatccaggaaggggtgatgtgtaacggtgacttctttgacgaacgtcacggcctggactggttacagaattacgttcagaccaaccagtttaatgtgctgtacacctctcagactaaaattccgcagaccgatccgggtatcaccacgcttgtcgctgatgttgaacagtccatgtcacaggctgttgacaacgcattgcttgcaccgggggtatggaacggtggggacctggggcaactaaaaaaaggtgacacactgacaaaagggtattacgtctacgctccacctgtggcacagcaggcacagtctgaccgtgaggcgcgtaagtctccaccagttcaggtcgccgccaaacttgccggagcggttcactattcagacatcatgattgacgttgtgcgttaa

SEQ ID NO: 378905 - DNA, 444 bp, Salmonella enterica
atgagcgggacttattcttttattgatgtatctgcctcactggtgggacctaccgggattgtacaactggggtacggttccggtaatgctgacgaagggatcaccgtggcgatgggaggagcaaaaaacaccatgaccatcggggctgacggtgaagggatgcataaccttcatgcggataaatccggtacgatcacggtgaatttgctgaaaaactcgccggtgaacaaaaagctgtcgctgatgtacaacgctcagagtcagtcttcgaccctgtggggcaacaacgttatcgtgatccgcaacagtgcttccgaagatatggtgacagctcgtggctgtgcttttcagaaacagccagattttgccaatgcgaaagatggcactacggtagcctgggtatttgactgtatcaaaatcgatcagcttttaggggagttttaa

SEQ ID NO: 378906 - DNA, 408 bp, Salmonella enterica
atggaattttctgttaacggggtgaactatcgttgttcaaaactgagcgtctttgatcaactgaaggtgagccgaaaactgctgccggtactggcgggactgacttcagaactccagtccctgcgcgagtctgccgcccccggacaagcgctggaaaccctgctgccgaaaatcgcacagtcactggcaggcatgtcggatgacgactgtaacgccattctttatccctgtctgtcggtggtctcccgccagcaccagaaaggatggacgcccgtattcagtcagggacagatgatgtttgacgatattaatctggtttcgatgttgcagattgtgtcaaaggtcgtgggggattcgctgggaaatttttttcaagaactccccgccgacgtgacgtcacccctttag

SEQ ID NO: 378907 - DNA, 153 bp, Salmonella enterica
atgagtccggttgatgccggacttatttcatttactgacctgaaaagtggccgggtggatctggctgatattgccatgatgaatgactggctgggattaaaagccgataacgaggcgcggatcgcccgctggagagaaagccatgagcattga

SEQ ID NO: 378908 - DNA, 2088 bp, Salmonella enterica
atgagcattgatgcacaggttatccaggattttctgattgccctgggatttaagctggatgagcagggcgcgaagaaatttacggatacgctgtctgatatcagtacaaaagcgctggcgcttggtggggtggtggaaggcgcggcgctaagtattgtgtattttactgaccagatagcgcagggactggacaaggtttactggtcctcacagcgaaccggggcaagtgccgccgggattaaggcgcttggctatgccgcagtacaggcaggaagtagtgccgaagccgctcaggccgggctggaacggctggcacagttcatgcgtaataatcccggcgcggaaggatttctcaaccggatgggaatacagacccgtgatgcaggtggtcagcggctggatatgtcagccattctcatgcaggcgggcgaccgtttaagccagatgccatcatggcggtcaaaccagtatgcgcagatgctgggtctcgacccacagatgctgatggcatggaaaaatggtctcggcggctacatggccgaatatcaggagatgatgaagaaaaccgggttcaacgcgaaggaagcgacagagaactcaaataaatttgtcacctccatgttacaactgacaggcgttgttgacctgctgaaggataaaattggctcgaatctggctggtgggctggcgggtgagattgacatactgcgtaagcaactgctggataactttccgaagatagaggggatacttacccgcatcattaagggaatactggcgattgcggatgttctgacccgtatgctgttccgggggatgcaggctgttacgcagattatcgactggtggcacagtctggatgcggagagtaaaaagctcatcgacatcttcggactgattggtgcagcctggtatgtactgaacagcaagttcctgctgtccccgattggtatcgtgattgcgctgatagcggcgctggccctgctgtacgacgactacatgacctggaaggaagggggatcgtcctattttgactggagtcagtggtcatcgcagcttgacgatgcgaaaaagcacgttgaagagttcagggacggtattgataagctgtttaagtccgttgaaaaactgctggggattgacccgaaaacatggtccctgcaatgggatgtgaacaacctcatctcacagatgggcgagcttggcaaaatgctgggtatgattgccgatctgctgaatgccattaatgaaggccgctggaaggatgcgtatgccataggcaagaaactgcttaaacaggggagtgacaagccggatgcgttacctgctgtaacagacagtgccaacaaaacggctgaagaaataaagaagcatactggcgtagatacccgtaatttcggaaaatcactgctggatacgtatatgtatctgaacgggcaactgaacagaatacttccggtatggatgggcggttcttctgctcccggtacggttgagggcaataatattcagcccgatattcccggtggggaggtggtacagcatgggcagtctgcccgtcggcgttatccgaaggggatacgcaataataatcccggtaatctgcgtttcgcgggacagtcaggagcaatgaatgatggttccggttttgcagcatttgattccccactggagggacttattgcccttaaaaatcaactgatgcgttattttacgggtaaaacctttggccggaaattacagaccatacgggatattatttcgcattatgccccgaagaatgagaatgacacagacgcctatattcaggcagtggcggcaatgatgcatatttcccctgatgcggcgctgaatcttcaaaacccacagatgatgcaggcattaatgaacagcattgtgcagtatgagaacggcagaaacccgtattctcaggcaatgctgggtcaggctaccggaagtattcaacaggaaactaatatccatattcatggtgtatctgatccgcgagaggccgcaaggttgaccgctgacaggcaaaataatgttaactctcatctcgttcagcaattatcggtgatgccaaaatga

SEQ ID NO: 378909 - DNA, 588 bp, Salmonella enterica
atgaatatctcttctgcaatttttcggcaacaaaaccgacagattggtatgttgataccaagcgtcgttatttcggagaagcatactgatacgctggagattacggaacatcctgtggaaaagccgaccagccagggggcttccggttttgtatctgatcatgcctggaaacgtcccggagaggttgtgattgagtgtggttttgaaagtggaggtagcctgcttgatttaatcgatacgtcaaaggcgggtattacacttgggttaagtccacaggagacttatcagaaactacttgatctccaggaatcacgtttgcctattgacgtaataacgggtaagcgtagttataaaaatatgcttattcgttctattgatgtcacaaccgataaaactacggaatatgtgctcagttgtacattgacattacgtgaagtcatcatcagtagtacatataaaatacaggtggcggataaaagtaaaatgcggtttggtgtcagtaccgcagcagtacagaatacgggggtgaaaactccggttcctgttaatgaatcagtgttgaaaaaacatttgccagcgaggaagtaa

SEQ ID NO: 378910 - DNA, 312 bp, Salmonella enterica
atgaaaatacatgaaattcctttaatacctgaaaaccagcatttcagtattcagcttgccgggagaaactttattttccgttttacttttcgtgatgaagctggctggattatggatatttcagatatgcagaccggaacgcttgtttccggcgtacctcttatccctgatactgatttactggcacaatatcctgatattcagttaggcggaaaacttcgggtggtatcagatgatgattcccttgaatatccttcaaagtcgaatctcggtacaggcagccatctttatttcatcgagggtgaagtatga

SEQ ID NO: 378911 - DNA, 1071 bp, Salmonella enterica
atgagtcagaactggatgcgatattttgaattacaactgcttaataaagaggggaaagggattggactcagtgattttaaagtgattttcaggattgaatggaatgataccaagtggccccgtgttgctaccatcaaggtttataacctttcaccggataccagtaaccggattatgggggaagagtttactaaaatccagttgatggtcgggtatgaaggtatggccgcaccagttaatatcagtgatgtgggtaaggtcaggagtattaatcctgagcaggcagggcagatggatggaaagaactacgcactgctttttcagggagatatccggtttactattaaagggtgcgacaatctgactgattcctgggtgcagattcaggctcttggtgatcatgaagctttcctctatgccagaacgaaaaagacgcttgctgcgggttacaacgttgaaacccttctgaatgctgcgatggaaggttttaatgctttcggtgtgacaaagggcattatcggtcccttacctgatactgtgtttcctcgttcccgcacaatttatgcggcttctcatgtagtgatggatcaggttgctgaaatgtgtaacgccacatggcaacttgtcgatggtcaggtacagatgatcccggtagacagatacatcgatacggtcgtagtattgaacggagatacagggctgattggtcgcccggagcagacaatgggcggtggcgtcaatgtacgctgtcttattaatcctaacatccgtatcaatacgctgatacatattgatcaggcatcgatttaccgtgcagcgttgtccaccagtcagatagcgcagtctaccggacgcatgatggaaacgaatgataacggttactatgttgtcaaagatacgggagccgggataccgcctgcgagtattgcggctgatggtatgtacattgtaaagagtatcttctgtatcggggatacgcggggcaaagagtggtatatggatttgatgtgcttcgcggtcggttcagctgatccaatgagtggagaggctaaacaaaaatctctaccgtag

SEQ ID NO: 378912 - DNA, 348 bp, Salmonella enterica
ttgttgaaatttatcatcgcgttattttttactgtctttagcgtgttttcagtttgggctgatgggcagtgtggttcttttcgaataagtgcggggccatctaatgatggttttatgagaattaatggtgtacgtcctgaaacccaaaaattcttttttttgggaaagaaagatgattataacaatatcaagatccagtggattgtcgatactgatgaacccggacgatggtttggtatggactatatcaaacgagatggtaaggccatacttaacgttcaggtattgcaggccagcatggatgcgccgcgtatctatggctcgtttccatgccacagggtgaagtga

SEQ ID NO: 378913 - DNA, 462 bp, Salmonella enterica
atgcctgaaaatgatgaggtaagccgtgatcttgataaagtatcgatggagatagtcagtgtggaaaagagaattcatgaatgtactgatattatcagcgcactggagggagacacggcggagaaaggtaatattatttttaccgttgagttcccgtcagaattgaaagcaagagccgaactcttaacatatcagatagaaaatttaagagatgtcttttctcttgttgagaactctccggcgtggaagccttatttatcggctattacagaaaagagacagaaggatgtaagggcaatgtctaatttgcgcaatgcttatctgaatattgcgttgattactgaacaatatgtatctccggtcccgttagttgacagtagtgttgaaggtgatattgacgagtttaacgctgctataactgcttccaatgctttgatgggatttaaaccagatgacgtttaa

SEQ ID NO: 378914 - DNA, 240 bp, Salmonella enterica
atgagtgcaattgatgatttttttaaactggaattcaagcttcccgatgaatcggttattcttgaggagtttgaaaaagtgaaaagggaatttgagcgttttcctttatcagatgaataccagaggccactttccctactgatgtttaatgaattgagtcgtcgtgttaataaacatttcaaaatgattattacatttcttcctccagatgagaagccattacagacaggtcggttctga

SEQ ID NO: 378915 - DNA, 198 bp, Salmonella enterica
gtggagtggatttcttttgaagataaagaaccctctaaccgggagatgattattgtctataccagcgagggtgtcggggtcggaatatacgacattttgaatcattgtgttggttctttactcataggtgacagacaaccaggttcttttgtctcaacccactggatgcctttaccagaaccaccgacagacagttaa

SEQ ID NO: 378916 - DNA, 813 bp, Salmonella enterica
atgtctaatatcattccaatgagttatgacggtcttcgtattagatttaatgacgaaggttggatcaatgcaactgatgtggcggctaagtttggtaaggaaatgaatgactggcttcaacaatatgaaacgctggaatatctttgcgcccttgataaacggcttttttccaattccggtcctgagcaggaattaataaaaatcaaagggttacaggtaaggaaagcatctgcaagggctaaaatattgcgtatagcaaaaagtacggggcttgtaaaagctaaagctggaattaatggtggaacatggcttcatcctaaactggctgttcgctttgcccgctggctttctgtgggtttcgaaatatggtgcgatgaacaaatagacgccattattcacggacgctctacatcttttgatgatgagcgtattaaagctatcttcctgcttagcgatccttcttcatgggaaaagcggtttaatgatccgctatatgaggcattgttcagaatgacagggcttccacgtcacaggaacgaccggaaaccgatgttgttcagtcttatcagtgccaaatggatttatggaccagttcttcctcctgaagtttacacggatgttaaaacgcgtctgacggctggcgagaagattcatcagtatctcaaacctgatgcacttaaattgattgagaatcaaattattgctgttaccagtattgcaaatggttgtaccgactatcgcgatttcgaagcacgctgtatgtcggcgtttccggtaaaaggtcagatgaagttactgtatgcagcagcatga

SEQ ID NO: 378917 - DNA, 750 bp, Salmonella enterica
atgcccgtacctgttaaggcacaatttggtgatgttcagcaaatgatgctgattgtgaaagacaatatattttctcaattgcgagtatctatacctggaattattcaggattttgatcccgataaggtgacatgttctgttttaccggcagtcaggggatgtgactttgaaccatcgggagacaaagactcaacgaaaattaacgttatttctgatatccccgttattttcccccgtggcggcggttgtactttgacttttccggtcaggcccggcgatgaatgcctgctggtttttgccgatcggtgcattgatttctggtggcagaacggtggtgtacaggagccggttgacttgcgtcagcatgatttatctgatgcttttgccatcgttggcccgcagtcccagacgcacaaaattagcggcatcagtaccagcgccactcaacttcgtaccgatgatggtacagcctttattgaagtggcgacgggacacgacattaccgtaaaaactccaggcaaactgacagccagtgctgagggtggcaccgaaatcacatccccgactatcacgctgaatggcaatgtgaccatcaacggtaatctgtcacaggggatgggtgaaagtggcggtagtgcaacgatgttggggccgatcacagtgaccaacgacgttaatgctcgcggtaagagtctgcaacagcatacccatcgtgaacacgacgggccggaaacaggacctgcgcaatga

SEQ ID NO: 378918 - DNA, 348 bp, Salmonella enterica
atgagatatcgtcgggaagatgaaaacggggattacacatttggccggggagattccggcttttttgtggactgcccggaagctgtttctcaggcggtaaaaacccgcctgcaattatggcaggggcaatggtttcttgatgtgaatgagggtacgccctacgagcagacgatcatcgggaaacaggtttcagaggtgtatgtccttgctgttcgtgatcgggtgctcagtacgccgggtgttaataacattctgtctatgaccactaccactgatgataaccagcgtcgggtgaactacagagttacgcttgacaccatatacggagagggcaacgtcaatgtatga

SEQ ID NO: 378919 - DNA, 1194 bp, Salmonella enterica
atgtatgaggaagtgatagccggtatgcttccggtcattaatgaatcaggtatcagtgcgcccgatttccagacggtattgaatggctggcagacagtatttcggggaatatacggtgatgacatctatattgcgccggacagtaaggacgggatgttgttatcgctgatagcgtatgccatgcatggttgtaataacacggctgttgcagtctataactcgttcagtcctgaaacggcaacaggtcgtggtcttgcacgtaacgtgaaaattaacgggatcaccaggaaaatcccaggaaactctacagttgatgttgtctgtacggggcgagtcggtacagttatccgtaacggtgcggtacgtgatgtcgctggtaatctgtggagtcttcccgctttggtcacgctggatactcatggtaatgccgttgtcacggcagtatgccagaaagagggagccgtcagtgcgttaccgggggatatccgtgagattgccacgccgaccgcaggatggcagagtgtgacaaataccagcgccgctgctgtgggaaaaccagcagaaactgatacggaattacgccttcgccagtctcagtccgttgcactcccttcccgtactgtaatggaaggaatgctgggggcactgacaagccttgatggcgtggttcgtgttaagggatttgataacgattcaggtgatacggatgcgaatggtattccggcgggacacattgcagttattgccgaaggtggtgattcagaagagatagcaagaactatcgcgctgaagaaaactccgggagtgccgaccagcggaacaacacaggaaacggtaacggacagttacggtaatcagaaggtgattaatttttaccgccctgtgaaagttcctgtttatattgaattacatatcaaggtaatgaccggatataatactgatattggaagggggattagtagggcggtcagtgattatatcaattcactggatattggtgcttctgtttatttatcccggatttatactccagcgacactacagaaccagtccagtgggaatacatacgaattactgtctgttactgtaggtaaatcctccactaagttaagtactaataatattgttatcgcctttaatgaagcggctgtctgtcagcctgaaaacgttattattattacggaagcatcatga

SEQ ID NO: 378920 - DNA, 576 bp, Salmonella enterica
atgaataattattttgaaggattaattccggcgtatcagcttgaacaaccccgttacagccttaccctggaagctgtgagtaaggcttttagcggggtacaggactcactgaaaacaatagcaggcggctttgatcttgataaggcaacaggaaaacaactggatattataggactgtggattggtcgggggcggaagataagaacaccgatagtggattatttctttacctttgatgacccgaaactagggtttgattacggaaactggaaaaaccattatgattcagcttacggcttcactgccctggacgataaactataccggacaatattacgtgctaaaataggtgctaataactggaatggtacagcagaggcttttcctggcgtattagcctcgatttatcctgatggcaatatttttatttcttatgctgataataatgatgattcaataaccattacggtacggggaaaagttattccacctattgtccgtgaaattatcaggcagggttattttgatataaagccacagggtataaaagttaactacagtattgcagagggctga

SEQ ID NO: 378921 - DNA, 1032 bp, Salmonella enterica
atgccgaagaatgaatttaaagcgtttgctgtcggtgaaaatgctaacgtgctcactcagacggaatatgaaaatcttccggcggtcacatccggttttcaggcggggatcgcagagagcgttcagctaaacaaagtctggcgtcaggcttccgttatcgcggccatactggggcagtttaccgcagataagtccggtgatgacgtagtggatgacgggaagctggatgttctgatgaactcctttgtgaaggcgttatttaataactccacagaacaacttgacccgcgttatctgaaaaaagaccagaacctggccgacgtaccggacaaggccgcaggccgggccagccttgatgtttacagcaaaaccgaaagtaatgaaaactacatggctaaaagccagaacggcgcggatatcccgaataagccgctgtttatcgaaaacctcggtttaacggaaacgatacagaacctgttcccggttggtgcgcccattccctggccatctgacaccattcctgctggttacactattatgcaggggcaaccttttgataagtcagtgtacccgcttctggcaaaagcctatccatccggtgttattctggacatgcgcggctggacaatcaaaggcaagcccgccagcgggcgggcggtactgtctcaggaaatggacggtaacaagcggcactcacactctgcgcgggcacaggataccgacctcggaacgaagaacacctcgtcttttgactatggatcaaaagggtctgatgcgggggggaatcatgtgcatgagttcggtagttacgtaaattcatactggggtgattctaatcacacctcctttctcgccgggggtggtgcgtggacaaaagaggccggtatccatgcccacaccacctggattggcccacacggtcatacggtttacatcggcccacacggtcacctggttattgttgaccctgacggtaatgaagaggtcacggttaaaaacatcgcctttaactatattgtgaggttagcgtaa

SEQ ID NO: 378922 - DNA, 756 bp, Salmonella enterica
atggcttttaaaatgagcgaagaaacacggacggtcagggtttataatctgcgtgcagacacgaatgaatttatcggtgccagtgatgcttggatagcgccacataccggattaccctcaaactgtaccgatattgctccccctgatattcccgccagtcatattgctgtatttgacgctgaaaccgaaacgtggagtctgcatgaagaccaccgcggcgagacggtttacgacacaacaaccggcaatcaggtctatatctccgaagccggaccgttaccggaaaacacaaccacacaggctcccgcatcaccagtcgataaattcgaaaacggtaagtgggtggctgatttaaatactgccctgactcagaaacacgctgaaattaacgactggcgtaatattcaggagaatatgaattatgtattccggtttaacaatcacaactgggactacggtaaaaccactcaggagcgattaagcctctccgttcagatggcaaaagccaacaaattaccggctggttttatctggactgacgccgataataacgacgtaccaatgtctgccggggaattattaaatctcagcgacgccatcgaccaggcaatgttcactatggggctgcaaatccatctgcgccagcgggaaatgaaagaagaggtggataagctgaccgacgcacaggctgtactggattacgttgtcggctggcctgcatcacccactccggaggccaccagtgacagtcattaa

SEQ ID NO: 378923 - DNA, 975 bp, Salmonella enterica
gtgacagtcattaagggaaccattaccgacgccaccggacagccactggccggagccaccatcacctttacggccctacagaacactgtcggaatgctgagaagtgtctccacgtatattacaacagtgcgcggagagtatgagttcactgtgacacctggcgtatacagtgtcagtctggcgcagaacggaactaacggttacgctctgggggctgtccacatatacgacgattctcccgacgggacgctgaacagcttcctgaacgcgaagaatacagacacacgtcccgaagcgttaaggcaatttgaagcgctggcacaactgacgcaggacaatgccagtaaagccgctcaggtgctggaagacgccattaacgcctctatcaagggtgaaaaaggagatacgggcgaacagggtccgcagggcattcccggtcctgctggccctcctggccccaaaggtgataagggtgatgctggttacagggggctgaagggcgacacaggactaaagggtgaaaaaggcgataccggcccgtcagcatatgacatctggaaatctcaacaacctgacggtactgacacctcaactgtcgcgtatctcgctttccaggaaggtaaaaaaggtgataagggagacaaaggtgataccggtgacggtatcactactgttaaaacggatggcattaccctgaaaggcgatggcgtggttacgccactggcaatgaatatctccgcatcaggttatcctggtgtgggagattatgtcattgcctgggatatggggaagcctgattatcagttttttgggtacaaagtccccggctcacagttaaggcagaccgcactttcttttggtgataatggtacagcttatgcaagtaaacatacttacttgacgttttccgggacttttatcgggacgggttatttttatacctataatgttggtctttttcgtcgagtggcataa

SEQ ID NO: 378924 - DNA, 579 bp, Salmonella enterica
atgaatattatttccgccagaaatggagtctacactgaaaacggtaatatagattgtgaagtgcattttgaaggctttgatgattttattccgttcacttcttcccccgacgattcggaagaacatggtcgccagctctacgccgacctgaaagccgggaaatacggtcccgttactccctttaccgtgacaccagaaatgatccagtcagcaaaggatgcaaaacatgccgaaatcaataactggcgtgatactcaggagaacggcagcattatcttcacgctgaacggccatcgctgggactgcggtaaagcttcacaaacccgccttgcgcctgttgtcgctgttgccaaatcaggtgcacttccgccaggtttcttctggacggatgccgataacattgatgtgccgatgaccgccgacgaactgaccgcgttggaagccgccatgcagcagaacatggtattgcagggcttcaaaatccacgaacgccagcggcagatgaaagaggaagtggacaaattaactgactacaaggctattcagacttacgccgtaggctggccggaaggaaattaa

SEQ ID NO: 378925 - DNA, 375 bp, Salmonella enterica
atgagcagattcacaactccggcaattctcgaaatgctgggccattatttatggcgcgtacacgagccgtttacgttttacctcagcgacgacaacagcgacgtaatagaagttccggcaggctttattactgaccttgccacgatcccgcgcatcttttggattttgctaccgcctgacggcaaatacgccaaatccgcaataattcacgattacctgtacgacaacgcgctacggacgaagcgggaagccgatcggatattcctggacggaatgacggtgctgggtgtgccgcgatggaaaaggacgatcatgtattgggcggtaaggctgtttgggcgaggaaactacggaaaacgtataaagatagcgtga

SEQ ID NO: 378926 - DNA, 144 bp, Salmonella enterica
atgcagttttctggtggagagatcaagcacagctatcaaaataatgacaaacaaaaatataacgccaatccccagcataataagtatgggtttattcatggctccaccaaaaaaagaggggcgtcggatcatgcccctatataa

SEQ ID NO: 378927 - DNA, 198 bp, Salmonella enterica
atgttgaagaagattccgttttttaagaaatcggtttactggactgaaatcctgccgttcctgattttcaactggctgatgattgtcgtgcaggttatctgtattacagtgttactggttggtacgttcgatattattctcaataatgtcggagagcctgtagagggttcgcttggtactatcaccagaagcgagtga

SEQ ID NO: 378928 - DNA, 858 bp, Salmonella enterica
atgaccacttcaattacacttgttactgcttattttgatataggcagaagtcaatggacatcgcaaaatgggtttgctccacgcattgagcgaactactgacaattatatgacctggttttccaatcttgctcagctagaaaatagtatggttatttttacctctcctgacctcaaacccaggattgaggaaatccggagaggaaaatcaacaacgattgttacattagatttcaataaaaaatttcatcatatcaggagccggatcgcttctatacagtcagatgtaacgtttaagctcagaactcccatagagcagcgggggaatcctgagtatctgtcggctgattacgttttactctgtaatctgaaaacgtactttgtgaatcgggctatccgtcagggtgtgatcaaagacgatatggctgcctggattgattttggatattgtagagatactgataccacgaatgggataaaaaagtggtcctggcccttcaataaggaaaagatgcatctttttacgatcagaagggggcttaaacttgaaacactggagtcagtgttcaactgtatgtcaagtaaccgtgtatatatcatcggtggcgttctggtcggaacgctggaaaagtggcaagaattttaccgactggtgtggtgttgccaaaagaaggtgttgagagagaatactgtggatgatgatcagggtatatttctgatgtgctattattacaggcctgacatgataaagttaaactatctcggtaaaaacaggtggtttgacttattcaagtgcaagggaaagcgaacgattcgcactttttctcacaggatgagaatattatgtcttcacaaataa

SEQ ID NO: 378929 - DNA, 1278 bp, Salmonella enterica
gtggaaacaaaccttatcgaagcgaaaggaatgtttttaagtgatggcattaaagtttttggaatagcaattctattaaccttagcgattatttatggaataattaaactttataaaaatcaggataacttcaagtggattccaaaactaacgatttatctttatttattaataaccctcatgatcgcaaatgatgtgtggccacaaataaacgatatcaaaatgagcatgaacgaatcgcgctcaacaataggcaaacttattaaaagctacttccccgccgttataggtgacgtggtgtattttgccagtacaatgatattaaatgaccgttactcgaacacatcaataataccagacttcaacgagtctataacaggtaaagcagaaagcggtaataataccattgttattgtaatgggagaatcttcgctattttcaaggtatagcatttacgggtatcctaagctgacaagtccggacttacaaaaaatattcacacaacccaaatcatgcattgtcagaaacgttcattcaagtgctcctgaaacaagggattctcttgcaatgacattctcattcagtacgccagaaagtgataccaacctcttcaagaataaatccattacagaaatggcaaaagctaacggatataaaacctggtggattggttctcaggaacttgagggattattcagttcaaaatatggatttattgcaaggaaaagcgacgttgtcagactgacgaatggacacgatgaacatctggtcccaatgctgactgacgcactggaagatacgtctgcccccaaaaaatttataatagttcacctgctcggcaaccataagccttaccataactacgatgcagaagataagaaagcattacccggagctgaagaatacgatttaactattcataaaacagacagagttgtttcttcattgttcaacgatgtagcaaaacacagtaacaactatatattcctgtatacctcagaccacggagaagtagtcaataaaggtcatggacttatgaaaggtaaggatcaatggtacataccttttctgtataaatctaccaatgacaaattcgattgttcgttcattgaacaattcagaaacaaggatggatggctgagtggtcttatgaataagtatatcctttcacgtcttattggttatacgctcgataaaaacattgttaataacgaaatgaataacgacagagtaaaggcggcaaatgaaaaacccgttttatttaaagatacagaataa

SEQ ID NO: 378930 - DNA, 642 bp, Salmonella enterica
atggaacaggttacaacgttatttcccccggcgtttcccgcactggcgctggcgcattttatggcgctgctcagcccgggtccggacttctttttgctggtcggttacgccgttcgctatcggttgcgcggcagcgtcgggctgtgcctcggcattgcggcgggaaatgggctctatattctgctggtggtgattgggtcagggctactacgtcagacgccgctgctctttaccatcatcgaaccattgggtgccgcctacctgctatgggggggccgtcaactgttgaaaagccgcgccgggccgctggagtggcggtacgccgcatcggcatgtccgtcactggcaaaacaactattactggggctaggttcatcgctgttgaatccgaaaaatgctctgttttatctggcgctaatgaccgccctgctgggcccaaacgtgaccgttacacagcaggccatatgtggaatctggatgaccagcgtagtgttactctgggatctgctgctcataacgcttatcgccctgccgcaaattcaacgtcgcctgggtaaacttgtctggaaaattgaacgcgccgccggcggcattctgattgcctttggcagctggattatgtggcagctcatcacaagttaa

SEQ ID NO: 378931 - DNA, 816 bp, Salmonella enterica
atgccccttatccgagatattcaccaacgcttctggcgtctgccacaactgccgtggctggagctacgtaccaccagtgaaagctgtcaggcctataagcgccacagccacccgcaactgtcgctgggcgcgatcatcgccggagaaacccgctgcatcagtaacgggcaagagtatctattacgccccggcgagctcatcctgatccccccgcaatctccacacagttgtaacccgctccacgagcgaccacgcagctatcatatgctgtatctcgatgcggactggtgcctgacgcagcttccccatttgccggcggatagccgtctgcataccacgcagccacagttgcaggacccgaagattttccagctttatcagcgtattgtgacgtctattactcagcagcaaaccgccggacttccggcgcttattatctacctgttgcgcgccctgccgctacaaagcgccgacgccgaaccgccatgcgccatcagccgccagttggttgcccgcttagtcagtaaccttcaggaaccgccgacgctggacacactggcgcaagagtttgcgctccgtaaggagacgctgattcgcacctttaagcaggatactggcctgactcctgtcagctttaccaatatggcccgcattgaatatgcccggcaccgattgcgcgccggggacggtattgccgatgttgcctatcagaccggtttcgccgatcaaagtcatttccacaaaaccttcgtcagctacacggcggcaacgccgcgtcagtacgcgcagaacagatcaatatccgacaataaatag

SEQ ID NO: 378932 - DNA, 4923 bp, Salmonella enterica
atgagtatgacagccactttatctctcaaaaagttagaggagcattttggaatacaggaccaattatccaaccgcggatattattctatatttgatatcctgaagctatcaaaaagtgaatttactcgccagtatcaaggcctttttggtgctaaagccagtaaaatctacgataccgcttccggttacgcaacgcagattatgctgttgtttcgcaaaaataaccttgctcaggcggtgcagacgtcggtgtattccactcagttgcaggataacgattctgtagtgcccacaaagggcggcccgacgtggcaaaccctatttgctgatgactggcgtgaatattgtcagaatagcgcaccggaagccaatgactctccggtttcttatctctcctggctgtataatcaggccacgaattttgaatcacagatgggggtcgataatattatcccgctggctgtccgccgccctgacttagcagagcttatgctggataatgacgcgattaatcaggttgtgccctctttgcaattggttaataaagtacttgagcagtccgtcactccatacgttaataacatcgtcccgaataccagcgttagcgaaacgctagctgccacccgttattcaacgcttctaccttatcattacccacatcagcagacgttgctttctctgaaagccagtgacgaatctctacagaatacaattaaaaaaaccgataccgcctggccttattttgtgaagcagaacctgcgtgcagggaaagcggaaacagcatggcaactgggcagtgatctggcgcctgagcagcagaacattcttattgaaaattttgctgatcctacaaccgaattaactaatttctactatcaaagtcttgggttaaattctagtaattttgaacctttcgtaaatagtgatgttttatgccagcaactcggcattaccaaagaggagatggaaaacttaatcgcctcaacctgcaacgagtctaaagtctctatttcagataattaccaacctgcttatcaggcatccggttctgatttgtatggtgccagttatattaatagttatcttaacgaccctgcattgttgcaggacagaagtgtggtaaaagatgaaggcactaatccgacgccgatgtatatcagctcacaaggagttagttttgtagctggcaagtttggttcagcgttaaaaattgatgcgacaaaaaatgctgaagtctatttcaaatcaaatattgctactgatggttcccaacttattccttttacattatcgttctggtgtaatatcccagcgaatataaagtcaaacagtttggtggtgaccaataaaacggatcattatgtttcaactgcaaaaggaattaccgttaaggcatctcctggcgagaatggtaattgtagtctggaattaagtgcgtcagatggcgaaaacgacccgctggccgtgtcacgtgtattccctgctgatacctggattttcgtgtgtattgaatactcactcaacacgaatctttacttgataactaatgttaatggttctggttctacacactacgacaccatacaaatagactccccagaaagcatcgcattagaagaggagtattggggatttaatggaaattatggcaacaaatactataaagatcatagtagttgccgttcagtccttttatatgatgatattgcagtctggaataatagtctaagcgatagtgagataaatacttatctttcaaaaggtaccacagcgctagcgttaaatgatccaattcagtattattcctgtgatgctgctgacgtttctatcacaaaagaaataccgtcaaaaatagaagtctcccaatcgcaaaatgaatattatccagaactactatccgataaatatggtgaatattataaactctgcgcaacgaaaaataaccacatccgcctgaatgatactatttgtaatcagttcgatggtaatcaggatttttcattcggtttttggtttaaatattccaaacgtccaacagacagaaccccggtagccatgaatatatatccagaaaatggtgagcatgggttttccattgaactttattcaagcggcagtcttcgcgtcattgcacaaaatgatcacaactacaaataccttgatagcgctgcattaactacagacacatggtattatgttgctctcgtatggtgcacatcgactatggttgccaccctatatttggtggaagagggttcaagtgatatcaacgtttatgaaaccaatgcggttaacgcgggttcatttactaaaaacggtgaattctgctggacactcaacgaaagtggaaatgttaaccgaacatggtacaccacgaacaatgattcttcagtagcactctgtttttctgagcctgcattctggtctggcctcatcaacaaaaatgatgtcgcgcttattgcctcattacagagttcattggatgacaaagattcgggactcagtttatatccagcgtgttatttcgacttcaatacttgcccgacactcatgcatctgagcgatgtacgtatgcagcgcatcaatcgcatggtccgtttacaacgctggcttggcctctcctttgaagaggtagatttattaatcaacgcctgtattcgcggtcagggtagccagaatagcgataactcccttaacgcacaaacgctgcgcatgttgggcgtttaccgccactggcagcaagcgtatcaggtcacagctttccagtttgccgctatcctgtatcaaattacgccttatgcgatctctcctgctgttccttttctggaccaggtatttaatactgcttccgcttttgatgaaccgttcaaaattaccgatcgggcgtttaactataccgcgctgactggtgaggatggtcagattgtcaagcagatttgcacgggtcttagcatcacccgcactcagtttctggtactggctaaacaggtcagcgatgcacaaaactgcggcgcgaataccctaatctgctcgttagatgttatctcagcgctctaccgtctggtgatgacgcctcgctggctgggtcttagctttgaggatggcgtagcattattaatgctggtagaagaaggcaaagcgctggcacgtcttgcaaatattccggtgtatacggcagtagagaatagcgccagcgatctgctggataccctgatggcgttgtctgacgccgcgcagtggcttgctgataataacctgacggcgaccggcgtgctgtcgatgttacaagccggaaatcatattctgcccgcaactacagcagaaataaattttatcgccgggattaatcaacaattaccttccaccctgttaaatgaaaattgtttttcctctcttccgcgagatatcatttcggaatcggtttactgtccaaatggtatgaatataggtagcttatataataataccagttatgaacttaactcaacggataaacaatatgcttgtctgagtgataaagctaatgacatactgaatccaggttcaaacatatcaagcacactgggcatgtggtgctatattaaaaatggtgcaagtctgggagtccctcttattgcctcggctaccatagaaagcaatggtaatgcagaaacagggattgccattacgcttggtgatggctacaaattcaatatatcaatgaaagatgcaaacggagaatcagcagatatttcttcggacacagctaaatggaataaaaacgacacttggttctatttaaccctcaggatgcctggcaatggaatgctgtgtctggatgtttattcagatgatggtaaaaccatgaccagttcaaccttagattacaacaaaataggaaactgtaatgttgaggggaatcgctggacaataaatgaagatggatcgcaaaaattctattcaacacactcaagtaaaaaaaaccatatttttattagcgacgttaccgtatggcaaaaaaatatatcaaatgaggaatttgagagtatcatacaatcatgtcgccccgccaacgaaacagttccaggaggaattccttttattaaaagcacctggatggactcgctaaataatcttattgatcatagtggtcttgtcttacccattgcaactgactatcagacgattagcactatagtgcataacgatctctgctatggtaccagcgaatcgcagctgaatgaaatctcaaatattatctatcaggcaaaactcgctcaacagaatattgccgatagtgcgctggcaaaagcgtttaatattgatcactcatatccgccatacctgctcgcctgggccgcatcatctgaatacgatctgctcagccagagcctggcgttaaatggtatcacgacgccagatacaatcccggatgagtatcaacaatatctgtatcagattgcccgccgcgcagggttatgtaatacctttaacctgacgccagccatgctttcgacgttgctggcccacccagcctggttcggcgtagccgatactacaattgattttaacttgttgtatctgttcagccgctatagcgactggatgaaactggctgataaagaggacgccatgctggcttacctgcgccgggtaaacggcacgccatcgcctaccccagaacaggccgcctcttgtctggcgttgctaaccgactgggaaagcgatgaagtcttacaggccgccgcgcacgccgacccagccacagggatcgccacaacactagcgcacattgacgttgtgatgcgcctgaaaacgttgtgtacccataccggtacatccgttgaaaccatgctgaataccggcgacctgaccaccacctccacttatcaggagtggcaatctgtcggagagtcattagtcgccgcgcaaagtaatcactaa

SEQ ID NO: 378933 - DNA, 309 bp, Salmonella enterica
atggaattaactgaacgcgaaaaatcatttatcaccactacatacaaacattcttgggaaatcgcaaaatcaccagagtctgccgaaagctgggagttaacttcagcttacgaaatggccagagctgaggatatgaaggattcacgggacttggacgcatataacattctggcgcgtgagttgtaccgccgcgcacaaaagatttccacgcctatagaacgagccagcattgccgcatcgctagtagctggaggtagcgatctggacagagcccttaatgatgcagcctatctgattgttacagcctaa

SEQ ID NO: 378934 - DNA, 309 bp, Salmonella enterica
atgagactgaccagtcgcaagaaagagatcctgagctactaccgtgaacacctggactatgcaacacggcaaatcagcgccccaccgttcgacgtatccggcgtggcctacctgcttgatggcggtcagggtggcgatggggcgacaaagtatcagttagagtccacacgccgcacactggaagcaatggttagggatgggctgttagaacgggtgagcgtcaaagaggtgcgggatgggctctattgcgacaccacagcgacagtaatccgctatggcctgccgggaaggggtcgctccggttgttag

SEQ ID NO: 378935 - DNA, 1644 bp, Salmonella enterica
atgtccagacaactggcaaagctcggggacaaaacgaccagtggcgggcagatagtcagtgcaacatccgactgcagcgataacggggtttcgctggtcgtcaccggagatatggcactgtgtccgaagtgcaaaggcgctttccagataatgggaacagatgtccactggagttcgatggggaaatcacatgtggcaacgggcgacagggtgttgtgccattgcccgaataatcaggttatcggcaatacaacttattctgtggaagatctgccaaaaaacccgcctgttacacaggtgagacagagttctgccccaccaacaccaccagttcagcaggtgcccgtaaaacagcccccatcacccgtatttgcaaaatccagcctgcgtggtacgggttgtaccgatgcaggagagcagcaggagccacacaccaattttgcagagatggggatatttcaggcgaggccgccagcggcaacggatgatgaagtaccccaacacacacagaccgcaaaaaagaaacccaccgccccggaagatatccaaaaaccgaagaagcgcagcgcgctgtatcgctggctgaacggcaaccatgaggaaatacagaaccaggccgcagtaaccgttgccgctactgccacacgcgcacagaccgcaaccgcaggcgcgagtgtgctggagcagatagccggacgattcgcgacgtatggcacatgggccgttcgtggcgctgtcaccaccagcgaagtcgctgcgggtggattaggcgcgcctgtagcgggtttgctggttggcatgatgccgggtcgtcttaatgacggtgagcaggattttatcgaccggatgcgggctgagcagatgcgggaagccccaacccgtgtgcgctttacatgggagaataatacccagggcaagccggtgcctcatggctggcacacaccgccgggtaaggatatggtgcgggttcgcaagatggaatgggatgcccgccagcaggcgtacaccttcaccacggaagaggcaaacccggtaaccatcatctggacgcctgacagctccggggtgaatacgccatcaaacacaggtaatcaggcgacgcctgtcatgccgaatccggtgattgttgacccgttgccggacaatacccgcatcacggcgaccaccagcccagcgccagaagagaaaaattttgcggattacattctaatcctgccggtatctgatattccgccgatttatatctatatccgcaataacccggggcaagtcaccggtaagggacaaaagattagcggtatctggctggctgatgcgggaacgggtaatggctcaccagtaccgaaccagatagcggacaggctgcgcgggcgggagtttgcgaactttgaccagttcagagaagcattctggcgggaggtggcaaatgatcctgaactatccaagcaatttataccggctaatgtttcccgattaagaaacgggcgggcaccacgcgcaaagttctctgataccgtaggtaagcggcgttcttttgaaatccaccacatagtgcctattagccagggtggtgatgtttataacgttgataatatgggtatcacaacacctaaacgacatattgaccttcacagagggaattaa

SEQ ID NO: 378936 - DNA, 249 bp, Salmonella enterica
ttgaaaactatatgtgaatatacgaaagatgatttcatcaagctaatagatgagattattagcgacaatggaacggaagaacatcaggatgagcttttagagctattcatcaagttagctgaacaccctgcaggttctgacctgatttattacccggaatcagaagaacagtctacgccagcggttatcaccgatattatccagaaatggcgacaggccaacggtaaacccggttttaaagatgcatga

SEQ ID NO: 378937 - DNA, 126 bp, Salmonella enterica
atgttgggtggagcggacaatactaatggtgaattaccgtcttatatcactgacgctaacacccgaccatggtggcaccggacaccacggcagctcagttcgctgctgattttacagagtaaataa

SEQ ID NO: 378938 - DNA, 774 bp, Salmonella enterica
gtgcagattgtgaatagggcataccgagcaggtactggaatgaatttacgtgcaggaatattagtggctggtttttcctttttttatgcgggaatggctttggctgaaaatcatcagcagacattcagtgttgaactgggagcttcccgtcttatttatccacttaatggaaagaacgcggccatccgtgttgataacaagcagaattatccggtgcttgtcagaagcaaagttttgatggaatcaggtaaaaaagattttgcaccttttattaccactccacctctttttcgtctcgacagccatcaggccagcgtggtgaccgttacccgtacgggcgggaaataccctgatgacagggagtcactgaactggttgtgtgtcaaggccgttcccccggataaagatgcggagtgggctaaacacgcgggtgaaaaaaacattgccactaatgttcaggtagtgctggaaaactgcatcaaattactcatccggcctggagaactcagcgacaatccggctgacattgctgaaaaagtggaatggaaagctgaaggtaaaaatcttcatgctcataatccgacgccttattacatgaatatatccggcgtccgccttaatggtgaaaaactgacgctgaaggatagctacatcgccccttattccgatatggacatgcctttttcttccgcaatgaaaacaggcggcaaagtacagtggaccgtaattggtgattacggagaagagcgagaaataagttctggtgtgaattaa

SEQ ID NO: 378939 - DNA, 2502 bp, Salmonella enterica
atgcgctattccattctggctttatttgtcagtgcagttcttttgcctgtcggggcctctgcacacagctacacgtttaaccctgccctgattgatgacggggctgttgatgtgtccctgttcaatgaagggttgcagttgcccggtgattacagcgtgaacatcacgatgaacggtgaaaatgtggataacgccatggtgtcattccgtcttgccggggagaacgggcaccagtatctgtccccctgcctgacacctgagcagttatcccgttatggcgttgatatcagcaaatatccggcactttccacggatacgaaatgtgctgacctgaacgccattccacaggccaccacgcattttgacttttacagccagcgactgtccatcgtggtgccgccccagtccatgttaccgaaagtaaccggtatagctcccgaagcgctgtgggatgacggtattcccgccctgatgctcaactgggatgcaagtacacagcataacgaataccgggggccgtggtcttcccgttcagactccgattatgtccgtctgcaaccggggctgaatctcggggcgtggcgtctgcgcaatgcttccacatggcaaaaaagcagcagccagcccggtaaatggcagagtgcgtacacctatgcggaaagaggtatcaacagtctgaaaagccgcctgacgctgggtgaaagttacaccacaggaagcgtgttcgacagcgtgccttttcgcggtgtgatgctggcctcagacgaaaatatggtgccgtacaaccagcgggcctttgcaccggttgtgcgcggaattgcccggacccaggcgcgggttgaagtcagacagaacggttacctgatgagcgcacagacggtgcccgccggtccctttgaaatcacggacctgccttccacgggaggcagcggtgacctgctggtgaccgtactggagagtgatggctcccgtcaggatatcacggtgccgtataacacgccggccattgccctgcgtcagggatacctgaaatacagcgtggcgggcggtcagtaccgttcgtcgtcagacaacgtaaaacacagtccggtgatgagtgccgaactaatgtacggcctgccgtggaacctgacagtgtatggcggaatacagaccgcagaacactatcagtccggttcagcgggtcttggggccatgctgggtgcctggggcgcgttgtccgctgacgtcacccatgcccggtcacagtggtacggggatgacacccgttccggccagcgctggcgggtacgttataacgaagggctggagagcggcacgacgctgagtatgaccagtgaagagtatgactcggagggatacagcagcctgacggagacgctgaacacgtggtgtgaaagcgaccatcagtgtggttattcatccgtttaccgtccgctgaaacagaaatcccggaccagtgtgtccctgagccagtcgctcggtggggctggttcactgagtcttaacggctcccgccagacataccgtaatgacagcagtaatggaacgtcatggggggcgggatacagcacgatgttgtgggggcgtctggtcgtcagtcttgactggtcacgtaaccagaacacggaccgtcagggacggacatcgacagacaatctgaccagtctgtatctgagcctgccacttaatggctggtcatcaccgaacccggtctatgcctcataccagatgaacggccagagtcacggggatacgaatcatgagctgggtatgtacggcgacacgctgaaccgccgtctgcactggaatgtgcgtgaacgctaccgtgacggagccgggaatgataagaccagcagcgccctgtacctggattaccgcggaacttacggagaaatgaccggcaactacagctacagccgttaccagcgtctgtcaggtgcagggctgaagggaaatctgttgctgaccggtaacggactgacgctgggacagccgcagggtgacacgctggccctggtggaagcgccgggtgtatcaggggctccggtgggaaactggccgggcgtaaggacggatttccgggggtataccgcactgggttacctgacgccttaccagatgaacgacatcagcgttgacccgagaggtctgccggatgatgcggcactgccgcagaccaccgtgaaggtggcaccaacaaaaggggcggtggtcagggcgaaattccacccgtcggtcggtaaacgtgtgctgctgacgctgttgcgcccggcaggcagcccggtaccgttcggcgcggtggcttctgttgcgggaaatacatccggggcaggcatcgtgagcgaaggtaaccaggtgtacctgaccggcgttaaagatgaaagcagtgtgacggtgcactggggacagggccagcagaaacagtgcgtggctgaactcagcgtaccggaaaaacccggaccggcaggggtgtatgtgaccagtgcgcagtgcctgtaa

SEQ ID NO: 378940 - DNA, 510 bp, Salmonella enterica
atgaaaaaactgattatcgcagcaggtattgcagcagcaacgatggcatctttcaatgcaagcgcaaatacttatcttaaagatagcctctctcatgccagtgtaaactctgtggttaccggaagctctgttgtcactgttactggtgtgaatggtggatctttcagcgttactgacattaaaggttcaggtaacgatcttggtacctttggtattcagctccctgataactccgcggttttggggttcggtatttcaggtattcactcccatggtttcccgcagggtttcaaggttaaatttaacgaatgtactgtagccgtttcatctgcagacacaatgacgcgtgctgctggagaggatgccttacctgatggcaatgtgggtcaagagtgtgtgttcgctaatagcatcaagagcgttgccgtgaaaaccgatgctaatcctgatatcaccgttaagccaggtaccaagactataaccgctgatttcactgcgtataccaactaa

SEQ ID NO: 378941 - DNA, 288 bp, Salmonella enterica
atgactggtgcatgggaaattgatgaaaatatgaaggtctgtgagttgcctccgggtgttgctgaagtgtttgctgaagtatttactgacgtgacaaaaccccttatcggtgcgaaatatttacctgttctttatgtagggaaacagatagtcagtggttgtaactacatgttcatctgtaagcagatcctgtcgacagcgcatgcagatacgcatgtggtgaaaatagttattcataaaccagcagtgggcaaggcggaaattctttcgattgaacagttagtttag

SEQ ID NO: 378942 - DNA, 543 bp, Salmonella enterica
atggaaactaattccagtatggttgaaattaatgttctgtgtgtgattgatactgaacttgtaaagaaaaaatatcctaacccaagcaaggaccaggcgaacccgacggggattgtgcatgacagcgagtatatgctggtaaccggtgcccggggagatgtccgtggacaggggaccgcagacctgagttttcgtgccaatgtcggggacaaagtttcatttaccgggacatcaatctatgcaaacgctgatgatgctgtgattgtatatggcattaaatatggaagtggaacagatgttttcggccagtttactcctgaagtctttacccgtgatggtgccgtcatgcccgcttcgggaactccgtgtggaattcctcctttaaataagtcagttagtttttctaagtatagtgccgatatcagtaattcggggaaagagaattttattgtctgttttgcgttatataatctggactccactggcaggaatcagaagttgtttggatattattgctgggatccggcgattactgtgttataa

SEQ ID NO: 378943 - DNA, 912 bp, Salmonella enterica
atggggaatatgttgatgtcgtggacagaatctgtcacagaatgggtggctgatggtaagccgcttcaggttggtttgtcgcgttatggtagtggtccggagatgttactgctgccggcactgagctccatctcgacccgggatgagttacgggacctgcagaggtgtctgggggaacattattcgacactttccgttgactggccgggcttcggtacgttaccccgcccggaggtggcgtggcgaccggagcattaccggcgttttctccggtatctgatcgaaaacgtgattaaacctgaggttacggtggcctgcggtcatgcagcaggttacctgctggcgcaggctgcagaacatcccggttcagtgggaaatctgtgtctgctttccccgacctggcgtggcccgctgccaacaatgttgaacggacggccggattttttacgaaggctgccaggactggttgatttaccgggactgggggcagtattttaccggctgaatgtcaacagccagcttatcaggatgatgggacggggccatgtttatgaaagtccgcactggctgacgaaaacgcggctggccggaaagctctgcgtcacggaagcgtcgggcgcgcgccatgcctcgttccgtttcgtgacgggagcgctggatccgttcacggacagagaaagctttattgatacactgaaccatatcagccgtccggttctggtagtgaggggcaaatacacgccggagaaatcccgccaggaaatggacacattgtgcgccctgccgggcgtggagtctgcagagctgcccggtggtaagctttcattttatgaagaatttccggaggaaacggcccggattatccaccagtttgctttacagggaactgccggtcccggggagagtgtctga

SEQ ID NO: 378944 - DNA, 498 bp, Salmonella enterica
atgctgaaaaaagaaatgactgaaaagcttaatgaccagctgaacatggagctcttttcttccctgctctaccagcagatgagcgcctggtgctgttaccacagctttgaaggcgcggcggacttccttcgtcgccatgcgcaggaggagatggagcatatgcagcgccttttcgcctatctgaccgatacaggcagcatgccctgtatcagagcggttgacgcacctgtggctgaatttgattcgctggccgcgttatttaaaaaaacctatgagcacgagcagctcatcacgcagaaaattaatgaactggtgcatgtggccatgagcacacaggactactccacctttaacttcctgcagtggtatgtggctgagcagcatgaagaggaaaaactgttcaaatccattctcgacaagctggcgctggccggcgacaccggcgaagggctctatctgcttgataaagaaattgcctcaatggggaatggcggctga

SEQ ID NO: 378945 - DNA, 726 bp, Salmonella enterica
atgattcgggacttccattcacatcttgggcgaacaagttcgggtgatgccagtacgcctgaagcccttatcaaaacgatggataaatttgaagttgaacaagtgggagtttcatgtctcagtggcaataatatggaagaacaaaatttatatgtatatgaggcaatgaaaaaattccctggacgtattattgggtatgcctttatcaatcctaaaagcaagaatgcaatagatgaaattaataagaatcttgattcaaggggaatggctggggttaagtttcattcatggaaacacgggtactatcctgacaactgcccaatattagatgagctatttaccaggatctctgagtatgaagctcatgtgcagacacatgttggtacaagcccactaagtacacctgaagcatgggggcaaatagcaaaaagacatcctggcgtgcctgttgtttttacacatatcggctattatgaccagggatttatggccgttgagctggcaaagaatacagctaatatatatctcgaaacgtcaggtcagtatgatagttggttgttacagaaagcaatagatgaagttgatagtaataaaatactcttcgggacagactggccttataagtatcattcaattgaactggaaaagtttaaatatttaaacgtcgataaggtcaccaatgagaaaatatttaacggaaatgcacggagattgtggagattatga

SEQ ID NO: 378946 - DNA, 384 bp, Salmonella enterica
atgacaaatttacttattgtcagccatggtaattttgcttcaacattacttgaaacaagtgaaatgtttattggtaaaagtgaaatcgttaaggctataaattatatgccagaagaatcaccggatttactttaccaaaaaattgatgaggccataaaaggaaatattaatcctgatggcgttattattttttgtgatatgaaaggaggtagcccggctaatgttgcaatgaagattgcatcaaataataaaaacataaagattgtaacaggagtcaatattccagtgattgttgaagccataactctggctgaggacgaaagtttagatgaactcattgaaagtttatcaaaagtcataccaaattccgttgaaataatttaa

SEQ ID NO: 378947 - DNA, 477 bp, Salmonella enterica
atgaccaatttaaatttactacgagttgatgagcgtttgattcatggacagattgttacatcttgggttgcaagatctaaagcagacacaatccttatcgctgataatctggttcctgatgacgagcttcagtgtgatttattagcgatggcaactccccctggtatagaactgaaaatattttcagtcagggatgcagtttcctggatcaatagacagtctgatgcccgtgtattgttacttgtgaaaacaccaatggttgttaatgaactgatagaaaatgggcttgagatatctgaaataaatgttggtaatatgggtagtaaaaatggcagggataaatatgctactacattatggcttactgaagaggagaaaaaagagttttacaaattgattagccatgggaaaaaagtaagtcttcaggtattacctacagactcacctgtagatctttctgtgttgctccagaaataa

SEQ ID NO: 378948 - DNA, 771 bp, Salmonella enterica
atggaattttggcaagcattattaatatcgttatgggttgtaatagcaatctgtgatgatcaaacatttcagtttcatatatcacgacctttaataactggacctgtaattggtttgattcttggtgatttacatacagggcttttggtcggtggtactgttgagttaatgtttctggccattatatttgttggtacagctgtacctccaaaccatactattgcggctactcttgggacagttcttgccgtgagttctggcggaaacattgagattgcaattgctgcagctcttccggtagctctcataggacaaatgatggatactctccagaatactgtcataaatgttttttatttgcatcgtgttgattcagctgtaacaagaaatgatatgaggggggtggttagaaataatctaatatttcctcttttaacaaatgttattttgtggggattgcctgtattcattgcggtttatcttggtacacaaacagttcttgatttaatggctatggttccagaaaaggttatcaaaggactggcggtaggcggaggactcatcggggctgttggttttgcacttttattaaggtctattaaagcaaaacatgtatggccaatgtttctaatagggtttgttttatcttcctactttaaattaaatttgattggaatttcagttctggcattcgctttaataattttacaattacaaaagatgaaaaaagaagatatgtcaaaacaaaagaatggggaggtggttaaatga

SEQ ID NO: 378949 - DNA, 807 bp, Salmonella enterica
atgagcattttgactaaaaaggatttatggcgtgttttcataaaccagttttctattcgcagttgtaacaatttcgaacgtcaacaggctgctggttatactcaggctatgttacccattatcaggaaatgttatccagataagtcacttcaaaaaaaagcaatggaacgccatatggaactgtttttgactcatgatatggggtctgcagtatgtattggtgtctcagccgcgatggaagaacgcatagcacagtccggagatatctccgaagatagtgtaaatgcggtaaagaccgccatgatggggcctgttgcaggtttgggggatagcctgattcagggaacggccagaccgatactggccgggctgggagcttcgtttgcattgcagggaagtataataggaagtatttttttctttatatgtatgatgtccatttcattatcaattcgttggtttggtgttttccaggggtataagcagggagttaaacttgttacaaatatgcagaagtcaggaattatcgctaaagttactgaattggcagctattgccgcttatatgataagtggagcctttgttgctattatagtaactgcgcatactccaatatcttttactgcaggcaagacaactattacattgcaggaaacacttgataatttaatgcccggcattataggtttaatttacacagggcttatgtattatcttataagcagaaaaaatatatcagctatttcactgatgatctggactatggtttttggggttattatggtttatttcggcatactatcgtag

SEQ ID NO: 378950 - DNA, 723 bp, Salmonella enterica
atggttattgattttaatgttacaataggtcactttccggaaggaaaaaaaataggacatgaagacatcttaaaaattatggatcgggcggggatagaaaaggcggttgtatcaacaccaggtttctatagcgatcatgaagaagtagacttcctttatctggaaaccaaaaaacgtttagatcgtcttattccatttgggatacttaaccccaagtcatctcaggtggaaagtaaccttagaagaatctgtgattacggatttaaaggaatcaggtttgaccctctgaatcacggttattcgccttctcagtgcgctaaacttgacgaggttttatgctggattaatctgctaaagaaacctgtttcaattacaacaggaataacaacctcaggggatcctgctcaatggttgtctttgatccgtaagtatcctgaactgaaatttatattacttggaatgggggcttttgattttggttatggatgtgttgagtatgcctctcagatgaaaaatatttatcttgaaacatctctacagtatgaaatacaaattatcaaaaaagcgatttctcttcttgatggtgacagaatattatttgggagcggagcgcctaataaaatacctgaagttgagattctcaaaataaaatcagctattaaaaatgaaagtttttacgaaaaaataactttttcacaagcacaaaagatcttgttaatataa

SEQ ID NO: 378951 - DNA, 1065 bp, Salmonella enterica
atgaataaagataaagttttggggtgcctgattggagccgccatgggagatgctatgggggctgctactgaactacgaactattgagcagatcaaaaaagattttggtggatgggttactgattttattaaaccgccagcggatacgtttggtcgttgcaatgaagctgctcagtgtactgacgattttatacagggttattatatactgaacgaagctatattaaacaaaggaattattaccgaagatgtgatggtaaaggcatttcggcattggcttgattatccatactatttgaattttacagggccaactactcgtgcggcaatgcagaaattattcaatgataaacgtatgtcattgcagggtgctgtagaagcttcttcgcaaccctcagatgttatattgattaataatggaaatgtagctgccacaaatggggccgcaatgaaaatatgggtttctgtccttctgacaaaagaattaagttatgaagaaaaagaagaacagttactggctaatgtttattcagtatgtaaattaacacataacaatgtactatcagtttccggtgctgctgcagtagcgtttgcgatcagcactgcactcgatgaaaattgtagctttgctgatatttttactgcagctatagacggtgctgaaaaaggctattattacgcgttcaaaagaggagcaatgatggttgcaggggcttctgttgctgaacgtatcaaacttgccgtcagtattggtaatagttacaatgactggcctgaagcggttaaaccgctggcggatattatcggtagtggtcttcaggcaaacgaagcagtaccagttacttttggccttctcgccagctgcagaaaaaagcccctcgatgctatactcggcggcgtgaatattggcaatgatactgatactgtagccactatggcaggggctattgcgggagcattttctggtgccatggcgttcgacagggatgatatcgaaaagctggaatcagctaatggttttagtttccataaaatggtggctgaactggcaagtattcctggttaa

SEQ ID NO: 378952 - DNA, 969 bp, Salmonella enterica
atgagtcagccaaatcagatttgtgtcggcattgatgtagcaaaaggaactctcgatatttgcgcaggagccggcaacacgtccttcactgtagtaaatggcaccgatggctttgagaagattattaatgcccttaaagatgcctccgtctctttgattttgatggaggctaccgggggacttgaagccggagttgcttatcacctccagtctgagggctatgaaatagcggtagttaatcccagacaggccagagatttttgccgggcaatgggatacctggcaaagaccgacagcattgatgccaaagctctcgcacagatggctgatgtcattaacaaccatccggatcgtgaacgctttattctttccctgcccgataatgaacgtcaggtccttactgccctggtggtccgtcgtcgccagctggtaactatgctggtctctgagcgaaaccgcctctacacatcccaccctgcggtaatgaaaagcgttgagtgcgttatttgtgccctgaacggagaacttgaactcattgatattgagatgagggagcacgtaaagaaccattttgttgagctgtcgcaacttctcagcaccatcaaaggcgtcggtgatacaacaatcgcgagcctgcttgctgaggttcctgagcttgggacgctttccagaagagcaatatccgctcttgtaggcgtggccccaattaacagggactcgggaaaaatgcgagggaaacggacgattttcggcggtagagcaagcgttcgtacgactctgtacatggcaacactgtctgctgttcgctacaaccaggcgattaagaccttttacacgcgactcgttcaggctggtaagcccaaaaaagtagctcttgttgcctcgatgagaaaactgcttagcatcatcaacgccatgatcaaaaaaggagaaggatgggacaattctttccataatttggccttttaa

SEQ ID NO: 378953 - DNA, 735 bp, Salmonella enterica
atgaagctggataaatcaagttttgtaccattatacagacaactggttactgttttttacaggcgaatacttgaaggtgtttatccacttcattcattagttccggctcagaaagagatagcaaatgaatttgacattagtctcatggttgtgcgtcaggcctggcaggagatgataaatgataaaataataatctcacacagagggcatggtagtattgttaacaagttacctgatggacggaagttgaatcatagtattcacgggcttacttatgattcgggtaaaaaagccactcataaattaattgaattcaaaacgagtcagaatgattctttaatttgcaatcattttcttgaaagcaattgcaaaggttatacttatctgaaaagactgagatttgttgatgatgttgctgtatctattgagagaaactatctcaacagcaatgttatagaacagtttgatgttgacagatacaataaaagcttatcgctgtattcatatattacagaaaattataatatttctatattatatgcgaatgagaaaatacaggctgtaaatgcggataaggatatagcgaaaacgctttctgtttctgtcggaacacctttgctttctgttgtaagaaaaacattttgtcaggagggtatgtttgaatatactgagtatattattaagtctgaatattttggtgaagtgagatatgataatatcaggccagagtgttaa

SEQ ID NO: 378954 - DNA, 591 bp, Salmonella enterica
atgctgttacgccatatccgacgtttcgtgtccttcattcccgccatcatcgtcgcggccggactttctctcagtgccattgctggcgttcacgcagaagacctcacgccctggaaaggctcctgggtgtctgcggtttcactgttaaacactcctgccgtggacagtgacctgcaggctgcttacgaattacagggtaaaaaagatggcattaccgcgcaggaatggaaaacaaccaaactcagcaaatggaacaccgccattaagggcatgacggttgatgacaataccatcacgttcacgctgggtgacagcagccaggtcaccgggaaatatacatacgtcggggtcaccacaactcacggggagcatgaactgcagtggagcaaatttaccagcgaggatgagggcgcctggcgtgccgtcatgctgatgcagccggaaatttccgaagaccacactgcgctaacacacttccatttccgctatggcaatgacggttttgagccactgcaggatgccagcgtcttccccaccatggtggcaccggacaccacggctgcgcagttcgctgctgattttgcagagtaa

SEQ ID NO: 378955 - DNA, 1416 bp, Salmonella enterica
atgggaataacgagaagaaaactgttgactggcagcgccatcgttgttgttgccgcaggagcaggcgttttaacaccaatgctgatgcaggaagggagactggtatcaggaagaccgagggttggctttgttaatggtatggagggacggatacctgcacagaccgatgttgtggtgattggagcagggattctggggataatgacagcaattaatttagtggaaagaggtctgtcggtcgttatcgttgaaaaaggtaatattgccggtgaacagtcttcgcgattttacgggcaggttatcacatataaaatgacgggtgccacatttctgcttcatcatacagggaagcaacgctggcgtgagatgaatgctaaagttggtgctgataccagttaccggacacagggcagggttgacgttccccttgatgaggcagacctggagcatgtcagaaagtggattgatacaatgattagggagacaggaaccgatatcccctttaaaacaaggatgattgaaggagacgaacttaagtcccggcttaagggggcttcatccgactggaaaatcgcgggttttgaagaggattcaggcagcctggatgctgaaatcaccactttcgttatggctgaatatgccaaaaaaatcggggttaaaatatatacaaactgcgcggcaagagggatagaaactcagggtgggaaaatatcagatgttgtgaccgaaaaagggtcgataaaaacgtcccgggttgtactggcaggtggcgcatggtcccggttatttatgcagaatcttgatattaatcttcccacattaccggcctatcagtcccagcaaatcattagcggagctcccggtgcgcctggtggcaacgtggcccttcccggaaatatctttttccgtgagcaggccgatggaacctatgcaacatcgcccagaattataattgcccctgttattaaagaatcatttatatatggatataaatatatacctcttatatctcagcctgatttccccgtgcatatttccttgaatgagcaattaatcaattcgctgatgcagccaacacactggaagctgaatgaagtttcgccattcgaaaaaaacagggatatggtggctgctccggatattacggggctggatgagtcactggaaaagctgaggaccgaattcccggcgttcaaagagtcaaaactgatagacagatggggtggggccatggcaatcgctccggatgaggatcccatcatttcagtcgttaaagaatatcctgggctggtcattaatacagcaaccggttgggggatgacggaaagtccggtttcagccgaacttacagcagatttgttgcttggagaagaatcgttcatggatccaaagccattcagcctgtacagattttag

SEQ ID NO: 378956 - DNA, 195 bp, Salmonella enterica
atgaaggccaaccctggtgttcgttgcgttttccgggaatggcccattttcgcgcgcagctggctgatttcaatgtccgcggcacagaccggactccatgcctggaaacagaaaggagcggatgcttatctggcctgtcataacggggtattcgccaccggatcttttgaggggaagctgacgataatgatataa

SEQ ID NO: 378957 - DNA, 378 bp, Salmonella enterica
atgaaacataaccgattactgaccattaccggtgccaccaccctgcttatttcttcactcttcacgcctcaggtactggcccatgctcatctgaaaagtgcagagcctgctgccgaaagcacggtggaaagtgcccccgggcatctgacacttcatttcactgaagcactggaaccaacattcagtacggcttacgtaacagacagtcaggggaaaaccgtaacaacagaaaaagcggttgttgatgatgccgataaaagtgcgttaattgtcaccatgggggatgtgctgccgccagggaaatatatcgtaaactggcatgtggtggcagtggacggccataaaacgcagggggactatgcctttacagttaaataa

SEQ ID NO: 378958 - DNA, 270 bp, Salmonella enterica
atgccaggcaatagccatgacagcgaaacgacatactgtgaaatgaacatcagtacggatgcgctggaagacctccactgcctcctcgacacacactcagaaaatctgcaggaaaagctgcttctgctggccgtgctaacccactctctgatgaccgcacaggacattgagtattttgagtctcgcatgccctgcggacacagtattgagtttattaaccacgaaaatcaccagtgcggctcctctccctcgtcagttcacctgcactga

SEQ ID NO: 378959 - DNA, 261 bp, Salmonella enterica
atgagtaaccgtaacaaaaagaataaacaaaaaagccagcctgtcacgccggacgctattctggcagtggtccggacgctggagtctcacacctgtgacccggaggatgccctgatggtactggcggctacggcgcactcgctgatgacgtcactggacgtacacatcattgaatcccgtacgcctgacggactgggaataacactcacccgcatcgatgaggaaaataagcagaaagcgggccgccagcacctgcactga

SEQ ID NO: 378960 - DNA, 420 bp, Salmonella enterica
gtgtcccgcaatcttattatttcaccgttgttactgagcgtactgctgctgtcactgtcgtcccgggcggcaatggtggtgtacaccgaccatgcgcatccgcccgcaggcgtgaccggcgatacccgtgtggtctggctcgatgcgccggagcaattacagcagtcgctgtttggctccctggcgtcagaccccaaagaagctgaacgtcaggcgcaggcggtgattcattccgcaggctggcagcagaaacaggctgaactggcgcaggcttaccggggactgttgcaggcctggcagatggggctggagaaatacccggcggtggtgtctgacgaccgctatgtggtctacggcacggctgacgctgtggtggcggacggcctgttccgcagtcacagcgcgcgggaggagcgatga

SEQ ID NO: 378961 - DNA, 1263 bp, Salmonella enterica
atgtccctgtccgacgcgaaaatccgcagtatcaagccttctgataacccctttaaactgaccgattctcatggtctgtatctgcttgtcaatccgggcggttcacgcctctggtatctcaaatatcgcttcaaccgaaaagaatcccgaattgctttaggtgcctatccgcaggtctcgctttctgacgcccgccagcagcgcgacggtatccgtaaactactggcgcagaatatcaatcctgcacaacagcgtatgactgaaaaagccgccgcgtcaccggaaaaatgctttgagaccgttgcggtgacatggcacaaaaccaacaaaaagtggtcggctgactatgcagagcgcattcttgccagtatgaaaaaccatatcttcccggcaatcggtcatatgcccgtcacaatgctgaaaacgcagcatttcacggcgttgctgaaagtcattgaggacaaaggccttctggaagtcgcgtcccgaccccggcaacagctttgcaacatcatgcgctacgccgtgcagcagggactgaccgaaagcaacccggcgatgcatctggaaggcgtcaccgcgccgccggttaaaaatcactatcccgccctgccactggagcggttgcccgaactgctggaacgtattggtgactatcaacaagggcggcagttaacaaggctggcggtggcgctgaccctgcatctgtttatccgttccagcgaactacgctttgcccgctggagtgagatagatttcagacacaaagtctggaccattcccgccactcgcgagaccatagagaaagtccgtttctctggtcgcggcgcgaaaatgcgcaccccgcatattgtgccgctttcccgacaggcaattgccattctaaagcagatacacgaaatttccggccatctggaactggtgttccccggagaccataacccgtataagccgatgagcgaaaataccatcaaccgggcgctgcgtctgatgggctacgataccaaaaccgacgtctgcgggcatggcttccgggcaatggcctgtagcgcactggtggaatctgaactctggtcgcgggatgcggtggagcgtcagatgagccatcaggagcgtaacagcgtgcgggcggcatatatccaccgcgccgaacacctcgacgcccgcaaggctatgatgcaatggtggtcggattatctggatgtcagccgcgagggatacgttgcgccctatatttatgcccggcggcataaggcagcctga

SEQ ID NO: 378962 - DNA, 798 bp, Salmonella enterica
atgggaattctggagcaggaaatgaagcggcttgcgcagcaggcgggcggcagccataaaaccgttcacgatcgcattaagctggtgcagcggttttgtgaacgtctggtactggtgcagaatgtgcagatccgccgggtggagcagcttaaggcgcgacatattgaaggctatgtccgtaaacgactggcgcagagtgagcggctgaataacctctcgctgggattgtccggcgcatcccgcaacggtacgaagctggctatcacaccggagcgctatcgtcatgtgctggagacggcccgtgcaaaagatccggggatagcagcagcgctggaactctcaaggctgatggggctgcgttcgcaggaggcggtgcagagcgtacagtcgcttaaaacgtggcggcaggcgctggagcgtggcgatgcccggttaaccgtggtattcggcaccaaaggcggacggccccgcgagacgattattcttgatgctggcgctgtcagaaaagcgctggataatgcgttggcagtggcagaagatcatcacggcaggctgatagataagccggatctgaaaagcgcgatgaaatattggcacagtctggcgtcacgtctcgggttaactggcgcatattccccgcactcgttgcgttacgcatgggcgcaggatgcgatccgtcattatctggcgcagggattttgtgagaaggaagcgctggcaatgacggcgatggatttgggccacggcgacggacgtgggcggtatgtggcgcaggtttacgggcgggaggttgactga

SEQ ID NO: 378963 - DNA, 207 bp, Salmonella enterica
atgatgcagtctgactggcatcctgccgacattattgcggcagtaagaaaaaaaggaacctcactggcggcactttctcgtcaggcgggtctggcctcttccacgctggaaaatgcactctaccgccactggcccaaaggtgaaaaactgattgccgatgcgctgggtgtcacgccagaacaaatctggccttcgcgctaccgctga

SEQ ID NO: 378964 - DNA, 468 bp, Salmonella enterica
atggctacgatccccactcaaacacacccattactctccgttcccttcaatgccaccacggacttcaccgtactggcagaacactgcaaacagttcgctgaaatcctgattgaacacgacgatcctacgctgaaaatggcgctctgcggcaggcttaacgcctgtctgaggctgctccagccctcgctgctcgatccgatcccggatcacatgattgacagtctgaccgttgacacactccctgccagctcaccgcgtttcgatcccgaatgtaccgaactttgccactactgccttgccctgacgcaggtgctgacgggacaggggcggttaccggaaacccgaaattaccttggctgcctgctgtacgacctgatccactatttctctgatgaaatcactgctccgcgctggctacgtaccgccgacggcgtgaaatttattgacgggatggaggccaaagcatga

SEQ ID NO: 378965 - DNA, 1263 bp, Salmonella enterica
gtgcattctacagaatatgcaattcaacaagctctttacgcagtcggtacagctccgacacgtagtgaagctcttgccagttttgaggaaaatcagcatttattaaaagactggaggatcctgtatgccgatgagagtaaagcaggaccgctctcccttaggcgagctcaattttctgaaaaaggttttgtatcaacgttattctctgggcattcattatgggttctggatcatgatgtcatttcatcatcagataccatgatgtttcaagttggctacggtacttatattgattctaatgcagcaagttttattcgttctttggcctatcgtgaagagcctaaagaacatctgttgaatttttgtcgaatgctttcagattcattctcattcgatgaactatccaacattaatccctatctttatttatgggaagcacaaagagacagatcgccagaaacggtaactgggatccgggaaacaatggctgcattgtttgccctttcctggattaaacaacccctgaatgcagaatggggaaaaatgtacaggaaattataccaggagcaggcggaagcagaggctgaccgttttctgtatcaattttacctgaacttagatgccggtttaggaaaggcgatcgaagaccaagttgacctactggaagctatgctattaagaacgaagttaatcgaactgtcttccaaaagatcagctcagaacaaattgaatgaactgttgcaattcatgcatgatgaattatctaccatgatgattcgcgaattacttgtttgtgccgacattctcttccgtgaaggaaaatcacagatgtcaaaaaaactcgatggcttacaaaagaaaaagagacccttcgatgaactgaggaactgcgccagagatttaaatatgctcaggagcatggatcagctaacaaactctatctcggatcacacaaattcttcattttacatcgccaacttaattacatttgatcgcgatattatagatattattcagttaacagaactgcgcgctattgctctacgtcgctcatcttcagacgcgttcccgatttataatcggcaactggatacatggttatcagagaaattaggtgaaaaacgcttgagcggcttagaaaatatattcaggaaggatggcttcgacacacgctccagagccagaagtcggagtaccgtgaaaacgatactgcaagaagacagacaaaaactggcctgtatcatcgaaaaaatcaatagttaa

SEQ ID NO: 378966 - DNA, 6279 bp, Salmonella enterica
atgtctgacagcctgcttgttcgcaccagtagagatggcgatcagtttcattatctttgggcggctcgccgggcccttcgactactggagcctcagtcaactcttgttgccctaaccattgaaggggcatcaacgacggaaatgggctctcagccagtggttgaggatggggaggagctgattgatattgctgaatattacggcagtaacgagctcgcaacagcaacaaccgttcgttatatgcagctaaagcattcaacgctgcactcaggtactccatttcccccgagtggattacaaaaaaccatcgaaggttttgccactcgttataaagcacttatacaaaaaataccggtagaaacgttgcgaactaaactggagttctggtttgtaacgaatcgtccagtcagtagcagcttcagtgaagcgatcaatgatgccgcgagccaacacgttacacgccatccacatgatctggcgaaacttgagaaatttaccgggcttcaaggcgctgagttatcgatattctgccagcttttacatatagaaggtcagcaggacgatttatggagtcagcggaatatcctgctaagagaatcagcgggatatctccctgacctggatactgaagcccctctgaaattaaaagagttggttaacagaaaagcgttaaccgaaagcgccgcaaatccttccattaccagaatggatgtgttgcgtgctttgggggtggatgaaacagatctttttcccgcgccctgtcgtattgaaagaatagaaaattccgtctcaagaactcaagaggcgacgctggttcaacgtgttgttgaagcatccggcgcacctgtgatcatccatgccgatgctggtgtggggaaatcaattttctctactcatataggggagcatcttcccactggttcagttagcatcttatatgactgcttcggactgggtcagtaccgtaacgcttcttcttaccgccaccaccatcgtacagcattggttcagatggctaatgaaatggcatctcgtggtctctgtcatccattgatcccaaatgctggtactggcatatcccagtatatgcgtgcgtttctgcatcgcctttctcagagcatttcaatactccgggcctctgagccactggccgtattgtgtattattattgatgctgcggacaatgcacagatggcggcggaagaaattggtgaaacgcgttcttttatcaaagatttaattagagaaaagcttcctgatggagtctgccttgtcgcactttgccgaccttatagacgggaattgcttgatccacctcctgaagcactcacattatccctacaagcttttgatcgcgatgagacagccgctcatcttcaccaaaagtttccagatgccagcgaaagtgatgttgacgagttccatcgtctaagctcttgtaatcccagggttcaggctctgtcattatcacaaaatcttccactgaacgacacactgagacttttggggccaaatcccaaaacggtagaagatacaattggtgaagtgctggaaaaatccattgcacgcttacgtgatacggccggaatatctgaacgtgctcaaattgatacgatttgttccgcactggcaatattgcgtccattaattccattatctgtgctatctgccatttccggagtagctgattctgctattaaaagtttcgcacttgatctgggacgtccattaatcgttagtggcgagactattcagttctttgatgaaccggccgaaacatggtttcagaggcgttttcggccatcggccgctgctctgcatcagtttattactaaactgagaccactaacaaaagatagttcctatgcagcatctgttttacctgcattgatgctggaaggaaaccagctttctgaactgatcgagctagcgatatcctcacaagctctgcctgaaaccagcgcggttgaacgcagggacatagaacttcaaagattacagtttgcgttaaaagcagccttacgcacaggtcgataccaggatgcggctaaactggcactgaaagctgggggagaatgcgcgggagacaacaggcaaagagtcctgctaagggacaatatcgatctagcagcaaaatttgtgggaagcaacggcgttcaggagctggtttcccgtaacgcatttccagatactggctggcctggctccagaaatgcttattatgccgcaatactttccgaatatcctgaactctcaggagaggcccgcagtcgccttcgactcaccatggagtggttaacaaactggagtcaattaccagatgatgagcggagcaggcaaaatgttaccgatcaggacagagcggtaatgctcattgcctgcctgaatattcatggcgcggaagcggcagcaagggagctcagaaggtggcggcctcgagaactatcttttgacgctggaagaattgtcgccatgcagctactggcccactcccgttatgatgaacttgatcagttggctattgcggcaggaaacgatatcagcctggtcatgggaattgtactggaagcaagaaaacttcaccgtccagtcgctgaacaggcaatcagaagaacctggcgtctgttaacgtgtccgcgagtcactattaaaggcagaaacagcatacatgaccagacaacatctgctatcactggcatggtggaaatggcacttaggcaatctgtttgtacagaggcagaagctctccaattgctggctcgttatttaccaaaggttccccctcgtgttctgacttctgagtatagtaaagaaagagttgcttacgtccatgcatacgctcttcaggcaaatctgattggcacgcaattaacgctaagtgatttagcctcagccgaggtcaaaaaagaactaattgctggaaagacccatagcgaatctgatgatctgcgtcaactgaaacaatatagcggagtattaatcccctggtacaatttacgggccaaagtaattcttggtaaaactgagaaagcagacttagaaaatgaactaagcgatactcaaaaacaatcgactgctattaagggttactcttaccctgagcattcattagcaccaaatgagattgcaaatgtatggtttgatattctgatcgaagcaggtaatgcatcaagagacgatttggaaagcatcatcaaatggagtaagcaaaaagggaatagagtatttacaccaacgtttcaccgtttcagttctgtatctacagagatttcagggcttgaagggctttcatatcacttcgccgagctcgccttgtcattatggaaagatgaacactctgatgctcaggtcaaagctgacggctatatagacctttcccgctcgctcatttcacttgatgaaccagaagctaaagaatacttcaaccaagcgattgaagttacaaataagctgggagatgaaaatttaagtcgatgggaagcgatacttgatgttgctgaatatgttgctggtaaagagcaagccccccctgaaattgcctataaactagcccgatgcgctgaacttaccagagaatatgttgatcgggataaacactttgcgtggagtgatactgttgagattttagctgagttatgtccatcttcagccatggcaataataagtcgttggcgtgaccgtacatttggcgatcacagaaacatactggcatggaccattgaaaaactcgtaaagaaaaataaaattaacgcactcgatgcacttcctttcattacatttgagaatggctggcataaatgcgacttgcttgactcagttttatcctcgtgtactaattgcgaagataagattgcggcattcgaagtggtttaccactatacaaaatttgacgtacaaaatatccaaaatcttaaaaagctggatgctgttgctacatcattaggtattgaacactcagagttaaaagaaaaaatctcacttctacagtgtactgaggtgacttcaaaaaaaaccagtctatctccgaatgatagtgagcgggatcacgcccaggaatggaattcagtttttaaggactgtgatttatcgtctattgagggtgttagtgctgcatacgaaaaatttcgtagcaatccggaactctattccaaagaaactttcattaaaaacgcaataagcagagttcagacggggaaagaatgtagttttatcgctgctgttagtgccatgtctcactggggtctttatgatgtcaaatatatttttgaatctatacctgatgaatgggcatctcgtttaagcattaaaagcgccctggcagatttaataaaagagtattgtcaacgtttctgtatgcggataggtaaaagtcgtttttacgagatttttcccttcggtctggccagcaggctttctggtataagtgaaaaagagattttcggtattgtcctggaggctattgcagaatcaccagagcccgcaaatgctgaccgtttgtttagccttccaggccttcttgtgagtaaactgaagagtaatgaagcattaaatgtattatcttatgccttggatttattcgacgaggtgctaaaagatgaggatggtgacggcccatggaacgagaaattatctccgccaactcatgtagaggattcacttgcaggttatatttgggcgcgactgggttctccggaggcagaaatgcgctggcaggcagcacatgcggttctggtactatgtcgaatgaatcgtacaagcgttatacaaggaattttccagcacgcgataaatgctaccactttacctttttgtgatcgcaatctgcccttttatacccttcatgctcaattgtggttgatgatcgctgctgcaagggttgcgctggatgatggaaaatcgctgattcccaatattgattatttctaccgttatgccactactgatcagccgcatgtattaatccgactttttgctgccagaattttacttgcgctgcatgatagcggtctgatctctatcccagcacaagaagaggataaactccgaaatataaaccagtctacgactctccctgtgcttgatgaagttgaagatcatcgaggtgaagattcatatacttttggtatcgacttcggcccttactggctaaaacctctgggacgttgtttcggtgtatctcaaaaacagttagaacctgaaatgcttcgcattattcgtgatgtccttggttttaaaggtagccgcaactgggatgaggatgagcgtaataaacgacgctactatcaggacagagataaccatcatagccatggttcctatccacgtgttgatgattaccatttttacctgtcataccatgcgatgtttatgacagccggtaagctattagcaacaaaacctcaagtagccagccgctacgatgatgttgaggatgttttccaggactggttaagaaggcatgatatttctcggaacgatcatcgttggctcgccgatcggagagatatacagcctaaagagcgttccagttggcttaatggcatttctgataatcggaatgaatggctagcatcaatctctgaaaatatatttgacgaagcactataccccaacgccgagctattaacggtatggggacattggtctgacgtttgttcagatcgaaaagaatcaattgctgtccattctgcgttagtatcaccggagcgatctttatcgctcctcagagcattacaaacaacgaaaaacgtatatgactttaaaatccctgatgctggggatagtcttgagatagatcatgcatactacaagctaaaaggatggattaaagatattactgaatattatgggattgatgagtttgatccctgggccggtaatgtaaggtttccaatcccagaaccagcctcatttgtcattgataagatgaaattaactaccgataaggatcatcgagtatggcattcaccttcttgtgtcgaaccggcgatggtttccagtatctggggccatctatcaggtaaaaatgaggaggaaaaatcacatggttataggctatgtgcttcaatacacttcataaaatcagcattaaaaacattcaacatggatctcattttagaggttgatgttgatcgctattcacgaaacagcagatatgaacggaataatgaaaatgagctcgacaatatcccttcaagcactcgactcttcctcttccgacatgacggaaccatccacacgctatacggcaattatagaactggggaaaaaactagttga

SEQ ID NO: 378967 - DNA, 726 bp, Salmonella enterica
atgacggaaccatccacacgctatacggcaattatagaactggggaaaaaactagttgatgagcttgagctaaatgactctgttgatacgttaagcagatggatggctcatcatatcgcagagctcatttatgatgctgaacattgtacagacgacatcgtccgtacagctaaacaagcggagattagggactctatctggtcattctggtctaacagatacgaattgccaattggtaccagaccatttcaggagctcgaacctattctaagaaccttaaaaggtcttgatcctgaaaatgagcaaccgagatttttttcaccttaccgagatctagttcatgcagaaaaagaaaccagtgaggtccaaaaatggctaaccgccgctaaggatattgattctgtagcaaaaatactgattgattactgtttatcgttagcagcagagaatgctatcgataaatcccaagaatgggtgaagttagcacagaaagctggattggacgaagatgttgatctgcttgaaattcgtatctttcagttacgaggtaatccggccaatacagacaatcccaataatgcgcaacggagaatactggaaaaaaggcaaaaaaggcttgaagcttttctcttattgggctcccagttaaacgaacaactcaaatctcagcttgaagccttaccagcaattgagaatgagccaacggatgacgacgaagacttttga

SEQ ID NO: 378968 - DNA, 681 bp, Salmonella enterica
atgtcaatttccagatttctaatcgaaaataatggttcaaatcaagataatataaaaatagccttaagtaaggcctaccatctatgcaaagatgcgggacttcaacgagtatctctgctatttcctgcgaaaggaacgttttctcattctgatatagcaacattccttggaacccaggcaacaaaggcattgataaaaggtcaaattatcgatctgggtagtaatgttcgactagagtttaatacacctaaaaattttcccatatatggaaaccatgacattgtattagctacatatttaacagataaagacatggatattgttgatagtgttcaaaacatcaatagtatcgtctttttaccttggtcagaggaggaaggtaaacgctggctttctacttgggagcctgaaatagttggcccatctacctggaaaatcctaaaaccagaattgccagaccctattagtaatgaaattttaagactcggtcgctgcatcaacatgtcaacagggcttagccacccatctgataaagacagggcaaaacgaatttttgctgacctgaaaaagcaaggacttaaagcatctgaagaagcaatcagacaatttgcagtcaacaatggctgggccccagtcagagcgcaggagctagctagttttgccaagaaatatgtggggtaa

SEQ ID NO: 378969 - DNA, 267 bp, Salmonella enterica
gtggcgacagcggaagccatgctggaagcgggttataacccccagaagcagatgcttgctttttgcacggatattgatccgctggcggcgatgctgtgctacatccagctgacgttgatgcatattcctgcggtggtttcaatcggcaacagtctgacgatggagattacgcgggagatggcgacgccggcataccggctgggtctctgggatctgaagctgcaccggcaacagtctgaacatgaacgcaggcaacaggcggcgtga

SEQ ID NO: 378970 - DNA, 912 bp, Salmonella enterica
atgccggaaagtatttatatccagcggcagtttatgacgtttctgggtcttgaggtttatgcggaggaaattttctttcgggtggacgacagggacaccgattatgttaacaccgacatggtactggatcgtgaccgtctgctggcggtgatgcgcttcctgctcgatgaggtgacggagcagaacccgcaacagcgggagaagtgccgccatgccgagcaggtcctgacactgtggatccgcggcctggatgcgctggcgcagacaatgaacgagatggcgcttctgccccggacggtgtcagagttcagcgggcgggtggatcggttattacccggtgaaccacaggcgctgctgtccctgccggatgaggcgtttttgcgcctgactgcacaggggcatctgatgtccggtgagcaggtgagccggcagaatctggaggcaaccctgccgtactgggaccgtttcgtgaccctgatatcagcccgtcttgccgcagcgtgtgactactgcctgctgcaactgagcagactgtaccggaatctgaacacggaaccccggcagttaaggtgctttacgctgccttttggccggctggagctgcatatgcagccgcgggatatgagcggttgtgaacacattctggagtatgacgatgcttcgatcgcggattacctggaggaagtgatggccggcagactgacgccggttcgcatggaggccagggtgatttaccgcaatgacgctgaagtgtgtgttttccggagagatgcagacgttatcgacgtaagccatccgcacgtcagtgactggcgggagccggtcacggaagcgctcgactggatacgacgtgaacgtacatcgctggttcagacggtatcgcgcaggccggtactgaaactggcggcctga

SEQ ID NO: 378971 - DNA, 900 bp, Salmonella enterica
atgatttatgactggtatatacagcagcaggcagaagcggcatacggcctggcgctggacgatgaggatttcagctggcagttccggggcgttgcatctgaccacgttaacacctttatgctgtttgaacgtgaaaaaatgttggcggtgatggaaaccatgctgggttcactggaaagtgatgaggtgacggttacccgctgccggcaggtactgatgctctggataaccgggctggatacactggcccgtgaacgtaacagcagtgagctgctgccgagggtacacccccacagcagcggacagaccgaccagttgctgagaggtgatatccggccgctgcagcagtgcagcgaggaggaataccttcgcctgaccgggcagacggatttgccggaaaaccagcgaataccgcagaagacctttaatgccacggagaaatactggcagcgatttgaggcctggctgggacgccagctgcgggagacaacggaacgctgcttccggcagttgagccggtttgtggaaaactgtaacttcgaaccccgtatactccgggagtacaggggagaatacggggtcattaaagttggcgtcatgccacaggatatcggggccatagatgtgatggagttcgatccggattacatcgtgtcctgggtggataaagtggcggacggcgtgttcacgccggttcagtttgtggcgaatgtgttctacaggaacggcgtgcagatggcgtcgttccggggagacacagaggtggaggatatcatccacctgacagcgaaggactatggtgatgttgtgggacaggctgttgagtgggtgcgtgagcagtttgacgaatctgcagcagtcgaccggcctgtcgcacagttaccacgtcttgcagcataa

SEQ ID NO: 378972 - DNA, 1320 bp, Salmonella enterica
atgaaacttattaataaatcatcagcaatttgtttatcattatcatttttcagcatatctgcttattgcgcacaggaacttaatcggaatatatttaatgtgggtggtaataatctcactctgccagaaagcgccgaatatatgaatgcaattaaatcaggatcagcttaccaacttgcggttgatcctaaaagcaatcttctttatatgagctggggatacagattaggttctaatcctgtcgctggtattctggcctttgaattggataatcttaaagcaaaaggatttattaatggtattcatgatgtttatggtctggattttgatcaaaagaataacagattacttgctgaacatacagttagtcgcaaaaccgaagacggtgagttattaacaggaaactcgtttgatataattagcttaaaagatggtactaaactgactaatacaatcgagattgaccaaggaaaaaaagaaaggaacacttttaactcacattacatttttgttaatgacattggtgacattttcatatcttctgagtcaaaaccgaaacatggcgggccggatggaatgcaaaaaattactaaatacgatagctcaggcacagaagtatggcaaacgaaagcatttccaggacttgtagcggcattaatttccaatgataaaatcatcgcaggagctaatgacctttatgaaataagcctgagtgatggagctatcagcaaaaaattgtacgccagtaaaccagaaaatggcgatgcccgttatatggccctggtaaaaggagataacttagtttatgcagcgtctttttctaagctagaaaatataaaacccaaccaaataaagtacgataatgtttatgtaattgaaaaaggaaaagccgccaaggggttttctactgttacaaataaaaaaactgtcggcgtaggtagtaccagcatcattgttaaccctgagagaaaagagttgtacaccgctaatttcaatgataatacaatcagtgtgattaatataaaaaacaaagctgatcttagtatatataaaaatatatttatacaagatgcttggggcataaacgcagttgcgtatgtcaattccaatgataatacatatatttatgcagctatcaaaggcggacatgggaacaatgtaaaatatacagatcaggggatggatgatgtgaagttagccaaaatcactcttaacaataaatatgccgacacatcctcatggtgtaaaatatccattatggatataaagtcaaacactttagattataaagaacatcagtgtaatattcaaaaaaaatga

SEQ ID NO: 378973 - DNA, 2178 bp, Salmonella enterica
atgatgcgtttctcacctatttatctgatacttttcactgcgacttctggatattcattgtctgtccatgctgaagaaacaatgctggttacaggctcaagcgaatacatgaataattctatggacaatgttgcaaaatttgctgacccaataaaagatacccctcgctcaattgtggttattccacagaaattaatacaggatacaaatgcggcttcactcattgatgctttaaaatatgttcccggaatatcttttaagagtggagacgcacttgcacgtccaggtggtgatcatccaacgttaagaggatttgatgcaacggatgctgtaactctcgatggagttcgtaatactgcttcacaatccagagaatcatttgatatagaaaatgtgcaggttataaagggtccatcggcagtttataatggtcgaggcaacgcaggcggaagtataaatatagtaaccaaaaaaccattcatcggaaattcatttacaaaaacctctcttgggctgggttcagataattacagaagagcaacaatcgataccaatcaggaattaagcgataacatatcggctcgcgtaaacttaatgtggcatgagaatgacaaaccaaaaagaaatctggtagattattcccgctggggagttgcaccttctttgttgatttcatttaacgatgctacttcattattgttaagttactaccatttgtattctaatgatatgccggattactccactccattcaataagaaaacaggtgagttacttgaaactcctcgtggacttttttatggacaaaagaatcgtgattatattcgtaatcgtgtagatacacctgaaattgtatttaatcatgattttgctaatggtgccgctatcaaaaatacaacattgtattccaaaacgacacaacaatttattgcaaccagcccgactttttccaagacaacgggggaatctgacctgctattccttcagggtaaaagtggtgattttcggactaagacattcagcaacctgacagatttgagtaatcaatttacatttggctccatgctccataaaatttctaccggttttgaatatactcatgaagaaaacaaaagacgtagtattttattgacagtggatgatcctgtaacggggaaatcatggaacattcgttcacaaaataaaagctttacttgtgctggtcaaggacttccgacgtttacctgcactccaataggtatatggaatccccatagcccctgggttggacataaatcatgggagcaggaaaaagcttatccagcaacccatacgactaacaatactgtttccggatatctgttcgatagtgtcgacgtaactgataatattatattatcagccggtggacgatatgatcactataatacacatatagatatccttggtaacccgaagtctgatattaatacgaaaaacggactatttaactatcaactaggtattgtctggctcccattagaaccgataagtctttatagctcatggagtacatcaagtaaccctgctaactcggatgcgattcaggggggcatcagcgacaaaaataaagaaaatttcaaacctgagaaattcaccagttttgaagtaggcgttaaatggacacctttacaggaacgtttaatgcttggtgtatcctggtttgatacaaagcaaaaaaatggccatttcgcagttgatccgaatgaatcaagacctatcggtgaacaggaagttaaaggtgtagaatttaatatcgaaggtaatattactgatgactggtccgtttttggtggctattcactacttgatacaaaaattacccaaagcacaaagccatcggaaattggaaataaaatgccactcgctcctgaacagtccgcttctttgtggacaaattacaaccttacgaaccagttatctttgggggcaggtgcagcctacaccggcaaaacttataccaatacatctaatagtgcttctgtaccaggctatacaacggtaaatgcgatggcaaaatatcatgttaataaaaaaaccaagctacaggtgaacattaataatatttttgacaagaaatattatgacactctttacccaagctttgctaatttcggtccaggacgtcaaattattgctaatgttgaatatgagttttaa

SEQ ID NO: 378974 - DNA, 2052 bp, Salmonella enterica
atgaataatatgcacatacaaaaactccatttctcattgtttactctgactatgattgctgctactacctctgccgaggcagccacgcaggctgaagatacagttgtcgtaacagcatcaggattcgaacagcagcaaatcaacgcaccagcgagtgttactgtcataacagcagatcagttaaagaaaaaacctgtatctgaccttattgatgctgttaaaggcgtagaaggcgtcagtattgttggtggaaatgaaaaaccggatatcagtattcgtggtttaggtggagactatactctcattctggtcgatggacgtcgccagagtgggcgtgaatcacgaccgaatggaaacggtggttttgaagcaggctttattcctccagtggaagccattgaacgcatagaaattatacgtggcccaatgtcatcactttatggttctgatgctatggggggcgttattaatattataactaaacctttcagtaaagaatggcatggtgcattgggtgcaggaggaataattcaggagcacaaaatttttggcaattcgacaacagatgatttttatctgtcagggccagttataaaagatattcttgggctgcaactttatggtggacttaactatcgtaaagaagatgctgtttcagaaggtaaaccaaagcgcgataataaaaatattaccgcaactttatcatttactcctacagaaaatcagcagtttattttagaagccgggcgtaataatcaggtgcaaacatctacacccggagaatcaatcgatgcttatcagatgcgcggtagcctgaagcaacaaaaccgaaaacgagaaacacacaatgagcggaatcattgggttctgtcctggaacgcacatggtgatatccttaatcccgaaatcagtatctatcaggaagatatcatcagaaaaataaaacaggggaaacaggataagaataatcactggaatatggcttatgatgcccgtagacctgaaattactaatactgttgtggatgcaaaagtaacagcatttttacccgataatgttcttaccttagggggacagttccagtattccaaactcagggatgattctgctactggtaaaaaaacgattaaaaatgaatcgatcacggctcaacaaaaagcactttttgctgaaaatgagtattcagtaacagatgctttgtctctcaccggaggtctgcgacttgataatcatgagttttatggtactcactggaatccaagagcttatgcagtctaccatttaacggacactgttactgtaaaaggaggaatagcaaaagcgttcagagctccatcactccgggaaatcagtcccaactttggaacattgacacagggtggtgcgtccattatgtatggaaatcgggatcttaaacctgaaaccagtgtcactgaggaacttgctattatctatgatggtgataatggttacacagcaagtgccactatatttaacactgattttaaaaataaacttactaattatgacataaatgttaaagatcctgcgacaggattgaatactttcgtatatgataacgtcgggaaagcaaatatcaggggtgtggaacttgctgcaacggctccaattgccgagtcctggaaactaactacgaactatacttttactgactctcgtcgcatgagtgatgatgaaaaactgaataataaatctatcaaaggttatcctttggaaagaacgccaaaacatgccgcaaatgcgaagcttgaatgggaactcaaccaggatctaactttatataccagcggtaactatacaggtaagcaaatatgggctgctcaacgtaacggggcaaagcaacctcgtatacgtaaaggtcttacaactatggatgttggaatgaattaccagatattgcctaatgctttatttaatttctccgtcatgaatgttactgacaagaaaagtgaggcaataaataaggtcgacggtaactggcaagtcgatgaaggccgtcgctattgggcaaatgtgaggctgagtttttaa

SEQ ID NO: 378975 - DNA, 519 bp, Salmonella enterica
atggctttttcctggagtaaagaccggattaattatctgcgtgaaaacgccggaaaactgagaacccgggaaattgcggaaggactggggactaatgtcacagtcatccgtaacatggctgcaagactgaaactgagtctgcgtgttagggggtttacacatgaacatgtggaggaggtacataggctgtatgcgtcaccggaaaacattacggtcagaaatatcgctatacagacgggactttcgccggggattgtcagttatattctttattcaggaagggggacgactccatcctgctatgagcgtgtggagtatattgagtttgaaacgacaaacggcagaaaggtcagggtggagaaagcgctgattgataccactcgtactcctccggaaaccctctacggagacaaggaggcgtatgatatctggcttcaggatggaactcgattcatggccagaaacctgtatttctctgagcagataaccgcccggaaaacccgaggaaggctggtgtaa

SEQ ID NO: 378976 - DNA, 258 bp, Salmonella enterica
gtggctgggggctttatcctgcaacctgaacaagtcgacttcatgattgaacttcccagccagttgctgcagagtcctcacccgactggtgaactgcttggctatctcgttattctgctgagttatccgttctgcttcactaacggctaccctggccttctgaatacctggctctgttcttcagggctcacagtgatcttgccgatagcacaggagattatgttgatggagtccgccattgcgttcatggataactaa

SEQ ID NO: 378977 - DNA, 282 bp, Salmonella enterica
atgacattatcctgggcaaaacacgtagtcctggaaagaaaaatagcccgttgggtgtgggaggagaaacgagcgattacgctccctgacattgcagaacgtttcggcattgatgtaccttcttcccggagaattgtgcgttcaattttgcgcagaactgacgggataaagtgttttctggacgctcggctggacgttgacaatagtggaaataaggtaatatttgagtgtctggaggtttatgaacttcctgacagctatcagccattcataagctcttaa

SEQ ID NO: 378978 - DNA, 243 bp, Salmonella enterica
atgattgaactcaatcaccttgtagccggttatgagcagcaggcaatcaccccctctttaagcggtgtcattgaaacgggaagcctgacagctgttgtcgggatgaatggctgtggtaaatccaccctgttgaaaacccttgcaggatttattcccccggtcagcggcacaatgacctggacaacaacacgtccgacagtgggctggctcagcggcacgctctggaatcacagtttccgctga

SEQ ID NO: 378979 - DNA, 351 bp, Salmonella enterica
atgcggaagcgtattgcggatgtgctggcgcgtctgggactggaggcaatggcaaaaactccgattgagacgctgtcaggtggtcagttccagcggatgctgttcgcacgcatcatggttcagcaggctccactggtgatgctggatgaacccttcacaggtgtcgatgaagtgacttctaacgacctgatggctttaatcctggaaatgcatcagcagggacagacggtgctggcggtattacacgataatcagcgtgtcacccgttattttcccgaaaccctctggctgggtccatcggtataccactggggggagacggcaatggtttccggagtgactgtagcatga

SEQ ID NO: 378980 - DNA, 861 bp, Salmonella enterica
atgatatggcatctctttttccagccgtttattgaattcggctttatgcgtcgcgcactggtagtgtgccttgcgctctcagtcagtaccacattactgggggtattcctgctgttgcgacgcatgagtctgatgggggatgcactgtcgcatgcgattttgcctggcgttgccgtgggctatcttgtgaacggtatgtcgttaatggcgatgacgttggggggattcgtagctggtatcgctgtagccctgatcgcagggtgggccagtcgccggactccgttaaaagaggatgccagttttgccggtttctatctgagctcactggcgctgggtgtgacactggtatcactgcgaggctccagtgttgatcttttgcatctgctgtttggttccattctggcggtcgatcgtgatgctgcgatttttgtcgcatgtgttgccagtatcacgctcatctgtatggcggttttttaccgcgccctggtcagtgaagctttcgacagtgcctggctggaagtgaatgcccgttgggtaccggctctcattcatggtctgtttctggcgttactggtgctgaatctggtcgcggggtttcaggtcctgggtacgttgatggctgtgggtgtgatgatgttgccagctgttgccgcccgttgctggactcacacattgccgatgatgctgatgctgtcatctttacttggtgtactgtgcgcctggctgggactcagtctgtcgtggtcagaaggcttacctgccggcccctcgatagtgctgaccgccagcgtgttcttttttatttctgtgttctttggtactcgcagcaggctgggtgcaagtctgcgtgcgcttttttaa

SEQ ID NO: 378981 - DNA, 879 bp, Salmonella enterica
atgaaacgtacggggattgtgctggctctggttctgggcattatggctcaggaagcggtggccagaacgctgaatgtcgtgacgagtttttcggttcttggggatatggttcagcaggtgggaggtgagaatgtacatgtcacttccctggttgggccggacggagatccgcataccttcgagccgtctccaaaagacagcgcgatgttaaaacaggcggatgtggtggtagttaacggcctgggcctggagggctggctggatcgcctggtcaaggcctcaggttttaaaggtaagctggttgttgcctctgaaggcattcagacacactcaatggaagaggatggagaaatggtcacggatcctcatgcctggaacagcgcagctaatggagtgcagtacgccgaaaatatcatgcggggtttgattaaggccgatccacaggatgaagccgcgattactactcgcggtacaacatatattgaacaactcagacagcttgatagttgggctaaagaacgtttcagtaacatcccgacggtaaaacgtaaggttctgaccagccacgatgcgttcggatattttggcaaggcttatggcgttaccttcctggctccgcagggattatcttcagaaagtgaagccagcgcggcagacgttgccgccctgattaagcaaatgaaggccgagcatattcagacctggtttatggagaatcagcttgacccgcgtctggtaaaacagatagcaactgccactggtgcgcatcctggcggagtattatacccagaagcgctttctgaaccaggtggggtggcggatacttatgtgaaaatgatgcgtcacaacgttgatctcattgctgacagtctgaaataa

SEQ ID NO: 378982 - DNA, 516 bp, Salmonella enterica
atggcatctgaaagtatcctccaggaactggaggacacccaactggccattgagctgatatctctaggtgcccggatgcagttactggaaaacagcgtcaggctcagccggggcaaaatgacccggttgtaccgagaattgcggggggcttcaccgcctaaaggtatgcttcccttttcaactgactggtttatgaactgggaacataatgttcactcatccctgttctgcaatatatttgacagcataaaaaaacagtcccccggtgagtcatcaataaaaattcttatcctggcctatcgcgtttatttaaaatatgccggtaatacagaaatactgtcccttacccgtgcgtggatacttaggcggtttgttgactcaggaatgctggattataccccctgctgtaaatgtggggggaaatttataacccatgcaggagagcccatacatggctatcagtgcgtaatgtgtcatcctccatcacgggcagtcaaaaaaaccgccatggaataa

SEQ ID NO: 378983 - DNA, 312 bp, Salmonella enterica
atgaatacagaaaagaatctgtatgaaatgaattatacctggttaagcctggcacaaaaaatgctgttaaaagacaaaagcattgccatgttcaggctgggtctaaatgcccgggttgccggcatcattggcggaatgactgaaaaagagctgcagaagctgtccacacatccgcattttatattcaccctgcgtattcagaaccccgtcgccctggaatgtctgcttgcagattcccgggttgatcatctgacccccatgcatgcagcaatgctgtgcctcacagaaactggaggataccatggcatctga

SEQ ID NO: 378984 - DNA, 744 bp, Salmonella enterica
atggcacctgagagcacagaaaaactgcagcatatttatcggctccagcaaagtaaactggtcagtattagcaatctgaccgaaaatctcagcaatgtctgtgtaaatctggaaagcttcagtgctgaacaaaaaagactcgctggtgagcttgaaacttgtacgaataaaagcaggctaacaatcaggcgactggagcggaaagcgggcgtcgaagaaatcctggataatgaggatgacgggttgcttactccgggcagaaaaaaatcacttttacataccctccgggaaatacaagacacatcttcatgggtagcagaaaagatgtatagattgtcatccagccacaaatactcagctgagttgcttgacctgtctgtaattatggtcaaacactttctctggcgtgagcgtatatttatggccattattctgggggggcatgacaatgaaagcctgaaaatggtcagtgcaagaacctgcgcgctgggtaaatggtacgatggcaggggtaaacagatatacgctcatttacccgcatatctgtcgctcggtgagattcatacccgttaccatgatgttataaacgaactcattgataaaggtattgagaagatgcccttcagtgagctgtcctcagtattagcaaaacttgaaatgctcagccagcgacttgtgggactgattggccagatacagcatcatgtggttttactgcaggacacgcaaaactcaaaggactga

SEQ ID NO: 378985 - DNA, 192 bp, Salmonella enterica
atgaagataaagtttattgaaattacacggcaggcagctgatttggaacgtcagagattgtttcagcaagccggacatttatggaaaaaagcgtttgttgtagccagacgtgatgcgaatgctgagtattgtcgccgtcgggcagatttttgtctgagcagcatgtttacgagaagtacacaggtatgttga

SEQ ID NO: 378986 - DNA, 1143 bp, Salmonella enterica
atgaaaaagttaacagtggcattatctgcagtggcagtaacggttatgatggcagggatggctgatgcggcggaggtttacaataaagatggcaataagctcgatctttacggtaaggtcgatggtctgcactatttttccaaagataaaggcgatgacggcgatcagacctatgttcgctttggttttaaaggcgaaacccagattaatgaccaactgacggggtacggtcagtgggaatataacattcaggcgaatcatgatgaagataatggtaccaaaggaaacgctacacgcctggcatttgccggtctgaagtttgctgactttgggtccattgattatggtcgtaataacggggttatttatgatatcggggcctggacagatgtgttgcctgaatttggtaatgatacgtatgaagaggctgacagatttatgaccgggcgtgcaaacggtctactgacgtatcataacactgattttttcggcctggttgacgggctaaatttcagtctgcagtaccagggtaaaaatggcggtgatggcgaaagtaataatggtaagggccgtgaagcaaaaagccagaatggagatggttatggtatgtccgtaacctgggagggcgatgccgggtttggtgtgggggctgcttacagcaattctcgtcggactaaagatcagcgcagcaatgaatacagttctgatggtaagcgagcagaagtatggactggcggcctgaaatatgatgccaataatatttatctggccgccacttatgctcagacccgaaatatgcagtgggctgatattgctcaggacagccggattggtaccgaccttgcgttaaacgaggatgctggcgctttcctaagtaaaactgaaaactacgaaattgtagcacagtatatgttagattttggactacagccttcaattgcttacctccagtccaaagcaaaagatacgggtaagtacggtgatattgacctggtgaaatatgttgatgttggtgccacttataatttcaataagaatatgtccgcctatattgactataaaatcaacctgctgaaagacgataacccggcaggtctgagtactgaaaacattgtagcaaccggtctggtgtatgagttctaa

SEQ ID NO: 378987 - DNA, 219 bp, Salmonella enterica
ttgtttccagaatacagagagctgatttcgcggcttaaaaatgaagacgcccatttttcggtgctgtttcagcggcataatgaactggatcatgaggtctcgcgggaagaggcccgcccggccccagacagcatacgtcttataaaaatgaagcgtgagaaactacatctgaaagatgagatgtaccgtattctgcgctcttactctccgggagagtaa

SEQ ID NO: 378988 - DNA, 399 bp, Salmonella enterica
atgacaaaactcgatgaaaaaatgaaggctatgctggcggttcagctacctgtacaggccaccacggggccagatggtctgccggatatcgggccaaagcggtcgctgcgcgtctatgatgatacagcgctgatttacaatgagaacacgggaggacggacgctcaagaatatccgggcaggatcaaaaatggcagtggccgtgattgatcgggagaatcgtgacggataccgctttatctgtacgccagtgataacagaggacggtgaagcatacgaaaatgcgctgaaatttgcgcagaataacggcatgcagcagccgttatgtgcagtcgtactgcagattgatgagatatacagcctgcggtcggggacgaacgccgggaaaaagatccagtaa

SEQ ID NO: 378989 - DNA, 471 bp, Salmonella enterica
atggacaacgcaaagcaaacttatgccacatctatcctgcagcacaaaaaaacagcccagagcaatcacgatccgttcgtaattccaccgtcattacaacagtatgccgacgaaccactctatattttgatcgccctgtggtcccggcagcagaatgactgggtcagtcgcatggccatttcagaggctttcggtatcaatgatcgccgagcgtcgtttcagatatcttatatttcccggcataaaaaacgggttgcatgcgagatacgggttgtcagaaccgacaattcacagcgcttttatcatgaaatcagagtaactgacgtagtactgagcggagatacagtaagagcaaccccagttctgccaaaaaaagggcccgtgaaacgaagtaacgtcggaaacgccacgccggagttgcgcaatatgttccacactctgatgggttcgcgtaaaatctgcgggaactga

SEQ ID NO: 378990 - DNA, 435 bp, Salmonella enterica
atgttgtctgctctgttctgtctgtcagcaaaagcgacaaccagccagtctgcgttgcatcagcaggctcagcagaaagcgctgcaggaaaagcttgtccctgccacacctgatgtccgtctcgctcccggaaaaacacctgagaacacatcgttaacatttccggctgaatccccctgctttcctctcacacatattgatatacagggccgtgacaattttcctcactgggttcctttctcttcattcacccggcagatccgtggcaactgcctgggaataagaggtattacacaacttgctgacaggatgcaggacaggttgagctcatatggctgggccaccagccgggtactggttcccggccaggatctcaggcaggataccctgcatctgcagattgttccgggccggatcatttcgttccacagataa

SEQ ID NO: 378991 - DNA, 240 bp, Salmonella enterica
gtgcaggagttactggagaacgacattgatgcagacgtcactgacatccggattgacgtggaaaaaaagggggcaaaatgcattcgtgtcagtgatatttgtaaggatgaactgtcacaacggggaagactgtataccctgcgttatgatctgctggtaggaattctacaacaacgttcgcgccggatgtcccttatgctggtgctgatccgcagagaaatggaggaaatggggaggtaa

SEQ ID NO: 378992 - DNA, 192 bp, Salmonella enterica
atgtgcaacctcctgtcgctaaaaccgggtgccagtcagtatgatacgtcaaatgcccgcgctgactgtatttctcagtcatgtgaaaagtatcccgttaacattcaaccatcttttaacctggttctcaaaagtctgaacaaagatgcccctttaagttcattaaaaataaaggtaaataatttaaattaa

SEQ ID NO: 378993 - DNA, 246 bp, Salmonella enterica
atgaaaaagatacattgtctcagttttctcccgttatgtctggccgccactttcccggtttatgcatttaagtctccggtgcaggagagcaccggagagctgagagcccatgaagaccagttgctgagtaaattttacagcgccacccacgctgctatgcagaatatgcctgtcggaacctgtggcgtcacacccgttcccggttgccagtgcgcatggtgtaccgcattacgaaacgcaggatga

SEQ ID NO: 378994 - DNA, 405 bp, Salmonella enterica
atgaaaccacaatatcttaccgcccccctgcttaccgggctgatgtattttctgatggtctccggggccagtgctgccgggcccggaggatgtgaatataagcgccagcaggtggagcgtcagattgattatgcccgggcgcataacaatactcaccgggtagccggactgcaggaagcactccgcgaaatcaatgtaaactgcaccgacaacggtttactggaaaagaaaaaaaaccgggtcgctgaaaaacagcgtaaagtcacagagcgtctgcaggaactggaacaggccagagagactggtgaacgcaaaaaaattgcgaagaaacagaaaagactggatgaggccctggcggaactggatgaagcacgtagtgagttatccgacagcgtcacaccatag

SEQ ID NO: 378995 - DNA, 1857 bp, Salmonella enterica
atgacgattcatattctgtcgccgcaactggccaaccagatagcggccggggaggtggtggagcgtcctgcctccattgtgaaggaactgcttgaaaacgccatcgatgccggtgccaccgaaataaggatagacgtggagaagggcggcgcaaaatgcattcgtgtcagtgataacggcagcggcatcagtaaggatgagcttgctctggcactgatgcgtcatgccaccagtaaaatatccacccttgaagaccttgaggggattgccagtctgggctttcgcggcgaggcgctggccagtatcagctcggtgtcacggctgacgctgacatccagaacggcggaacaggacgaaggctggcaggtttacgcggaggggcgggatatgtccccggtagtgcagccagcctctcatccgcagggctcgacagtggaagtactggatttgttttacaacacgccggcgcggcgtcgtttcctgaaaagtgacaaaacagaatccgggcatacggaagatgtggtgcgccggatggcgctgtcacggccggatgtggggtttaccctgacgcataacgggaaacgtatattgcactgtgctaccggaaaagccggtgcgtccgcggcatcgcggctggcagccatctgcgggaaggactttgccgaccgggcggtatatctggaatggccacaccacaacatgcagatgagtggctgggtggtgccgccccagccggacggaaagagctttgatgtgcagtatttctttgtcaacggtcgcgcggtcagggaccgggtaataatgcatgccgtgcgccaggcgtacgggcatatgccggatggtggtcagcagccggggtacgtgctgtatctggagctggaagcggaacaagtggatgtgaatgtgcacccggccaaacaggaggtgcgcttccatgaaagccggctggtacatgactttatctgccagggcgtgctgtcggcgctgaatcaggatgcagcgtccgggttgccactggaagaaaccgcaaatctgccggtcacagactggcttcctgacaacagaaaggctgccggtgagaacagctttgccggcgcaggggctcattcatccagggaacgcgtaagtgggggaccgggtgggtatcagccggagggatttaaccgccaggcgggcagggtataccagcagttgctgcagacgccggggactgcatcatcactgccgctgtcagcaacgcgaacgaaggaatcatatgataatctcatattaccgggaacagagttctggcttctggcacccgtcaggcagagatatgccctggtgacagacggagacggtgtttatctgatgtcgctgaaaagggcgtggcagtatctgctggagagccgtctgtcagcagaaggcgataacagacccgtatcgcagcccctgctgatgccggtgagactgaagctcaaccgtgaagaacgggaattactgcgaaagtggcagccttaccttgaacagacagggattcagttagcacaggacgctcacggcgtggtgttcagcggggtaccggcaatgatgcgggagctgccgctgacctcattgctgaataacctggtggaatggttgtcccgggagagtgagcctgaaacagcccctgattctgcacgcgtcagccggtggctggcggcgaactgcgaatataccggagtgaaggatatggcaagcctggcgacgttctacggacaattgcagagagcacaggatgtcctgatagcggaagatggaaaactgaaacccgggctgctgattcagataccgctggaagaatacacgggtatgctggagcctgatcaaccgggttaa

SEQ ID NO: 378996 - DNA, 969 bp, Salmonella enterica
atgagtcagccaaatccactctgtgtgggcattgatgtttcgaaagcgacgttggatatagctgccaatggtgacattgcacagtttacggttagtaatgacccggatggctttgggaccataatcgacgaactgagaaaacattctgtggcgctaattctgatggaggccactggtgggcttgagtctgcagtgacctgcctgcttcaggcagaaggatttgatgttactgtgatcaatccccggcaggccagagactttgcccgtgcgatgggctatctggcaaaaactgatcgtattgatgccaaagtccttgcccaaatggctgaggtcattaatcggcatccggagcgggagcgttttatccggactctgccggatacagaacgtcaggttcttgctgcaatggtggtccgcagacgccagttgattgcaatattggtggcagagcgcaaccggctgtataccgcacatccacagagcaggaaaagcattaatatcatcatcaaagccctggaagatgagcttgccagaatcgatgaggatatgcacaaccacataaggattcactttaaggatctggctgcgcgaatgagcagcattaaaggcgttggcaacatgacggttgcggcattgctggcggaggttcctgaactggggcatctctcaagacgggcaattagcgcgcttgcaggcgtcgcccccataaaccgggattcgggaaccatgaggggccgacgaaccatctttggtggaagggatggcgttcgaacatcgctttatatggcagcgcttgtcgcaacccgctttaatcctgtgataaaaactttctacactcgtctgcttgcagcgggaaaacccaaaaaagtggcgctggttgcctgtatgcgtaaactgctgaccattctgaacgcgatgcttagaaagaacgaagaatggaacgaatcgtaccatcaggttattccataa

SEQ ID NO: 378997 - DNA, 954 bp, Salmonella enterica
atgtttaatatatttaaagaaaatatacccacaaaacctgtcgtaattatcggcgcggcatttgctgatatgattattaatatagataagttgccatatagtggtgatgatatttctgcacgtgaggggggaatacaaattggtggatgcgcatttaacgtcgcccgggcactcgcacgccttgaattaaatcccatagctgcgattcctgttggctgcggagaatggggagacagagttgaacgtgaaatgcgtgatgagggactgaatgtaatactccggcatccagtatatgataatggctggtgcctggccattgtggaatcgagtaaagaaagaacttttataacgatagagggttgcgaacaatactggacagcagatatgcttgagaatataccacttccggacaactcaataatctatgtttccggatatgaactgaccagtgacattctctgcaaatggatactgaaactgagttttccccataagctgtttattgattttggtccgaaactggtggatttttcacgaaagaaaattcaggctcttttacaaaaaaaaccgattcttacactgaatcgtacagagttaaatattatgtccaatactctgaatatccgggaagataaacctcttaaagctgctaaagtccttagcgataagtatgatatagagataatatgtcgatttgattctgaaggagcatgcgtatttgaaccaggtaaagacattgatgtaattcctgcctgcaaagttaaggttcatgacaccattgcggccggagatagccactgtgctggagtgatagcaggaatggcttatgatatgggactatctgaggctactaaactgggtaatgaagtcgctgcaatagtcgtcagccgaccaggtgccggaggagctccctatcgtcacgagtttttatctttcataaataaaacaatttaa

SEQ ID NO: 378998 - DNA, 1407 bp, Salmonella enterica
atgaaaatgaaaagcaaagatcgtgaaatatctgattacccggagccgactatgagtgaactgggtatcgacttagtgcctgtcagtcatcagacgcaaaaaagcatacagcttttttttgtatggtgtgccgccaatattggcattctgggagttgtttacggagcagtaattgtctcgttcggtctttccttcactcaatctgtactggctgctattgtgggaatagcttctttctcgctggtaggaataaccagtgtcgcaggaaaaaaaggccggacaacaacactcacgttatcaagagctatctttggtaaaaaaggaaatattgcaccgaccattttttgttggattaatctgatgggctgggaagctgtcaatatcattactggcactttaactgtagttgcattattcgttgccatgggaacagatgaaagccctgctataactgcgatttcgctctttctttttggtggtctgaccgttcttgtcagctgcatggggcagaatgccgtactgtttatgcaaaaatggatcacccgaatctttggagccatgacattgatagtcgtaggctggcttttgtatacagcagactggaaattgataatgtcacttccttcaggaagctggctcagtggtttcctgccagcagtctcaataattgcagctggtacaggtattagctgggctatagccggtgcagattacagcagggatcaacatccatcatcaacgcccggcaacatttttacggcagttgtcagtggcgctgcgctccctcttttcctgcttatgttgacaggcattttattgactgcacgcataccggatttagcctcagttgagaatcctatcgccacgattggcaaactgttgccacactggatgtccattccctatctggtggcagccacagccgggattgtaacaattgctgtactgagtctttattcagcaagtctcaatcttcttagcatgggtatacatctgcgccagcgaactgcgattacagtagatgcaatattgattacagccatcgcattgtatgttttgtttgtatcaaaagatttcctgggcccatttatttcattcttaattttttgcggagtttttctctcagcatggtctgcgatatttattatcgatttctggcgttaccgtttcaataatggctaccagaaaaaattattatttgacgactcaggatataataaaaaagcattactgtgctggcttttgggttctttatcaggactgatggttactaaaacaggctttattgatggaccttttgccacaggaatatttgcagattccagcctcgggcttttcgtatcattttttctcagtttgatattgtatataatgtttaatccacaaaaagggaataaacatgtttaa

SEQ ID NO: 378999 - DNA, 1038 bp, Salmonella enterica
atgaatgctatttccttttcaaatgaaactgaagcccgtattcggggatgtctgtatggtcaggcacttggcgatgcgatgggtatgccgtctgagctatggactaaaaagcaggtgattagcttttttggctggatagatcgttttctgccagggcctgaagagaatattgcagcctgcgagttcagagcaggagagttcacggatgatacacaccagtgcatagcattgatgaacgcgattattgagtgcaagggtaaagtagaccctgttaccattgccaggcacattatgagctgggctgaatcatgtaacgcatttgaaaaaaatattcttggccccacatcgaaatcatcgttgaaagccatttctcagggtgtcgctcttaatgatatcgtctctaatggcgtaacaaatggttcagcgatgcgcgtggcaccattgggttgcttagtaccaacttcagataaaaaccatttcatcgagcaagtgcgcctttcctgcgctcccacccacaaatccgacatagccatagctggtgctgtcgtaatcgcatggtgtatcagcagggctattgagggcataagctggtctgaaattaagaaggaaatcgtaccactcgctaatgagactcaaagaagatacgagtccacattcagtccacttctgggtgacaggatcgattttgcacttaatattgtcaacgaccagactgaccatttaaccggaattgattcgatttatgaaaaggttggcgcagggatggacattattgaatcaattcctgcagcaatcgcccttgtagagcttgcaaatacatcacctgttaaatgtgctgtactggcagcaaatttgggaggagatactgacaccataggggctatggctaccgctatttgtggtgccgtacagggtattcaatcaatacctgaagattacattcagatcattaatcaggcgaataatatcgattttactcccttctcacaacagctttacaccttgcgtacaaccactaccagcggggatccagcatga

SEQ ID NO: 379000 - DNA, 756 bp, Salmonella enterica
atgatgcagcagctactgaaatatctaaaaaatcatattgatgcacaattatctatgccgatatacctgcaactaaagcaggctattcgatgtgctattgatgagaagatacttcatcatggcagcattttgccttcagaacgaaaaatgtctcaaagcctggagctttcacgggtaacagttgttaaagcactgaatgagctccttgatgaaggattagtcattaagcggcagggtaaagggacagtcatcagtattcctgtgagttacaacctttcaagtggtggattctcctcccagcttcagcatcttggtaatgtttctaaccgttggcttgttcgtgaactgatccccgctgatgcagccatagcaaaggagctggaagtagatgaaggctcgcttgtttctaaaatccggcgtgtacgactggttgatgattttcctgtgtcccttgaaactatgtatatccctgagcgctttttacctcgtccggatttgctggaggggtccctttattgttggtgggcagaaagagggatatatcctgacgagcaaaactattcactttctgtgtatttaccaacaaaagaggattgtcaattgcttgatttaaaggagaatgtcacgctaatgaaactagtcctcaaaagtcgtgacgccatgggggaggtacttgaatatggcactgcttattgtttgaatgattatttcagattcgattttaaagtgagatatcgagctccggtcataaagtaa

SEQ ID NO: 379001 - DNA, 1164 bp, Salmonella enterica
atgaaagatttttttggctggcgtcgtcctgacgggaaagtcggtatccgtaacctggttctgatattaccctccgtggcctgtgcagctgaaacctgtgcacagatttcccgtcaggtgaaagggactgtctacattcctaaccagaatggctgcggacagacagaaggcgacctgaaaataactcaggatgttctctctggcctggcagcaaaccccaacgtatacggaaccattctggtggggctggggtgcgaaaataatcaggttgatattatggaaaagcttatcagagagaggacaaacaagcccctgcgtaaactcactatccaggaaaacggaggggttctgtcgaccatcagcctgggcgctcagtgggcgcatgaaatggtcgcggaagcgtcacaactgccccgggaatccttccctgtatctgagcttctggtagggacaaactgcggtggttcagacccgacatccgggttggcctccaatccggcggtgggatgcatgagtgatttactggtggatgccggttcttcatccattctttgtgaaacgacagagtttatcggcgccgagcatattctggcaaagcaggctgccacgccggaaattgcagagcaaatcctgggtattgttcaccgttatgaacaatacctgagtcagattggtgagaatttacgtaacgggaacccgtctccggggaacaaagccgggggcatcaccacgctggaggaaaaatcgctgggatgtatacataaaggcggacaccggcctgtggtggaggtgacagaatacgcccagtcaccacagaaacgggggctcatcattatggacacgccggggtacgatatggcatcagtcacaggtgttgcggctggcggtgcccaggtgatggtttttacgaccggacggggaactccgattggtacacagattatgcctgtgattaaagtgacggccaatgatattacctggcaaaaaatgagtgataatattgacctgaatgtgagcgctattctggccgggacatccagtgccagtgaggaagggcagcgtattcttgaagaggttatccatgtagccaatggtaaaatgaccaaatcggaagcgcttggattcaacgacctggctatcagtcgtgtctgtaactatgtctga

SEQ ID NO: 379002 - DNA, 285 bp, Salmonella enterica
atgaacacatttaatgcactggtgatctcgccggatgattcggttgccgtcgttaccgaaaatatccaggaaaaaggcactgtctgttatcagataaacggtcagacggtcagacttacttcggttatgcctgtaccggtttatcataaggttgccattaaaaatatttacgaaggtgacaatatttataaatatggacaacccatcggtcgggcctcacaggatattccggcaggtactcatgtccatacacataatctgatcagtgtccgtgaaaccgtttaa

SEQ ID NO: 379003 - DNA, 975 bp, Salmonella enterica
atgaacattatcagtgcggtcagtaaatttcccggcgggatgatggttataccgctgcttattggcgcggttatccataccttctgcccacagatactgcagattggcagcttcaccaccgcaaccttcacgaatgccggactgccggccattatgggtttccagctattttgtattggatgcaacctgaaagttcgtgaagcaccggaagtgttcaaacgaggaggaacactgctggtcgctaaatggctggcgggggcattactgggtgtcctggtggcacgggtcttcggagaggccggattttttggagtttctgctctggccattatcagtgctgtcaccggtgctaacgggagtctgtatctggcactgatggcagaatatggtgacacccgggacagtgctgcactgggggtaatgaatattcatgatgggccgtttcttgcgttgatgactctgggagcctcgggtctggccaacattcctttactcagtttgttcgcagccgtatgtcctctgttgctgggcgtcttactggggaacctggacgatgctttcagcaaaatgtttaagcccggaatatcaatggttatcccttttatcggtctgggactggggggaagtattgatctgatggcgattgtacgcgccggacccggggggataattctgggcctgatggtgctgattattggcggtggctttacgttttttgccgatcgctatattgccagaagacctgggtatgccggaatggctgtcgcatctgcagccggaaatacaatagccactccggctgcggttgccctggtcgatccctcttatggtcatgagctggtttctgcggccactgcacaaattgccgccgcagtggtgctgaccgcactgattgtaccctatctggtcggatgggccgccagacgttacggttgtcccggcaatgaggcgactcaggaagaagagattgcctga

SEQ ID NO: 379004 - DNA, 924 bp, Salmonella enterica
atgtttaaaggtgctgcaaccccggtgatgactccgctgaatactcagcaggagattgattacaatgccacggagaaggtgattgaatttctgattggccacaaaatggacgccctgctgtttttgggaagctgcggggagttttttgccttttccgacgaggagaagcgggactacatccgtttcgtctgtcaccgcgtccggggacgggtaccggtactcattggtaccggcggaactgatctcaggcaggtgactgctctgacacgttatgcgcaggaatgcgaagctgatgcggcggttattgtttcgccctattatttttctttcgatgaagagaccgtgacagagttttaccggactattctcaggaacgtcactttacccgtgattgcctacaattttcctgagagaaccggatacagtctgacacccggtcagcttgctattctggcaatcgaattcccccattttatcggggtgaaggataccgttgataacatttctcatacccgggccattattcagacagttaaacccgtacggcccgatttccgcgtttattccggttacgatgaatatttcctgtccaatctgcttgccggcggggatggtgtcattggcggaatttcaaactttttccctgacctgtttcgtcggttatatgacgggtactgtacaggcgatttccggactgtcagccagaattccgcgctgatttctgaagccatgcaggtatatcaactgggaaatccatttattacagccatgaaagccgcaatgcaggcagccggacttcccgtgcttccggttgcccgtgcccctgttcttccggcaaaggcctctcagcttcaggccgttcaggatctgatcaaccatctgcagagaaaaatcagcgatgaacattatcagtgcggtcagtaa

SEQ ID NO: 379005 - DNA, 852 bp, Salmonella enterica
atgcgctgtggtgaaaccggacatgaagtcccggcaatgctggcacccgacgataccattcgttcactggaaggggtggtggaggatatacagggtgacgttctgagcccggccggactcagacagttacagcaactgaactggggagagctacctgaactggaaaaaaatatccgccggggggcctgtgtggcgggtatcagcaaattcatttgtgtggggctgaattaccgtgaccatgccgctgaaacgggtgcagaaataccttcagaaccggtgatttttaataaatggatcagtgccgtctgcggccctgatgacgatattttaattccacccgactcggtcagtacggactgggaagttgaactgggtgtggtcattgggcagaaaagccgatatctgactcaggaaagagcagaaaccgccatagccgggtattgtctggtgaatgatatttcagaacgggagtaccagaaccaccggggaggaacctgggataaaggtaaggggtttgactcgttcggacctgttggcccctggctggttacccgtgatgaaatccgcgatcccggagagctcagtttgtggctggaagtggacgggtatcgctggcaaaacagtaatacccgggagatgattttcgatattcccactcttgtgacttatatcagccagtttatgaccctgatgccgggagatataattgcaaccggaacccctgcaggtgtcgggctggggcagaatcctccggtgtttctcaggcccggacaacgcgttgttcttggcgctgaaggactgggtgagcagacacactggacagtttccacgccccggcacgccggtacctaa

SEQ ID NO: 379006 - DNA, 780 bp, Salmonella enterica
atgatagaagataacgttttcaaaaaggtcccggcggtttaccgggtggttaatgtcctggattatattgtcagacgccatactgcgagcctgacggatatacaccgtgatctacatctggcgaaaagcagtgcctttgttctggttcagtcaatggctgataccggacttctgaagaaaaacccggataacacatacagtccgggaatgaaattatatgaactgggacaccaggctgtttctcacctggatatcgccagcgagtcctactcttatctgaaagcattgcgtgacctgacccgtctgaccgttcatctcggtgtggctgaaggaactgatgccatttacctgagtaaaatcgatggattacagtctgtcattcccaatacatggattgggaaacgactgtccctgtactcttcttccctggggaaagtcctgctggcctggatgggggacaatgaacttcatgctgtattatcccgactgacttttatcccacgtacaccgaacaccatttctgatgctcagacattgctgagtgagctgaagcaggtacgggaaaactatgttgctgtggacagggaagaagatgttgaagggatcatctgttttgcctccccggtgttcagtcacacggggagggtgattgcaggcgttagcctgtccgccacccgcaaccagatcgctgatattaataccgatgaactgactgcaacactgaagtcgcaggtcttttccctttcccgtagtctgggatatcagggggaaccctattag

SEQ ID NO: 379007 - DNA, 510 bp, Salmonella enterica
atgattacgatacgaaaggcccatttggatgatgcagcattattaagtgaaatggggtattccagctacactcatcactttgctcacctgtggcatgaacacaaggcattgcaggcttttttgtctcaggaatactctctgtctgtgctgcagcagagcctgcaaagcaaaaccagtagctggtttattgcgcaaacccataatccggttggttttgccaaagtctcctggcactgctccgtgggggagggtgaaccggcaggcactctgctacataagctttatttgctgcctggagagactggcaaaggttacggtgaaacactgtttgcagaaatggtgagtatggcacaacgccgtggtgaaacctttttctggctggaagtgctggatgccaacccgcaggcgtaccggttttacatccgccaggggttagttcatatcaaagatacgatattcagtaccgccacccagccaaacacattgcatatcctggggaagcacttttga

SEQ ID NO: 379008 - DNA, 132 bp, Salmonella enterica
atgtgccgtcccgtcaattttattacacctgcacaattaccagaggaagaaaaattatataaaaatcagtcagacccggcccgcacatccgagctgcgcgacagaatgctggcggtcgttttaccaatatag

SEQ ID NO: 379009 - DNA, 573 bp, Salmonella enterica
atggcaatcacagaagaacagattatgcgggccgccgacgaactcgaccaggaggggcagaatcccactctggcccgggtgcggaaaaaactcggcggcggcagcttcaccaccatcagcgaagtcatgattgagtggcgggcgcagaaagcccgttccgttcacgcgcaggagccccctccgcaggccgtcaccgacagactggctgcattcggagatgatatctgggcgctggcgctggaaatagcggatgccggttttgccggtgaacgggaggcactggaaaagtcccgtacggaaacagaagaggcccgcgctgaagctgcggcactcgccgacctgctttccagtgaactggaggagtcccgcagcaccatcacttcactgcaggaaaaactggccacagcggaaaaagaaactgcaacggtggcgcatgagcgaaatgaagcgcaacgggaaacgacagaattacgggaacagatggcctcactgcgcggagaacttcaggccgtcacgctctgtcatcaggaaatcgtggccgctattaaacaaaaaaccagcccgtctcagtaa

SEQ ID NO: 379010 - DNA, 279 bp, Salmonella enterica
atgattatcgacgaaaaccagatctggccggattatgccgtcgcgcagccgcacgctggcttaccgttgccggtgccaggattattaaccgcacagcagaaaagacgggactcccgcagcctgacgggaagccttcagaacagtccaaaaatattcgacacaaaaatgctcctgcacaactgtcactgtcggtatgatgacgggcagatggatatgaaaatcagagttgcatgcaaaatggcgtatgaatcgctcaaggtctggcgaacgaatcgctga

SEQ ID NO: 379011 - DNA, 141 bp, Salmonella enterica
atgtggttcctgatttggttattgaatgtaaaaaaggaattaatagtagttcttttgaatttctacgaaatgaatatgaacaaaaattgggtcgtaaaatatatgagccagatgtatggccattatttgatgtggcattaa

SEQ ID NO: 379012 - DNA, 732 bp, Salmonella enterica
atgctgaagtgcagccatgtggtttataaagtcaactgtctcgaagatatagtcaaggaatatcgagaaaggggttttgacgtgcaatggggaagcatgcctaacaaagcatttaatgcttttattcggttcaggagtggacctttcattgaatttttagagttacctcgtcgttatgcacttttacgttatccactgaattggttctatggttctcccgcagggcaacgtatggcctattgggcgacttgccctgaaggttggtgtgatgttgctctggaagaaaaagcgggtaagtcgtccattgggactgaagacatcatctctttacaagatttgtacctgagtcttcgtaactcagggattacgttatcccgtcctattgcaggaaaacgccgtcgacctgatggacaactggttcgttacagttttatgttgcctgaacccggtcagttgccattcattgtttcgccttattttccttcgcaacgcccgactgaagttgtacatccgaacggtgctctggagattaagcaaatactgatggggtgttgtagtaacgaccagtttttcttcgataaatttttacctgacgatcattggttgatgaccgtaacagctgaatatacccatgtacaatcagtaatcttgtatggtgccgactgttctgcgttgaaaggcagtatttttagcagacaggaaaatatccaacccagtattcgaggtaattaa

SEQ ID NO: 379013 - DNA, 2277 bp, Salmonella enterica
  misc_feature (1486)..(1495): n is a, c, g, or t
gtgatttcccaaaaaatacgtacattagtctgtggttcaacgtttgggcaattttatctttcagcgttgtctacacttccaaattttgaaattgctggtttattagcgcaaggcagtcagagatcaaaggagtgtgctggtcgttatggtataccactttatacgaatactgatgcattgccttcagatatagatttggcttgcatcgttatgcgatcaggtgtacttggtggcgatggtatcaaatacgcaaaagcaattttagaaaaaggaatcaatgtattatttgaaccgccattacatcaaaacgaaatggctgattgcctgcgtatcgccaaaaaaaatggcgttattttccaggtggcagatctttatacacagcttgaatccgctcgttcattcatttctgccgcgaaagtattacttgataaacaatctggattatttattgatgccagtgcggcaaatcaggttttatttcctctattacatatattaatgcagataacagggaatattcgtccgtggaatataaagcttttggactacgaagtaaataaaaaaataccgatgcggatattagcaggagagataggagggatcccgttattattacgtgtgcatcatcaggtagacccagttgatccagataaccacttgccattgtttcatcgtatcactttgggaactgaaggtggaacgcttgatttgcatgatccgcatggtctggtaacctggaccccaagattgtttattcctgcgtcggtcaaaaatgatttcagttttagtaatgctacccatcttcaacagcctttattcagtattcttgatggggctccgggcgcttctcaggcaaaaaatctgcaaataaactggcctgaagctatcggacgtgatcttattgacatggctgcattgttgtctgcttcttcagtcagtcatcactgttctcagcagatgcttatgttgtgcagattatggcaggagacaacctcagaacttggatatcctgaactttgtgaacaacattatgaatacatatctgttgataatttatctcttgaccggagaaatgatactctaattccaacaaaagaatttaaagataaaaacgatcctgagtttacgatttctgcgttattaaacaacgctgttaaactgtctgatgctttgatatcagatatcactatcttgcaaacaaaacactttgtttattgtcttgatgaagcaattctgagaacaatgcaaataacattacaatcgtctggtggatttgatagccctgggaaattgatttctcctgacaatttgataaatggccttggagtagccaaacgtcatcaacccctaataaaaaaatggattgatgttttgcttgataataaaagaatagaaaataatgaccaaaatttacgtctcacattgtttctggaatcagatgaagttgaacgttattggaaagatgcgcgactggcctggaaaggannnnnnnnnnggaaaggactgggaccagaaattttcattgattacctcagacaaaatggaaattgtcttttgcagttaatgcgtggtgaacaggatgctgcgatgctgctctttcctgaaggtagaatggatatcgcggatgctatttacaacgatatggtaacttctcgttatctcaataccttaatatctgaatttatcagtcagattgccataagaaaaatgggaacattgcgtattctggaagtcggtgcaggtactggagctacaacaaataaagtggtaaacgctcttatgaaaataggagagagatgtgtttctgaatataaatttacggatatatcacctttctttttaagcagagcacgtaaacgttttaatcatttaccatggatgaatttcggcgtatttgatatggagagggattgttgtgagcagggaataaatccgggggcgtttgatataataattcttgctggggtactcaataattctatcaatacggataaaactttgttcacgttgtcatcactattgtctcatgatggattgatgctatttagtgaagcaactcgtgaacatctggaaattctttcgtcccaggcgtttatgatgcctcaggctgatgatgagaggaaaattacacaaaaacatttcttgtcttcggagcaatggaagcgggcgcttgtaagagcgggattcattaatatccatgttcttcctgacgaaaatcatcctttgagtcctcttgggcaacgattattcgtgtcgaggaaggagccattatgctga

SEQ ID NO: 379014 - DNA, 1068 bp, Salmonella enterica
atgattggtattttaggtggaaatggagctgtagggcagcaggttgtgcgtctgctacataaatggaatgtaggtgaaatgcgtgtaggcatacggagtaaaaatatacagactagtgagttaaaaaaaccttctgtatattataaaattgttgacattagtgatgctcaaagcctttccagctttgttgatggttgtgaaatactaattaattgtgccggtccatcaattcatacgtcagtcccggcactgaaagctgctttacgtggaaaaatacactacattgatgcaggaggagagcagtgtatttctatgttagcagaccgtatttcggagcaatataacctgatattttctgcgggtgcgttaccgggtgtttctggggtcttgcctcgctggttagctcaacgattttttcgtccagcttcactcaaattttattgtggaattctggatagatttacgttatcaggagcagaagattttctggaaggtatctgttatcggggaggaaatgcttcttcattttcaaaatttctagaaaaatcagaaatggttctccctttttttccacgtccggtaacggttgctgcttatcaagatggagaaacttcaggagttcaaaacgctctcggtcttgaaaacgcggaattttatattgcccgggatggtaagtatgttaacagggctttattacaaatgtcttcttcatcgcgtatggagtctgttcggtctttgtgtgaagctgcagacctcgatctggcagggctaactccttatatcctttatcttttgcaaatggatggtatcagtcacgataacaagattaatagttataccatgctgttgaaaggcgctggggtttctgcaatgaccggacatatggtggctgctataacaatgtcggtgcttcgtagggatatcgagaataagattggactggcggctgaaatatgcaatccagactctatcattaatgggctgaatgatcctcgtaccggtaattacctacaggtgcttgattgcactattgatgatctgatgcaaatatccggaggtgtactgtga

SEQ ID NO: 379015 - DNA, 7506 bp, Salmonella enterica
atggaaaatattcatcagaaattggcatcagaacttccaggtattattgccaggttcgctggccttgatgttaacgaaattgacgaggatgccaatttgataggcctgggtattgattctatcactatgatgcgtatatccggacgatggcgacagcagggggtaattattggttttcatgagttaatatcatcacccagtttgtctgcatggcaaaatttgttaaacaatgcttctgtctatgaaaatcagaatgacagaaaaatcaattcggatgaaattaaacgtgataataagtctctggctttagctccaatgcaacatgcgtactggattggaagacgaaaggaacagtttcttggtggcgtttcatctcatttttaccatgaatttaatgcaagggatattgaccctctccgtctggaaaaagctgtagacagactgatggaacgacatgaaatgctgcgggtttccatatcagatgaaggacaacaatttataccagacagagtatcagctaaaaaactcgttgttcatgacttacgactggcgagtcatgaacaggcgttgcgacatctcaaagctactcgtgaatatctctctgttcgccaaatggtggtaaataaaggagaagtatttgatatacagataactttattgccagaaggcgtatgttcgggaaatgtacgactgcatattggtatggatatgattgctgcagatgccatgagtttgcggatcctcctgtctgaccttgagaaattctactgtgaaaagtcattgccagttctcgattatacatactttgactggttggttgactacaggaaagagcagtgtaaatccgacttttgtgcccattatgagctgtctcgaaaatactggagtaatcgcttacctgaacttcctggttcaccattgctacctacaatatctcttacagagactatcccggcaaataatgttgtgcgtcgccatgtatggattgatgctaaaaaacgaaaaatactggaacagactgcaagtcggtatgaaataacaatggctttttcgctcgccagtgcttttgcagaaatagtaacggctttcagtgatatacctgattttattgtaaatctaccgctttttaacagacagccattacatcatcaggtggagcacttagttggtgattttacttcatcggtcctgcttgcctggaatggaagctgtccaggtagtttttgtgaaagagcaagacgttttcagcaacgttttcatgaagatgttgtttatgcgaattattcagggattgaactgttacgtgatctctcacgttatcacgaggagcccgtttatgcccctatcgtgtttacaagtgctcttggtttaggggagcttttcaatcaggatgttcgtgcgctgtttggtgagcctgtctggattgtttcccagggacctcaggttttactggatatccagatttctgaactcaatagtgggttattaattaattgggatgcacgtgaagaggcgtttcttcctgaaacgctggatttgatgtttgccgcttatgttgatttggttgaaaagttaattagtcagcctgaaagttggcttaatccggtaggaacaatagtttctgaaaatatactggataaacgttgtcaactactcacaaggacccctgagaaatcatctttattatatgataacttttttatccgggcgctacagcaaccggaatatccggctttgttcggagatgatatcactctgagttattcctgtctgtctgagtggtccagacaaatcgccgcgctgcttgtcagacggggaatgatttcgggagagagggtagcggtatcgttacctaaggggccggagcagattgctgccgtacttggcgtgttgtttgccggtggtgtgtatgtaccggtgggaatagaccagccagcagcaaggcgtcagcgaatttaccagagcgcgaatatccgatggcagattggcacagaaagcgatggtgacacgaaactaacaccggaagaagcgcgtgaaatggaagctcttgacgataatatccgggtggatccggagtcagaggcttacattattttcacatccggctcgaccggagaacccaaaggagtaatggtcagccatgcggctgcggttaacactctggaagacattaaccgccgtttcggggtaacagcgcaggaccggttgctggcagtgtcagcgctggactttgacctgtctgtgtatgacatctttgggatactcggtgtgggggcttctctggtattgattgatgaaacaaccagacgtgatgccacagcatggctgaaatcgatcaagcagcatggggtgacaatctggaattcagtaccggtacttctggaaatgcttctgaatgtagcggaaggcagggaaatgctaccgggtctgagacttgcactaatatccggtgactggattggactgaacctgccgggatggctaaaaaagatagcgccggaatgcagatttgctgcgttgggaggagcgacggaagcagcagtgtggtcgaacctgtatgaggtggaggaaataggtccggactggaagtccataccttatggttatccattgactaatcaggcttaccgggtggtggacagtcagggcagggactgtcctgactgggttgcaggggaactgtggatcggtggacggggggtggcactgggttattgtggtgatccggaaaaaactgcagaaaagtttgtgtcagatgaaaggggtaaacgctggtatcgtaccggtgatataggtcggtactggccggatggcacactggagtttcttgggcgtcaggatcagcagataaaaatccggggacaccgtattgagacaggcgaaatagaagctgctataaaatcctgtcctggagttggacaggttattgcaacagtgcatgataaatgtctggttgcagctgtaactgtgagtgatgccactacagcggaagatttaaaacagtggttacggggagtgttagcaccagaaatgatcccggatcatctgtttgtattatctgacataccattaagcattaatggtaaagttgatcgacaacgcttaagtgaaatctttcgggaatcaaaaaataacagagcagaaattattgaacctccgaagggagaaactgaggttgcagtagctgccatctggtcagagatactgggaactgattcaattgatcgatatcaggattttttttcgctgggtggtgattctctgcaggctacacgagttatttctcgcttacatgcttgtggcttcgttcatgcttccttatcggaattgtttttgcgtcctgtattacatgatttttgcctttatctgccgcctgcgacagcaatacagccccccctatactggcaggaggataatgaagctcgttttgaacccttttcacttactgaagttcagcaggcatatttgtacggccgacagtcttccctgacgttgggaggaattggctgtcatttttacaaagaatttaatgtagttgatattgatataccgcggctggaacaggctcttggtaaactgatttgtcgtcatgatatgttacgtgcagtttttgatattggcagtggaaaacaacgagtgcttcctgaggtaccagagtatcgggttacgatatatgaaggtattaatgcttttcaacaattacgtcttgcatctcatcaggtgtttaatcccgaaatatggcctctgttttctgtgtcagtagctcatgagaatggaagataccggatagcaatagggattgataatcttattctggatgcacttagtgtaatgatattttaccgggagcttgatgcctactatcaggatctttcagtaacattaccgccagttaacgcaaccttcagggactatttacattgtgctattccggataaaaaatcgcttgttgtggcgcaaaatttttggatgaaaaaagctgaaatattgccatcctcaccacagcttccactggccattacccctgaaaagatcaagtctgttcgctttaaacgtcgttccagtcgtatagataaagaacaatggcaaatattattgaaaggatgtcaggaaaatagtgttactccgtcagcacttcttttgacggctttctgtcacgttttaagtcgctggagtagtgaatctgccctcactattaatttgactttatttgaacgtacagaactccaccctgatgttagttctatacttggggattttacctctcttctgttgatcccatattttagcgagcaagggcagacatggattaatgctgtaagaaatatccaaagagaaatgtgggaagcactggatcatcgacaagtttctgcaatatctgtattgcgcgagcgagcacgtcggcaacaacaggttcattctgtgatgccggtagtatttaccagtgctctgggattaccttttgaatcttcacattcctgcttattgtctgaaccttgctggggaatttctcaaaccccacaagtgtggcttgattttcaggtggctgaaattgacggtaatattgaagtgtcatgggatgcggttgaggaactttttcatgacggaatgttggatattcttttttctgcttatttcaaacaactggaggttctgattgccagggggtggcaatcagaacttcctgatttgctgactgaatccgtattgaagcaacgtcgggaagtgtgtcggtcagcgccatatgcatgttctcttttacatgacggcttttttatacgtgcgttacagcaagccgaatatcctgctttgctcggggacaatgtcacgctgagttattcctgtctgtctgaatggtccagacaaatctccgcgctgcttgtcagacggggaatgatcccgggagagcgggtagcggtgtcgttacctaaaggtccggggcagattgctgccgtacttggcgtgttgtttgccggtggtgtgtatgtaccggtgggaatagaccagccagcagcaaggcgtcagcgaatttaccagagcgcgaatatccgatggcagattggcacagaaagcgatggtgacacgaagctaacaccggaagaagcgcgtgaaatggaagctcttgacgataatatcagagtggatccggagtcagaggcctatattattttcacatccggctcgaccggagaacccaaaggagtaatggtcagccatgcggctgcggttaacactctggaagacattaaccgccgtttcggggtaacagcgcaggaccggttgctggcagtgtcagcgctggactttgacctgtctgtgtatgacatctttgggatactcggtgcgggggcttctctggtattgattgatgaaacaaccagacgtgatgccacagcatggctgaaatcgatcaagcagcatggggtgacaatctggaattcagtacctgtacttctggaaatgcttctgaatgtagcggaaggcagggaaatgctaccgggtttgagacttgcactgatatccggtgactggattggactgaacctgccgggatggctaaaaaggatagcgccggaatgcagatttgctgcgttgggaggagcgacggaagcagcagtgtggtcgaacctgtatgaggtggaggaaataggcccggactggaagtccataccttatggttatccattgacgaatcagtcctaccgggtggtggacagccagggcagggactgtcctgactgggttgcaggggaactgtggatcggtgggcggggcgtggcactgggttattgtggcgatccggaaaaaactgcagaaaagtttgtgtcagatgaaaggggcaaacgctggtatcgtaccggtgatataggtcggtactggccggatggcacactggagtttcttgggcgtcaggatcagcagataaaaatccggggacaccgtattgagcctggagaaatagaggctgcgttatgttctgatccctcggttgggggcgctatagtagtcaaaggaaatgaaaaaggcagggaaacattaattgccggggttgtgcctgttttgtgccctgcatcaggaatgttattcgacatgtgttctgccgggatattaccggatactaattttgaatccgaagtagtcgaatcaattttaacagatttgttgggtttcagagaaaaaataaatttatcaattagtgacgcggctaagcctctttataatttatggatcagttggctaaaaggtagaggtcgtctgattgaagataatgatgggaagttgcattcatcaggcatatcagcctgtattcctgagcctgttaatgatgaacagaaacgtatcattgatatcgcaaatgccgtaatacgccgtacagatgattatcggaatatattatgtggcgaactggatgctcggattttgcttgatgatccgattttagctcctgaaattctgatgaataatgatccagatatcatcagacttcagagcatatgggcatcaatattgcgtgagcgagcaagattgctgggacgtactctgaatattgccgagttaggtggtcgtagtggggtttttgctgaacggttgttgggacttctggctggggtagatgtcaattatacgcttctggatgcttcttctactttagtcaactctgccagtcagagactaacgggtcatagcgcgaagcaacttccaccagggtcagtgccggatacgttactctaccagtttgatgtcgtattatgtgtaaactcattgcatcgatatcctgagccacaggaaggcgctgttgttgcgagtcttttgcttaaacacgggggcttattactggcaaccgaattcagtcatttatcacctcttgcactgtttacctcagctgtgttggaaatgggctataccgattttgatacagaaaggcggcaggctggatccccaacactaagtggctcccgttggtgtaagttactgggtgctgcctggtttgataaatgtacaagtcattatgtaggacgatctttcctgatggatattgaagctgttcgtgcttctgattcacctgaaatacactccctgaatttatttcagaaattaagaataggattaccggaatttatgattccggggaagattgtaattttaccagtgatgcctttgtccagtaatggcaaacgagatggctcggttttgagacggattacttcgtcttattcgccgggtaatagttttgtcccgccagaatctgagatggaattgtgggtcgctgaaatttgggaaaccttactcgatactgaaattttggacaagaaacaaggtttctttgatatcggaggtgacagtctgatggccacgcgatttttggctcaggttcgccagattcttggtgtcgatatgtccatgagtcagctatttatgtacccaacattgaaccttgttgctgaacatctacagaacatactcagtgaacagtgtaaacaagatgatgatgagggaaaaatatga

SEQ ID NO: 379016 - DNA, 2187 bp, Salmonella enterica
ttgtccggaggaaaagttattctggcacaaactgctggttgtgatgaactttttccgctgattgaaaaagaaaaagttactataactgctcttgtacctccgttagtaaatttctggcttgaatggaaagaatgggataatagcgatatttcaagtttgcaggtcatacaggtcggtggttctaaacttgatagtcaattggcgtcaaaagttaagaaagtgtttaattgccagttgcaacaggtttttggaatggcggaaggtcttatttgttgcacacgacttgatgatccggatgatgtgatccttaatactcaaggaagacctctttctttacatgatcagataaagattatcgataaaaatggaattccagtaagtttaggtgaaagtggagagttactgaccaaaggtccgtacactataaataattattataatgtaactgctcaaaatgaaagttcattttccagtgatggcttttaccgttccggagatattgtaaaaatgacacctgaaggtaatttgattgttaaggggcgtataaaggaacaaattaatagggccggagaaaaaataagtgttcaggagatcgaaaccctcctgaatgagcatccagatattaaaaatagtgttgttgttgcagttgctgatgaaaaccttggtgagcgaatttgtgcttgcatagaaagttccagaacattatcacttttcgaaataagattatttcttcaaaagaaaaatatcagcgactataaattgcctgaccaaattatgccgataaatcaatggccattaacagctgtgggtaaaattgataaaagaaaattgtctgaaatgggtttcagaaagatcggatggttgcggagttcgattcctgtaaacgtggagtcgctagatgtttgttataatcttttggacagtaactggtctggatttgtcgcttatgagaggaaaaattcgtggtttattggtcttgattgtctgtctgaaataacactctatgtcgatcgggttgaattaaaaaacgagtctggtttaataaattcctgggccggcagtgactggctatcaaatcttactaaggcaattgatgcgttacctttaaaatcatggagtgcgtttgctgtaggttgttttgaacttgccggtctttttcaccaggttagattgacacaagactctcatactcctttattgacaatagttattcccaaatatcttgtcactttgagtgatggtgttgcatcatttgaggcattgaattcgaatgatttggactatattgaaaagactgtaaaacaagctaacaaatctgtcgaaataaaaggtgttgatgaaatctggattgagagaattaagcgacagttacgtgttcaggatggtgaggagtattgccagcaagtttctaatgcagtgtctgaaatatctcggggtgattatcagaaagttattttgtcaaggcgaattattgttaatgaaaaacttgatttactggccagttattatcatggcagacgcaataacacacctgcacgttcttttgctgtacggatgaatcagcatcgatttatagggtttagccctgaaacaatagtggaagttagtgctcaaagagatgtaagtactcagcctcttgcgggaactcgggcattaactaaaaacgaagaaattaactcccgacttcgttcagttctgactaacgatactaaagaaatcgctgagcatgcagtatctgtaaagctggcatttgaggagcttgaatcagtttgtgaagctgaatctgtacgcgttgtcgattttatgaatgtatcgttacgtggtagtgttcaacacctcgcttcgagattacgagggaaactatctcctgaatttaccccctggcacgctctggctgcattattccccgctgtaacagcttctggtattcctaaagcttctgcattgaaagcaattaacaagcatgaagaacaagagagaggagcatatagcggtaccgttatgtggctgaacagcgaaggtgaaatggatgcagcattaatattacgttcgttatttcatctaccagagggttttgctctgcaggccggggctggaattatagatcagtcagtgccagaacgagagctcgaagaaacctttgaaaaattgcaaagcgtaggtagctacattgtttgtcagcaataa

SEQ ID NO: 379017 - DNA, 504 bp, Salmonella enterica
ttgaatcctaactttaaggttcagaatgggaaaattcgctcccggggtcttgagcttgaatcgcatgctgcgttaactgatcagtttagccttatcggtagttacactctccaggatgttaaatatatcaaagataacgacggttggaagggtaagacaccaataatgatccctcgtagttatggtggtctctgggtcgactgggaagctcctgataatagcgtagttaatgggttaggtattgcattaggtgggcgttttagtggcggtactaaggggggaactgcgaaagaagaattcgataccggaggatatggggtgatggatgcttcagtacgttatgaccttggaaaactgacaccttcactgaaaggtggaaaagttcaattaacagcacagaatttactggatagaaggtatgtcgccggatgttattccgaagaatacggttgtttctggggcgcgggtcaacagattatcggtaaagtcatgtgggatttttaa

SEQ ID NO: 379018 - DNA, 261 bp, Salmonella enterica
atgatggcagcttcacaaccagtaccagaagctaatcttgtaaatggaatacagcaacagcaggaattgtatgccaatactattgcgaaaataaattcagttgctgacaccaatcttatgcatggaacaaaggttgatagtgcgacaaatttactaaatacccaatatgcgcttttcaatttgtctttcaatctggatcttaccgcgaaggttgctgggcaattttctcaggctgttaataaattgacgacgatgcaatga

SEQ ID NO: 379019 - DNA, 201 bp, Salmonella enterica
atggctgcgcagtataagatgcgttctgaaggtaattctatccttgacgttctacctttcctggttgcagatgagaatgatagagcactctgtgaagccctctattatattttacttaaggatgaagctgctttttttagtgtaagagaattactctcacctgaaatgaataaaaaactcgatttttttatcttaaattaa

SEQ ID NO: 379020 - DNA, 786 bp, Salmonella enterica
atgcaaatcttaggcgtaaattctaccagcagcgctgatgttggtagaaatttaatgaccatcaaatttatgaacagaataaatatgttactttctgttcagagtcaagccattcaaaataaaggagagattgcaggtatcaagcagcagcagcaagatgcaatcgacactcagaagaagaatgaagacgagtataaaaaagagcaacgtcatcgtatccttcatgccattgtgagtatcgttgcgcatgtaattaatttagtcatgactatcgttcgaccggttaaacatattgctaaagcggccaggaaagcagtgaccaaaacggtacgtaaaagtatagggaaggcgagccagggtttgatgcagcatatcgggttatcgcaaccgatgaagcgcatggctgggggcgctaagaaagcccttaaaaccggtgttgaaaaaccaggcatgggtaagcgtgcattaactcatattgctaacggtggcgctaagcgctttatcaagcgcaccgcagtgattgatggtatcagcggtggtctgaacggtattggcgatggcgtttttaaggtacaaacagccaaaataaaaaatgccattgataatttgcagaacaatattgatcttatcagtacaaactatgagctttctgagtctctcaagcagaaagagcaggataatatcaaaaagcaggttgatgcaaatatacaaatgctagaaaacgttacatctgcagtaaattcaatgggcaacctacagatgcaagttttgactaatgccgtataa

SEQ ID NO: 379021 - DNA, 606 bp, Salmonella enterica
atgtattcgaataccgaagtaagtgcaacgtcaaaccagttttatacatcatcagtagttgcagcttcaacagctgaaacatcaatgatggtatcagaaatgagtgtatttagtgtcatctgtctactttatgttgaacactgttatgcagttgtcggtttagtcgcgaacgtggggcagcaatataacgttcagacagaaaatgagttggcatgtcaaaaaatgtccaatgaaacaaatgaagtgcttgtcaacgtgcaaaatgaagtggatcaaaataataatcctaatgagacggcggcattgcctgatgatgttgtcgattatatcaacgacaatgccattattataacaggtgtaactgatggaggtgagggcggtactttttcacctattagtaccgatgataaatttaatgaagggcaattacaagctatcaaggggcagtttgatattatgtcgacatcatattcagattcgaatagtaaatatcaacttgagttacaggttgcgttacaggctttaactcagagtattactgccatttcacagacaatgtctaaatctaaccagattattactcaaatagtctcaaactttaaatag

SEQ ID NO: 379022 - DNA, 366 bp, Salmonella enterica
atgaatggtattgatgatattcaggcgaacatagagcgtgaacgatataaacttatttctgaagtagaacgttttgaaaaattaaaagtaacctatgaacagttagtcgagaaagcaaagactgaccctaaaattgcttctcagctaaaagagtttgaggtattacatggggaaatattgttgcaggatatggcgaatattgcggaccaaatccgccgggcaaaagaacagtaccaatctctaaaacgaatggttgctatcgctaatacttcttcagtgaatgtgcaacctcaaaagatagatggtaacgctacgcctgaaagaaaagaggcgttaaagccaaaattgtataaaagttttatgtag

SEQ ID NO: 379023 - DNA, 234 bp, Salmonella enterica
atgacaaaaaatcgttttgtaaatattattggcaatgtcaccgaaagtaatgagaaattaagatgtgatccatacggaacacatttctttcaattgcaggaaatacttaccgaagctattaatgggaaaaataatttccctgaaatttaccgggagtcgctagttcatgcgttactatctggtatacgtgttattgaaagagtgtcgatgaattatcggcataagaatccctga

SEQ ID NO: 379024 - DNA, 1506 bp, Salmonella enterica
atgagagcattgctttttttattcatattgattttattgccaattgaggcattttctgcgtctaccctcgattggaaggggccccctttctttgttatgactcacggtatgctcgtgagcgaactgttgaaaaattttggtgcaaattatgatataccggtaattaccagtccgtctattcgagatgtttttatcggtcgcttcgaaaagggtacgccggaacagcagttggataggcttgctcgtacttataatttggtttggtattatgatggtaaggcgctctatgtttacaaaaacaatgaagtgaaatcttctgttattacgccagaatttgatactcgtgaacagcttaaggaatatgttcttcaggcaggcgttcttgctgaagggacatgccagcttcgtcaaattggtgtttcgcaatcttttgagatctatggagtccctgaatgtgttaagcatatcacagatatagccagccagctaagcgttgcctcgcgtaaccaggctcaggtagatcaacaaaaagaaaatgtccaggtatttccattaaagtatgcatctgcaacagatgtaacttatcaatatcggaatcagagtgtaataattcctggtgttgtgacggtgttacagcgaatgaataattcgcaggcagttaatagtgccagcacaccaacacagcttaatgcagcgcaacaggaaaccgaaagtagtgggccaacattttctgctgacccgcgtcaaaatgcagtggttgttcgtgaccatgatgccaatatgccaatgtaccaacgtcttatttcacagttagaccatcggcaggatgcgattgaaattacggtgtccattattgatgttaatgctgaagatcttggcgcattaggtattgactgggctgcaaacgctgatatagggggaatgaacttacagcttaataccaatttatccagcggcagtggctatgcgacttcagtgatcactaatgcgagcgattttatggtcagagtcaatgcactggagcaaaaatcccaggcaaaggtgttatcccaaccttcggtggtgacgttgaacaacgtacaggctgtattggataaaaatacaacgttttataccaaattagtgggggataaagttgctaagttggcctccattacaagtggaacattaatgcaggttacgccacgcgtcgtaaaaaatgaggctggaattgctgaagtgttgttacttttaagtattcaggatgggagccagcagtcgtcagctcttggtgcggatggtatgccgcaggttcagaattcagaaattgatactcaggcaacgttaaaaagtgggcaaagtttgttactggggggctttgttcaggatcaagatatcgtaacggaacgcaaaattccgttattaggtgatatctatttgattggtaatttttttaaaagcaaggaaacaacaaaagtacaaaccgtgcgcctatttttgatcaaagcggtaccacttaaaatttaa

SEQ ID NO: 379025 - DNA, 360 bp, Salmonella enterica
atgagactgaccagccgcaagaaagagatcctgagctactaccgcgaacacctggactatgcgacacgggaaatcagcgccccaccgttcgacgtatctggcgtggcctacctgcttgatggtgctcagggtggcgacggggcgacaaagtaccagttggagtccactcgccgcacactggaggcaatggtcagggatggtctgttagagcgagttagcgtcaaagaagtgcgggatgggctgtattgtgacaccacggcgacggtgattcgctacggcctgccgggaagcctcggagtaatgcgtgatggggatggtgttgatggtgcgattgacggcgaatgtgttcgggttggctaa

SEQ ID NO: 379026 - DNA, 201 bp, Salmonella enterica
atgaaacctgaatacctggctgaaattgccgccgccagcatccggcagaacggaggcgcggtgtcatcgtatgaggaacgcgagctggagctcatcatctcaagtcgtgcggctaaccgtgatcgctttatccagaaagtgaaagcaccaacctacgaatggaagaaacccgccacccgtcgtcaacctgtcaaaacctga

SEQ ID NO: 379027 - DNA, 579 bp, Salmonella enterica
atggcaaaactcagcaaaaaacaggcgcaattttgccaggaatatattcttgacctgaacggcactcaggccgctattcgtgcggggtacagcagaaatgcagcacaagggcaggccagccgtttactatcaaatgctatggttaaaagccgtatagctgagcttatcgccagccggaacgaacgcgtcagagttgacgctgatcatgtcctgcagcgccttgttgaaatcgaccagatggatattatcgacattctgaacgatgacatgagtattaagccggttagcgagtggccgcagtgctggcggcgatacatcgtcggctttgaccttgctgatatgttcgaaggaaagggcgaagatcggaaaatggtcggcattctgaaaaaaatcaaatggccggacaaagtgaaaaacctcgaattactggggcggcacgttgatgttcaggcctttaaagacagagtggaatgttctggtgaagtgaatctggctgatcgcattcaggccgccagaaagcgcgcaaggcatccagaaactgcgcaattaactgcgcaaaacgaaaccgatagagattga

SEQ ID NO: 379028 - DNA, 2400 bp, Salmonella enterica
atgagcctcgaaactgaattaaacaagggctatgccacctcaccagcctccgatactgaggcttctctcaatgctggatatggcgacgaatccagttccccaaaaagccagcaagaaagggatttgaacgccggttacgattccagtaccagcagcggtccattcgcctccctgtaccattgggttaccggtgacgacaggcagactgaggtaagccaaaaataccccctggtggatgcttcgccggaatttagcggctggtctatgggggcggccaaagctattggagggcttttcaaaaacccttcggcaaatatcgccatggcgctagccaccagcccggaacagaaaatcgcgattatcaaagaggcatttcctcatcttaaaggcgaacccgaattcggcggtaagcctttctggaaggatgaaaaaggcaatcttggagtaacgcttccatctggccgttacatgctggataaaccgggtattacgcctgttgacgccgcaaatgccgttattgctgggttggagctggagttaactgggggccccgctaaggggttggtttccaggttgggaggaaaagaagttgcacaggtcggcggtaaacttctttctggcatcgcggcggatctgcttaatcagggaattgtttccgctggtggtggtggtcctgtatcggataagcaggcgatggtgtcaggtctcattaatgccgttatccccggtggcggcgaggctcgtccagctaaagacgcaattatcaagggggcagaagatataacccccacttctggcgagtcattacgcaaggtagccaatacagccgcccgtaagtccacgcagagtaacgtttctgaactggcaagcctggtagacgctgactcggacattctggccgccgccgaacgtctgggattctcccctgatgaaatgctacctagccattattccaataacgacgatatgcgccgcctggttggcatgcttgtatcgcgtcagggcagcggactggctgagcaggaaggggcgctaatcaataaaatgtccgacacggtgaaagactttatcaccagtaatggcgggtcactcgattcaggcgaggtgtcggcggcgtttaagcgcggaatggatgaatcgcgcgatgatctggaagggcaggaaaaagagctgtacaagcagctcgacgaggcaatttcgccagttgagccaatcaaggccaccaacactacggattatctggatcgggaagccgctaagcgcggcggcggtctggaacaactggaaggtgaagaaaaaaaagtcgctgagtacttttctggcgaaaagggaaaacctacgtaccacggactaaatcgctggcgccggaaggttggcctggcatacgggaaagccgaaggaaatcgaacgccagaagagctgcagcttgctgagctgtatcacgtcgttcgcgccgatgtgaaagatgtcgctgagcgtcacggtctgggtgatgtattcgagcaggcgaaagaaaaaggggcggcccgctttgcgatggatgatgttgcgcggaaattattgggcaaggacgaaaacgacgccctgatgccggtagttacctcggcacttaaaaaactggattcaggccaagttggtggctttatccgggtgatgaatctgatccctgaggaataccgccagcaggctctgataactgggattggcgaaatgttcagccaggggcctaaggccgccgatgtgcttcatctgccaggtgccgttaactggttgcgagacgtcaagggaaatagccaggtgtggggcgagctggttaaacatcttcctgatagcaccgttaatcagcttaatgatatttacaccatgttcagtggcgttcgccggggtcgacaatactttgaggctaataccggcacgaaggtacgagactttgaagcattgcttaatcaggctggtggcgttcctggtcttatggctaaacatccggcaattacaaagggactggagcaggctgcgcggtatacggctaccgctggggggcattctttggggggcgctatcggctccatgggggcaaatgccgcattaaccagcatcctcaatcacctgaaaggcaacgtcgcccccgaactggatcggctgatggccacaccggaattctcgcgtttagccacttctctggaggctggtggagaaaaagcggcgtcggcagcaaaaagggggagcgaagaagaaagagcatttgcggccactccggaatttaagtcgttttacaaaaaggctccgcaggcattcaaagaccttattgcccgtaagggactggctaaagctatctacgacgaaacacgggcagataaaagacggaaagcccttgctgataacaaagagtccaccagctaa

SEQ ID NO: 379029 - DNA, 1410 bp, Salmonella enterica
atggcagttggtgaacgttatgcggcgggattcggacaggttcagaatgctattacgcagggtgccaagcttggcgcgggtctggtagatgactggaacgattcttacaataaagcgtttgatgcccaggaccatcaaaatgaaatcctgcgtcgcaatgccgcgcgcaaggcgttcggtgatgcgtgggccagtggtgacccgaaagctgttgatagtgttatgcagcagttccctgagttcgcgcagcgggcacagcaattcatcggcattcgcgatgatcagcaccgtaaagacctcggttctctaatgtcggaaatcagcgccctggcgcaggccggtgattatcagggcgtgctaaacctcgtcaataagagcggcaatgtactggatgccgattcttcaacgctgctaaaaaacattgctatgtatgctgccagcgcagacagcaaaacagcggccggggcacagcaaaagctgattggtgccgcgaacggcattgctaagcttgcattaacgccggctgagctttccagcgagcaaatccggctgcagcggcaggcggaaacgcggctacgcgatcagcaggcgcacgatgaccgaatccgcgggcaaaagcagaggtctaaagatatccgctatcgcgttaaccaccctgcatttgctggcgcactcaccgcctctcagcaacaacagcgggccagtggtgtcaggatgacacttggtgacgataaaaaacggatgagtgcagctcgcgccgctggacaaaaggccctcgcgtatctcaattccaacacctctttcggtgatgctaatgcgatgcttcttacgcaaatcatcgacaacccccgcgcttcggcaaaaattggtcatgtagctgagtcctatggaatgaccgctgatggcctatgggataaatttaaccaattcaccaatggtctgatatctggttccagtcttaccgatcaggatcggaatgctattcgcaaaattattcagattggtatggatgaagaggtgaataactataatggggaggctcaagatcagtacaccaacctgattaatgatggcgtgacccctagcaccgcatctgaggtaaccggtgttctcccaggcggggggaatatattcaccaaagactacaagccagcaactaataacatccccgccacgccgccctctggatctggcgtagccactgagcctcatatcaccccaattgacaccagtcatattcaggggggaaacccccacaccggaaaatctgttcagggacgttcactggctgattataagaacagcggcgctaaggctccgaataatatccctgacggtaccgttaacaagaactacccggattacgttgcctataacggctactggtacaaaaaggcgggtaagaaatga

SEQ ID NO: 379030 - DNA, 696 bp, Salmonella enterica
atgggattccttggcgcaggttctgccgcaaaggcggcggcaaaggtaggaaaacaggttgccggcgactggaaaaaactcggcaacacagaatacagttggttctcgccgtacatggacgccggaaagcaaacgctctccgggcaaatgtcactacttgcgaacccggtgaacagccaggaagaactggctacatattacgccagccctgaatacgacatgatggaacaacaggaacaatatgctgcgcagacgtcagcagcagacccatatagcggaatgggaggttccgcgaccagtaattatcttggaaatcaggctgtttctcttgggcagaattacctaaaaagccagaatcaggcgcgacaacagcaattcaataaccttggaagcatatcaaaactgggcctgagcgcatcaggaacgatgggtaatcttgctacgaaagatatgcgaggtgtagctgaggccgcccatatggcaagcgaagcacaaatgcaggctagtgctgcgaataagggcgcgattggtggcctagtctcaacagggctgtcggctctgataaaaggttttggcagcggttctggtgctaaagctgctggtggcaccggtttgatggacagtatcgaatctggtggtgccgcggcgtggaagggcattgaagatgccgcagaagccgcaatagcatttttataa

SEQ ID NO: 379031 - DNA, 432 bp, Salmonella enterica
atgaacgacatcaaaccaaccgaaatcgaagcccaggaacttgcgcgcgaagtattccgccagcgttgtgcaaaagtcattcgcagtgaggatgaaggggccagccttgcagatctgcaataccgaaaccgcagaacaaccgctgaactcatgatgctggcgagctatctggacgggcagacgcttaatgaagtcggcgtgctatctatggagctttgcgccagctccctgcgcgacgcaattaaggaccatgggcgaaaactcatcgacgagcagatcacgctccgttccggtggcgagccaatcaccccagagatgcaagctagcattctccatacgcttctgagtgaggaggaggaatactcgccttatcacgccgtgctggtggatatgctggatgatgtagggatgatggaaggcgcggaggcctag

SEQ ID NO: 379032 - DNA, 213 bp, Salmonella enterica
atgtactgtacatcaatacaggtgactcatatgaagcgcaaaacaagcacccgcgtcatcctcatcacgaacgagcagtacgcagagctcgagcgtattcagcagctcgacgctcagaacactaccaccggcgcagcgccaacgattaacgccattgcgcgtgccttgctcgacaaatccttatcatctaccagccaggggaaagcagcatga

SEQ ID NO: 379033 - DNA, 573 bp, Salmonella enterica
atgaacaatactgaactggctaatccggctccgttggggctggctgcattcggcatgaccactattctgcttaatctgcataatgcaggttttttctctatggatgacattattctttccatggggatcttttatggtggtattgcccagatttttgcgggactactggagtacaaaaaaggaaacacttttggtttaactgcatttgcttcttatggctctttctggctaacgctggtcgctattttgttaatgccgaagatggggctggcggatgcacctgatcccggatttcttggtttttatctgggactatggggggtattcacactttttatgtttattggtacgctgaaatcagcccgaatgctgcagtttgttttcctgagtctgacggtactgtttttattgctggctattggaaatatcttttccagtacatctgtgatccatatcgcgggctggacgggattagtctgtggagccagtgccgtttatctggcaatgggggaagttcttaataaacagtttggtcgaactattttgccagtcggcgagccccgcacacagtag

SEQ ID NO: 379034 - DNA, 216 bp, Salmonella enterica
atgactcagcaaaatgatttctctgaggctaaagcgatatgtaatgagatagggggcgctgtgctggaggttcttggtcggaagagggcgttatcggtccagtccctgatagacataatagaagaggcccgagccgggaattatatttataccgtagaacgtaagcaggggatggaacgggctgtttatatcctgaagaaattcattcagccttaa

SEQ ID NO: 379035 - DNA, 1065 bp, Salmonella enterica
atgtcaacatccgttatggctaaactaaaggaacctgtcgaccgctttatggtactgtcgttgggtttgctttctgtaagggttatccagggctttatctactggggcggtgggtcaaggcgcttcatctatggcacgcaaaaaatcaacccgaattccgcccactggatggcaaacaagtttcagacggccatgccgggcgcactactcgggctggagcatgtaatttcattcatgcttcagcacttctggctactgtacgccggtatcattatttttagcgctgctgagctttttgttggcgcatttctgatgattggtcttttcacccggatatcagcttttatctcaatgctattctcggttttgctaatgctgatgtttggctggcagggcgcaacctgtattgatgaatggacaatggctgcctgcaatctggcaatgggtgccacaattttcctctgcggctctccgcactatgctgtcgataacatcattctgagaaaacacccctcatgggagaaaagctggcttttccgctggtgcggcggttcccttccggttccgttgaatgacggtggttataagaagctggcattgtggacattgctctttgtggttgtctttgatattggcacctatcatcattaccgcggttccgtcgtcacctggttccattcaggtcccgtcagcccgactaaacatcatatttcactggacagcggcgtgcttaacgcggatggttctgtttcattccatgcctatctggatgccggtaccccggaggctccgatgagtatcatggaagcctggctcatcaaccgtcagggtcagaaaatcgcgcactgggatactgcaatgttatctgccattccggtcgctgattttaaaaatgactatgcctacaataaatttaagcccgctctgtacggtatcgatggcgaagtgggggcgaaagcaactatcacgctgcctgctattgtatctccgcagaaggatgatctgcctgtgacactcaggctgatcaattcacgcgggaccgacttcagtattacgctgaaatga

SEQ ID NO: 379036 - DNA, 336 bp, Salmonella enterica
atgaggagaatactggtgaagaagatactgtttgctcttacgggcctgctgtttgccgtcggcgcacatgcagattatttgcgtgatattcaggtaaccatgcagaaagcgaactcgggaacagaagctttaatgctctggaatgtctacaggatgacggacagtggaggtgacagtgtggtctgtgggtttgtgaagggcttcgataatacggcccattttgtgccatttctgtataaagggggggaactgttcatggatgatgatgcacatcccgagtggggacaacaggcatatcaggtatcaccctgcagcaggactacttcaccagtgtga

SEQ ID NO: 379037 - DNA, 246 bp, Salmonella enterica
atgattcacgacgaaaaagcagaaaagctcgagcaggccggattttaccgccgtgcggctgtccgctggcttaccgttctggataactgccgggacgctctttcccgggaatgggttacccggcgccctttaacagatactttcggcgatgtccgcaaggccgccacggaactgcagaaaagcatggggatctggcagcctgacggtgatgcattcagaaaaataaaaaagcattcctcaaagtag

SEQ ID NO: 379038 - DNA, 258 bp, Salmonella enterica
atggaaagaaaaatggcccgctgggtatatgagcaggagagaggtgtgacggcaaacgaagtggcaaagcgtttcagacttaatgaacatacagctcgactgattatccacgccataatgcgtcggacagacggaattcgttgccagctgcttggtaaaactgttgctacagctaaaggtcgtaagcttgtgaaatacttttcggtaactcatcttcctgatgagtaccagccccgaggtaaggccgcgggtaaataa

SEQ ID NO: 379039 - DNA, 276 bp, Salmonella enterica
atgagcagaaaagtggtgccgggactatcggagttggtatattgccttatatgcgataacccaggggcattcaagcatgacctccacagaatggtgcatgagcgcctgcatacccgaattactgagtctgatttaagtgacgtaatatccttcctgaaattacatcgtggagtgtttgtcatgcgtggttatggttattttaaagatgaagaaacgtttaaccataatcgttttggaaaaataccggggaaagtgataagaaaacagtggagataa

SEQ ID NO: 379040 - DNA, 615 bp, Salmonella enterica
atggaaaacaggaatgtaattttagagtctttttcatgggctgcgctggtcgccatgaaaatggcctggcgagagggtagtataacatcagacttttctgagcatgtatttattatgaactggctggccacggccagaaaaaggaagctgttccctcaggctgtgtcatcggaaatagactatttaataaataatggtcggatgaaaggacataattcagggctgaggacgaaactggaatatatctactcctgctgccagaaggatatcagcaaacaggcatcctattttcgttttacccgtgtaatggaggtgctgaaaaatgaagggtggaaaggatatcttttaacatcagctaaatggaaagcattgaggagggaaagtttcggagccagagagaattttatttttatgaatgaggcagatgttaaagtaagttttaacagtaatggcagacttatccgtgcactggagttacgggtcagtggtgatataaaaatggcggaatcggtatttgaaaattattatcttccagtcagaacagaatgtcaggatggtgggcgatattatttttatctttttcctgagctggagtctgtatccggacaaggataa

SEQ ID NO: 379041 - DNA, 918 bp, Salmonella enterica
atgaaaaataaatctgcgcgttcaaaaattgagcagttcaggcgggattttgtcacactggcccgggatgcgggcagaagctatgcgactgttgctgacagtatgcgtattgccagatattttctgaattaccttcgtgataacggaataaaactgcgtcatacggacagtataaagacccgtcatctcatcgggtatcttcagttcaggaaagaacaaggtatttctgttcgttcgatccagaatgaacgttctgtaatccgtggaattttaaatcaggctggtcgttataaactggcggctccggataatccattgttgagtaataaagcactcggactggaagaaagcaacagggcgggaacaaaactaccattaaatccggaagagtttcagaaagcatttatggaggttgaaaaaaataaccggggcgtggcggcagtcatgctgctttcttacacactgggattaagaaataaggaggcagtggaatcatgcaaatctgtaatgacgtggaaaagggctattgagtccggacaagactccgtacgggttgtttttggtacgaaaggaggacggccccgtaataccgttattatgaacagagatgctgtacgacgtgcgataaactatgctgagagtgtaatgaaggaaaataatggtaaactgattgaccgtccggatatcagaaaagcgctcgatacctaccgttatcacgtccgtcgcgctggactgactggagaaaaagcgcctcacagtatgcgctatcatttttctcaggaggcaagagcattttatgagaataaaggatattctgaacgtgagatatatgctcaggtgtcaatggatttggggcacggagacggaaggggaagatatgtgaagcaggtttatttcaggagcgagcatgaagaataa

SEQ ID NO: 379042 - DNA, 246 bp, Salmonella enterica
gtgacggttttttggggcatgagtgtttacaaagcgggtcatgtacatgtgatatttttagttccggaacaggtactgccggacaatgaactgacgtttcccctgttcgccctcgtggatccgtatcctgtcatcctgaaaactgtgacaacagtttgcgggaataatttgggggcagctgcgatttttctgtcgtacaaaaaaacatcattctatgtattgaatttttccccgcggtctgattaa

SEQ ID NO: 379043 - DNA, 438 bp, Salmonella enterica
atgacttttttgtttaatgtgatttttcggtttttacatatgctgatgttgctgttgccgctacagagtgcagtcaaaccgtggttgcgtcaaatggcggaagatgtacttctgatgaagcgcgtggccgccgatgttcggctggctggtgaggtcttcaggcagaagtcgcatggcgccagtggacaaatacccggtgcggacttgtttgttgagcacacgctgttttatgccgcacatcgcctgggatgggggctttttaatggtctccagtcccgctggccagagtggattattcaccgtctggagtatcggggcgcgagtttaggacaagagttctggtacgaaggacgcagtagcggtttccgggacgcttatgacgaaagcaaaatgacgccatcttctgaagaagtctgcatagttatcgctgaccggtga

SEQ ID NO: 379044 - DNA, 378 bp, Salmonella enterica
atgctcacgatgatgacactgaataacgcaacagaggccttttgctggttatgtctgcttgagagtgaactgctgagtatacgggcgtttcagaatgctggtctttatccgctgtacgatgagtatgatgaagaaccgacttttgaatgttcagtttataacagcggcattgcctgcggtgaatttctggagggtctggaggcgggtaccattacacctctgacagcagccggaaaggaactgctggatacactgaaccatacagggcagacgttatgtgccccggtctgggagcagtcagtgagacaggggttatatgatgctcgggctgatcgggccatttatgaagccggcgcggatggctggatatacagctga

SEQ ID NO: 379045 - DNA, 987 bp, Salmonella enterica
gtgaaaaaacaaagaaaaggcgctgccggacaggcggcgcacgctgatgtttaccagatggtgacagaccgtattattgccgcacttgatcagggtactgcgccgtggcgcaggccgtggcgctgtgtggacactggtgatcccggtggattaccgtcgaatgctctgaccggtcgttgctacagcggcgtgaatgtgctgttgctgtggctggcggctgaagagggcggctacaccagtgaccgctggctgacataccgccaggcgcaggaagctggcggtcaggttcgtaaaggggagagcagcagtctcgcggttatctacaaagactggacgaaacccgctgaggatgagcacggtaacaggctgtacgataccgatggccgtccgctgacggagacggtgcccatgctgcgccagttacatctctttaacgtggcgcagtgtgacggattaccggagcatatgcagccgtcactggcggatgacgatacggaacgaccggtggaggattacgccgtgctttcccctgaacgcctggccgatgtccagataatgctggaggcaaccggcgtacagatggaagcccgttatcagaacctggcgtactatcgcccggcgacggacaccatcgtcatgcctctgacgtcgcagtttgactcagaggctgactactggtccacgctgttacatgagatggtgcacagcaccggacaccgtaataggcttgaccgggaaggtatcacctcatcgtcccgaagacagggcgacagagtttatgctctcgaggagcttatcgccgaaaccggcagcgcgtttctgtgcgcgcagctggggatatacggcgaggtacagcatgagagctatatcgacagctggctgcgggtactacggtctgacaaaaaagcgctgttccgcgcctgcagcagggcaagagaggcgacggaatatcttctggcgccgctgagtatctgttcagcggcatga

SEQ ID NO: 379046 - DNA, 258 bp, Salmonella enterica
atgtccggtattcacccatttccggcccggggacgacaccgtggccgtcacgccacccgtacggatttctgcgaggacgtccgtgccggtgatccactaaccccgcaacaggaagagcgtatccgccagctggtccgggaggaatgttactttcgcgaccgtgaagcgctgataaagctgaccgccatgacgctgctgctgaaactggcaggcactctcatgctggggcttctgttgctggctttccgttttctgtaa

SEQ ID NO: 379047 - DNA, 459 bp, Salmonella enterica
atgtatctgaaagtcctgaaatttctggcgagaaatctgtggtatctggtccgctggctgggactggctttgtaccacggactgtcggcgctgtaccggcgaagacagtccagaatgactgtgctgcggccgcgaacggtgtatgccgggcgctggttactggcagatgacccgcagttctgtgggcgcgccattgtggtgaaacaggcggaaaaccttcgttcaggcgttgagctgctgtatttcggtgaggaaagtgccgacccgtatttcggggagcgttactttacagaccacagcgaggccacccggtcggcggagcagatgctgctgcgttttctgggtggacgttatcgtcgccgtcattcgcggacagcatccccgacagtgacgctgccggctgtggtgaacggggtgaatgacggtcatgtgtccggacccgggagggaagctgcgtga

SEQ ID NO: 379048 - DNA, 288 bp, Salmonella enterica
atgaatgcctctgcatttctgacggacccgctgcctgcggtggtgattggcaacgacgtctggcaacagatggtgtgttattcaccggatccgggctgtgaaacggagcggctgcagcggctgatttaccatgctgcgaaagcactgacggaagcccggaagtgcgataacaccgtaacctttggctacttctgtttgccgccggacggcagtccggacacgccactgtggcgaaacctgcaggttacacgcggggcggatcggataatggtgtcgctggtgcgttaa

SEQ ID NO: 379049 - DNA, 474 bp, Salmonella enterica
ttggaatggaaactacttaccaatattctggtcgtctgtaataacgatgctatcgaaaaactcgaatggtatacacatcgttggaaaatcgagacttttcataaggttttgaaatcaggttgtaaagcggaagattctaaactcagaacagcggagaggctgagtaaactgatatcgtgtttttgcattataagctggaggagcttctggctgacaatggttagccgtgagtattcagatgtacctgccgaaatggccctgacacaggcagaatgtgaattacttgataatgtcatcaaagacaataaaaaaactgaaaatgccgcgcccctacatagatatattataaagcttgctcagttaggcggatatttagccagagccaacgatcctcctccgggaaacacagtgctttggcgaggactacgtcggcttaatgatattccttatggttttgaactttcgagagaatag

SEQ ID NO: 379050 - DNA, 264 bp, Salmonella enterica
atgctcaatactcatcaggtcagttattacatgactcaacgtaaaaaaggtgtaaaccagcatatctcggccatgaaggctggtatctctgttcgttccggccgcaggatcgaaaaagatcagtgggcaaaaaatggtaatcgtcactggcggacgcgtaaagatccgcttgaggccgtctgggatagcgagcttgttcccctgttgaaggaaaggcccgctctgatgcccacaaccctgctggaaatgctgcaggtgcgataa

SEQ ID NO: 379051 - DNA, 291 bp, Salmonella enterica
atgtataatccctgtaatgaaataacgccactcgttgaagtttaccagcgctggctgaacgaccagacccggcttgccgtgcgttatggattcagtacccgtaaaacgcacggctggcataccctgacgaccagcggcatcacgctggctgacgggcagcgggtttccatggtggtgccctcctgcctgttgccggtatcaccgggggtggcgcaggccggaaatgagcgtgtgttttcagtcgtggttgatatgaacagccccacagttacccggcattctgctgagtga

SEQ ID NO: 379052 - DNA, 1473 bp, Salmonella enterica
atggaagattgttgcaatgccagtaatgtaatgacttatcatactaaaattcacatgctggagggtattatgtatcaggcaataaacagaactggtctggagtctgttaacgatttacttgattatcataagtgtggtaatgatatcctcattaatgataagccatcatttgatattcagcgggctggagagcaaatagctaggggagaaaaaacgtggaatggagagaatgttacaggaaaaaaagcaattataacatactcttttcctgagtggagtacgggaagtaaaaaccaggccggagatattattcactcagggtttatcccattgcagcaggcgcaggcgaaattatcattacagtcatggtctgatgtggcaaatattcatttggttgaggtaaaaaataatcaggaggcggatattacatttgggaatatttctgcacaggatacgcaggcgtatgcttacttgcctggtccgggacgttcttcaggagaatcctggtacagtacttcaggtacagataatttacaaccggaatcagggaattatgggcgtttaaccttaactcatgagattgggcacacactgggattaaatcatccaggtaattacaatgccgggaatggaaatccaacgtatgaaaatgcaacttatgccgaggatacccgtcagttcagtgtgatgagttactggaatgagtccaatactgatggtgataatggcggttattatgcagccgcacctcttgtggatgatatcgcagccatacagtatttgtacggtgctaatatgacaacacgaacagaagatactgtttatggttttaactccagtacaaacagagaattctatactgcagaggacaataagcaggcgctaattttttccgtctgggatgcaggtggtaatgatacccttaatttctccggttatacacaaaatcaacgcatcaatatcaacgaaggctctttctctgatgctgggggactcagagggaatgtatccatcgccgctggcgttaccatagaaaatgctattggtgggaagggcgatgacgtgattgtcggtaaccacgctgacaatatcattaaaggtaacggcggtaatgatgttatttatgatggtggtgggcaggatcagctatggggagggaaagataatgatatatttttattttcaggcatgaacgattcccccgttttctctcctgataaaataatggattttgaatctggaaaagacagggttgacttatctttttttaatgaaggaaatagtagtggtagtgattttatccgttttgtagaaaatttaagtgggcgcgaaggtgaagccctgttgtcatacgacaacagaaataacctgagtgaactggaattaaatattgatggcggtcccagtcctgatattcttgtgcatgttgtgggcgagattgatattgcacagacttcattgtgtaaaacataa

SEQ ID NO: 379053 - DNA, 312 bp, Salmonella enterica
gtgacgagcagtctgattttaccttcaccggtatcgttatccggtcactggatagtcgttgataaaataaatgaatgcgatatttatctcgggggggagcgtattgaacaggccaatggttataagttaattttttcatctccctgtgcttttgatatattttcagaaatacctgaggcatggcggcctgcaccggatggcatttcattattaaacagggatgggagaacggtccttttcttctccagagaaaatgagaattatagcagccgggtttgggaatgttcgggaataatgcttaagaaaaaataa

SEQ ID NO: 379054 - DNA, 1740 bp, Salmonella enterica
atgtttataccgcgtaatgaaattgcggatgctataagaactcgaacccgggttttctggagcataggtatatttaccgcatttattaatttactgatgttagtcccttctgtttatatgttacaggtttatgacagagtgcttccgtcccgcaatgaaatcacgttgttgatgctgacactgattatgttggggatgtttgccatgatgtcattactggagtatatacgcagtatggtagttatttgtatcagtaaccagctggatatgcgtctgaacactcgtgtttatacagcagtttatgaagctaatataaaaaatggttcttcagacgccggtcaaatgctgaacgatctgactaacctgcgacagttcctcactggtagtgcgctgtttaccttctttgacgtgccgtggtttccggtctatctgtctgttatttttttgttcaacccctggctggggctgttcgctttgctgggagcattgttattgatctcgctggcggtgatcaacgaatttgtttcgaaaaagccgctggcggaagccagcaaattgtcgattgtgtccggtaatttagccagtaccaatctgcgcaatgctgaagtgattgaggcattgggtatgctgccaaatttgagacatcgctggtttgatttgcatcagcaattcctgagtagccagcgtatcgccagtgaacgatccggccgggtgtctgcggttaccaaatttgttcgtatgtcactgcagtctcttgtgctgggactggggggctggctggcaatcgacgggcacattacaccgggcatgatgatagcgggctccattcttatgggccggactctggcaccgattgagcaggtgatcaatgtctggaaaagttatagtgcagccaggctctcttatgaccggctggtcaggctacttgagacgtatccgcaacgcagcacggggatgtctctgccacgccctgaaggggttgtatcggtggagggcgtgagcgccactccgccgggctccagcgaggctgtggtattgcataacgtgagttttggcattcagcccggtgatgtactgggcataattggtccgagcgcatcaggaaaatcgaccctggcacgcgtgctggttggtgtctggccagtgagtgaggggacagtacgactggataattccgatatttaccagtgggacaaaagtgaactgggaccttatattggctacctgccacaggacatagaactgttcgcaggcactatcgccgagaatattgcacgctttaatgatattgactcagaaaaagtgattgaggcagcaaaactggctggcgtacatgaactgatcctgcgttttcccgacggttataatactgttctcggtagtagtggcgtcggattatctggcgggcagaagcaacgtatcggtctggctcgtgctttgtatggcattccttctctggtcgttttagatgaacccgattccagtcttgacgatgccggtaagaaagcgctggaccaggcaattacatccctcaggcgacgtaataaaacagtgatactgattactcacaggaccagtttactgtccatgaccagcaaactattgttactggtgaacggtaatgtcaatgcctttggcccgacgcagcaggtactccagcgcctgaaagacgcacagaaaatgtctaagtttcagcagccggtaacccctatagtggctagagatagaaaaactgattaa

SEQ ID NO: 379055 - DNA, 1332 bp, Salmonella enterica
atgtcagcacatattagcgtgcctgaagatacatatattgataagacgcagcaggatgagcgacgttttattcgcatgggatggcttgtcgtgggggctggactgttcggttttttcgtgtgggccggtttcgctccgctggataaaggcgtggtgtcaccaggaacagtgactatttccggcaatcgtaaaacgattcaggctgcgaccagtggaattatcagaaacattgcagtcagggatggtgataaaattaaagcgggtgatctgctggtacaattgaatcaggtacaggctcaggcactggttgattcgttacgcgataagtattacaccatgctggccacagaggggcgtttactggcagaacgtgatggggtcagtaaagtcacatattccccggcttttgatatggtgaaggataagccgcgggttgctgaaataatggcattacaaacgcagttgttcaatgcccgtcgtttaagtcttaaaagtgaaaccgatggttataaacaggcgatggatggagtgcgttttcaactggaaggtttgcaggaatcccgtgttaataaagagatccaactcaccagcctccgtgaacagatgagtggcattaagcaattgacaattgatggttatttacctcgtaaccgttatcttgagttactgcgtcagttttctgaagtgaacagcagtattagtgaaatgaccggacgtattggacagttacaaaaacaactgcaggagttccggcaacgaattgatcagcgttttgccgattatcagcgggaagtgaggactcaattgtcgcagacacagatggatactaacgagctttataacaaactcgaaatggccagttttgatctcagtaatacagtcatcacttctccggtggatggtactgtggttggcttaaatatttttactcagggaggaaccgtggagatgggggaacacctgatggatattgtacccagtgaagctacgctgatagtggactcccgcctgaaagttgaattaatcgataaagtacacaatggattaccggttgatttgatgtttactgccttcaaccagaataggaccccaaaaattccgggaacggtaacactggtttccgctgatcgtctggtcgataaaaccaatggtgaaccttactaccagatgcaggttacggtaacacctgagggcatgaaaatgattaacagtgataatatcaggcccggtatgccagtggatgtgtttgtaaaaaccggggcccgttcgctgctgagctacctgtttaaacctgttctggatcgcactcatacgtcactgactgaggagtaa

SEQ ID NO: 379056 - DNA, 1383 bp, Salmonella enterica
atgattcaactaaaacgacaggtcatccgtattgccatcagtatctttttgtctgtgatatcgattccggtttattcagtcggtcttatagacgcctattcgctggcattagagcacgatccgacatatatggcagccataaaagagaaagaggccggaaaagaaaacgcaaatattggcatggcggggcttttacctaaaatctctctgaattaccagaattcaccgcgtaactggcaaacacaaaaatcccgggatggtgatttttttggcaatatttcagaagtgacccggcggcaacaatatcgtagttattcaggatctctaacattgacacaaccgttatttgattatgaggcttacgcacggtacaaggctggcgtggcgcagaccctgatgtcggatgagcgctaccgtggtaaattgttggatctggcggtacgtgtgattaacgcctatgttgatgtcgcttattccagagatcagctcgcactgattagtgcgcaaaaagcgctttataaagagcagcttatattgaatgaacgtttaatgagtgctggggaaggtactgtcaccgatatctcggaaactcaggctcgatataatatgtccggtgcccaggagattgaagcgcgcgacgctctggatgccgcccggcgcgagctggaaatgattatcgggatgccgctgaatcagttggatgagctacaggaactggatccgggcaggttccggatagcgactttgagtccgtctaaattcgaagaatggaaaaagagagcgctggagaacaatccggaactggcggcttcgcgtcacggtgtggaggcagcgagatatgatgttgagaggagccgtgcgggctttatgccgcaggtacaactctacgccacgcattcggaaaatgactccggcaacaataatacggttaaccagaaataccgcactgagagcattggcgtacaggttagtatgcagatctatgcgggcggtggtgtttctgcattgacccgtcaggcagcggcaaattacgggaaggctgtgtatgaaatggatgcgcaaacaggaacagttctgaatgagcttcgcagacagtataatctttgtgtcagcagtcaaagcaaaataacggcttatgagctggcggtaaagtctgcgaagatgctggttacggcaacccgccagagcgttatggcagggcagcgtgttaatgttgatattctgaatgccgaacagcagttgtaccgcgcccggatcgatctggcctccgccaggtatgcttacattaagtcctggatctctttgctgagctattcaggtacactggataaaaaagatgtacaaagggtagcacaatatttttcccataatagttccaactga

SEQ ID NO: 379057 - DNA, 1710 bp, Salmonella enterica
atgcctatttttgattatcatgacagaaaaaatatgcttctcatcaaagatgttcttactatcgagagtatcaattttggtgcggcttcagaagctggttatatataccacgaagaaaatggctggaaaattctggatggtgcagtgctgaattataatggtagtgcaaatccctacggtgcattctatggtgagtcattactattatccagtgccgagtgtaacgtgctgggtaaatatgattcacagggtaacctggttaatattggggtcagcttttggggaacgggtaccttcgctggtgctcctggtctgtccggaaccgcaaataccgtactggatattgccagtgatatcttcgctgcgttgattgatggttatgccgataactatgtattgaatgcctataaagatttgatgagttcagtcgccgcttttgccggcgcaaatggtctggatggaagtgatataattatcacaggacacagcctgggtggcctggcggtgaacagcatggcaacactttctgctcagggagagtggaacggttttttcagcgattccagctatatagctcttgcttctcccacacagaacctgaacagtgaaaaagttcttaatattggttatgaaaatgacccggtttttcgtgtactcaacggtcacaacctgactatggatagcttttttgaacatgatacaccgcgggagacctgtaccaataatattgtttcttttaacgactattatgccggacttactgatgaatggggttttttctctattgctaatatggcatcatgggctgcacattcaggtactggttatacgaatgggattctgcagatcatggattctgatgtttatgacttcacccatcaaaactccaacatcattgtgtccggtttatctgaaggtaacagagcaacaacctgggtttctgatctgaataaatccatcccacacatggggtcaacatttataataggtactgaaacgaatgatttattaaagggagggaaaggaaacgattatttgtgtggtgggggaggagatgatatatttaaagacagtaacggatataatgtcatttatggaggcgaggggataaatacctatgtgacagaatataatattttagattttaatattagccgcgatataaaaggaaatttatatttcaaacattcttccggagatattacgagagcggagagtattcaatatattaatgctgaaaataatttattcagcataactgatatcacccctgcgaaaaatgacctgaaggattcagttaagccagttggttattctgaaagttattatgctgaaattgagaatgattatactatttcgtcttttagcagtaatagctggttctactcggatgtaaatgatagtaatatcagtgttgcgggtgataataataatatagtatctggatacggtagtgatattatcactctcaatggtaatgataacactttgctattttacggtgattttggtaatgacactatatacaacctgtctgccagcgacagtcttatttttatggcaaataaacatattgctgataatgacagttatcttaaccatctctcatttgtggacgaaaatgcattgctgacctatggcgaaagtagcattactcttgttggagtgaacgctgatatgcttgctgaaatgtatattgctgtagcctga

SEQ ID NO: 379058 - DNA, 192 bp, Salmonella enterica
atgtcagggggtaacgcgcttttttccatggtgtacagaatgttgcagacgaagcaggtgcatgtgctgtataccgcagaaaaagtagaaaaactctattccggaatgtctgctgtggcggatgataatgaggcgatggctgatggagtgaccggctggttaatcagatgtattccctgcggggtaggctga

SEQ ID NO: 379059 - DNA, 561 bp, Salmonella enterica
atgtattccctgcggggtaggctgaagaacaagctgggtaccctgacaccccgggagaagcgatacggaaataaagtgattgctctgctgaacgggttgattgaaaagaatgaaaaaatacagggaaagctgacagtatccgcaaacacgatacgttgcacggcgtacagtctgcaggtaacggttctcaaggccattcattatcagtggcatgagagagtgtatatgtcgctccttgagggaaaggacacctttcctgcggaagatgaacatcactgcgtcctgggacgctggtatcagggcgaaggcaggaaatgttttggctccctgccagcatttgtccgactgggagatgctcacgggaaacttcatcaggcgctttctgcactggtacaggagtatcacagtgaaaagtgcatgccggaacggatactgacaaaactggatgtgctggaaacggacagccaggctgtcatcactgcgctggatgaactggatgacagtgttataaggcagagcgtgaatgacgtatcagtatcccgttttccgacgtcacaatga

SEQ ID NO: 379060 - DNA, 150 bp, Salmonella enterica
atggctctcaccatcctgccgaatttacaccacgtcctgagactcgacctggaggtggaaacgctgaaggcatataaatcggctgatgtcctggtaaatcatacccaacgcgaacaggcgaacgatcttgagcttgatctcgtcagatag

SEQ ID NO: 379061 - DNA, 405 bp, Salmonella enterica
atggctgacaacagcataacattcagtaacaccctgatgcaacccgggggtaaaggctttttgtgcgagttcactgagtgcatgcttaaccgtatcatggaggctgacgtcactcagcgcatcgacgcagaacgccatgagtgcggcgacgaacgtgaaacctaccgcaacggctaccgtgaccgccagtacaacacccggctcggtacgctggatctgcgtatcccgaagttgcgtaaaggcccatatttcccgtccttccttggattcgtgaacttcatttttgtaacggcaatatattttttgatagttattgagggttgtgttttattttattatagtaaattaatttatgtcgactcattgaagacaataactgagtggtttttatttttcctcaattaa

SEQ ID NO: 379062 - DNA, 834 bp, Salmonella enterica
atgcaaaacagacgggataacatcaggctctggagtgatagtggactgcatgggggaatggaaattctgagagcctcatgctacgagcacagctatccgccgcattttcacgatgaatttgtgatggctgcatttgcccgtggtgcccagcgcaaccggatatgccggcaacaggggatcgcatcggcgggaaccgtcatgattatcatgcctggcgaagtacacaccggggaagccgtaaggcgtaatgaaggctgggattattgtgcattttacccttcacaagaactggtcaacaacgtggcggaaagcgtactgaaaggacgaggacacattaatttcggtaccgaaagtatgcgttacgatccgtttattgcccgtggtatgctccgtgccgcacgagtgctgaatgacagtaatgacccactggaaaaagaatgtgtaatgtaccaggtactcaatattctgacgggtcattatggagaacggacagtgaaaggagcacgtcatacgctgatacgtgctgacattcacaatgccatcgaatttttgcactgtgcttaccaccaaaagctgaccgtgaaagaaattgcaactgtcgccgggctgagcgaattttactttatgcgtacattccagtctatgacgggtctttctgtacaccagtatctgacgcagatccgtcttgtcagagccaaagagctactctcacgtggcctgagtgcagttcaggtggccagtaatgtcggctttttcgatcaaagtcatctgattaaatattttcgcacatattttggtaccacgccggggttatttgcatcatcctcagtctga

SEQ ID NO: 379063 - DNA, 258 bp, Salmonella enterica
atgttgagggagaaaaaacgcttctttctggacgaactggaacagcgccaactgttctgcaaacgtgaccagatggtcaccctcgtcttttcccctgtcagaaaagctggcgagagctggactgaacgtctgcagtggctcttaatgaaagatgggtttgggttctgcagtccgctgtcccgtgatgaagccgcctgtgcgctggatatcctgtcggttacacggggcgggaggtggcggagcatctggccagtgtga

SEQ ID NO: 379064 - DNA, 882 bp, Salmonella enterica
atgtcaataaataacaacgagttagctttagttatagaagagaccagtaaggataccggggaagttattcacctgcttcctacactacggcagaccatccaaccgaaggttcttctgcgtcttggggtgtttgtcccaacactgaaatccactgaaaagggtggaagaaagagtcacagcatagacgccacagagtcgctatcaagattatccattgtagagggtgaaggctataaccagattcagatctacgggccgcgactggacatggataccgatttcaaggtctgggtaggcattgtctatgcattatcgaacaagaaactgtgccacgatggccagctggagctgaatttccccgagttcgcaaagtactgcggcatcgagagcaagcgtattgaccggcagcttaaagatcgttttgacgcttcattgacgcgcattgcgaggacaaacatcagtttcataaagaaaatacccggtacagacgatcacattacgataaacatgcacctggtagaatccacgtattacgacagctcgaccggcactatcatcatcaaacctaacgccaagttgaatacactgtaccgggtcgacggcaaaaccaggctgtaccttaagtcactgcagaagctatcgcgtaaagagtctgcccaggcgctgtatctgtatcttgcagaactgccggcgacattttatcggataggtttcgatcgtctgcgcgaacgcctccagttaacttcacaccttggcaatcagaatgccactgtcaaaaaagctctccagcagctgaaggacattggatttctcgaatactcagtcgagaaagagaacggtgattacgttctgaacatcctcaagcgcaatcctaaactgtga

SEQ ID NO: 379065 - DNA, 864 bp, Salmonella enterica
atgcatgatgatgacaatccagacgcttgtcatgaagcgacccgggcggaggataaatgctacaccaaagggcggctccgggaagagttcaggatgaaacccgctcctggtgcggaaccagtccggtggtataaaaatggatacgggagtcaatacggcgtttaccggatagcggactgcgtcccgttgcggcagaagcagccccggaccgaaaaacagcggcaggctggcgctcgtctgggcctgcaggccagaatgaagagtgagcgtggcagagctgcccggctggcgcacacctggttaagtcaggaccccgtcttcctcgataccgaaacgaccgggcttgatgccggcgcgcaggctctggaaatcggtctggtgaatgcccgtggcgacctgatatacgaaacccgcctgaaaccgacggtcagtatcgatccggctgctgctgccgtacacggtatcagtgaagctatgcttgcagacgccccggcctggcccgatattgcgcagcagctgcaacaccatataggccggtgcccgctggttattttcaacgcggattttgatatgcgcattctgaagcagacagcggcagcgcataacgaccctgccagctggctgggctgtctgacggtgtgctgcgccatgcggctcgctgcgggttattacggacccaccaatcgttacggtaccatatcgctttccggcgcagtcagtcaggctggcctgagctggatcggggaggctcattccgccgtcactgacgcggttatgactgcacgggtggtaaacaatattgccggatactggcatgagctccagtgtgaaatgaatgatgacgcagggagtaagccggcataa

SEQ ID NO: 379066 - DNA, 1116 bp, Salmonella enterica
atgcgtccggcgacatacgaaccagaacagattattgaggcagggcaggccctgcaggcggaagggcggaatatcaccgggttcgcactgcgtaaccgggttggtggcggcaatccgacacgtctccgccagatatgggacgaataccaagcatcacagagcacggtcatcactgaacccgttgccgagctgcccgtggaagtggctgaagaagtaaaagacgtctccgccgcgctgtccgaacgcatcacccagctggcgaccgaactgaatgacaaggctgtccgggctgcagaacgccgggtggcggaagtcacgcgtgctgccggtgaacagaccgcacaggcagagcgggagctggccgacgccgcgcagacggtcgacgacctggaagaaaaactggatgagctgcaggacggatatgaccggctgacactggcgctggaatcagaacgttcacagcgtcagcagcaggatgtggagatggcccagctgaaagagcgtctggcggccgctgaagagaatgcccgtcagcgggaggaacgccatcaggagcagaagacagtgctgcaggatgcgcttaatgcggagcaggcccggcataaaaacacgcgggaagacctgcagaaacaactggagcaaatttctgccgaagctaatgcgcgcgcagaagaactgaagtctgaacgcgataaggtcagtactctccttacccgcctggaatcgcaggaaaatgcgctggcctcagaacgtcagcagcatcaggccacccgcgaaacgctgcagcagcgcctcgagcaggccgtctctgatgcacaggcgcgcgccggggagcttgcgcttgaacgtgacagagtcagcagcctcaccgcaaggctggaatcgcaggaaaaggcctcctcggagcaactggtgcgaatgggcagggaaatagccagtctgacagatcgctgcacacagctggaaaaccagcgtgatgatgcccgtctggagactatgggggagaaagaaacggtcgcggcactgcgtggtgaagctgaagccctgcaacgtcagaatcagtcactgatggcggcgctttcaggcaataaacagaccggtggccagaatgcatga

SEQ ID NO: 379067 - DNA, 882 bp, Salmonella enterica
atgaagctgctacgagcatttgtaacactggccaaattgggtagctatcatgatgcagctgaagccctgtatatgactcaaccagcactgaccaagaagattcagtctttagaaagaatgacggggataactctttttcaacgggggcgtcagggagcaaagcttacagaaccgggcaaacagcttcttgccaggactcagaaactgttgaaacactatgacgagttttcagaatatacgcgacgtttgcagaaaggaagttcagggaaacttactcttggatttggaatatcatcgtttcagttagcccccagatgtgtaagtctctttcgggaacaatatcctgatgtcgaagtatcacttgacgatattccttcgtatgttcaatgccatatgctacaggaagggagacttctggctggatttactcgtgaaccgttaacagagcaacttaacttcagtgtactgattaaagaaagtctggttttggctattccagaaggtattaaggataagtaccaaaaaattcaatcaatactggatcaatatcaactgttgcaaataaatccagatcgaggacgaggtctggttgaacaaacagaaaaatttctgaaagaaaataattacagaggaaaaccatcgcctgctgcaaatgatatccatactttactggctttggttgcaacggggaatggtgtggctttattaccagctggaaccagacattttttacctaaaggagtatctcttataaaaccagaaggaaaatataccaaatggaatatcggagttgcctggaatcctcttataaatgatattgtcagggataactttttacaaatagtgaatactattaaattgaatgaatattactcagcttaa

SEQ ID NO: 379068 - DNA, 600 bp, Salmonella enterica
atgccaaatgttgctgtgttgacaaatgatttacaatatgaatttacttataaaataacaactaatccacaagaacttgacgaaaaactgcaaaaattcaataagtttcttgatggtataagagacaccggtcaagccgtcatacatctgcaactcatccatgatcctgatgatcccgctgttcagcgtagataccgaaacagggcggctggaatacctgctatagccggcacaccaggcaatcaaatcatcagtacaattcaccatccatcagattttattgtgataaaagggagagatagtggtttctttgaaactcaattagatcaaaaactccagagtcttggagtcaaaactgtaattgtcaccggattacaaacccatgtatgcgtccagaccacagcagcagatgcattcttccgtggctataacgtctgggttcctgatgactgcgttttttccccctcatcagatgatactgacagggcacttcaatggctttcgggatattgtgcgaccgtcgcctcatcagctgaaatattgtcgttgctggagaaaactggtgatttacctgaacgcggtgaaaggaaaacagcatga

SEQ ID NO: 379069 - DNA, 1065 bp, Salmonella enterica
atgaaagtaactgaatcagaccccgataatgaactcggggtggacttatttgctccattaagtgaaacagtgatactggatcatggtacaggtgcaaaattaagccgagagcttgttgaacgtatctccgaaacactgggagaaacttatctgggaaaaatggaggacagtgctctattagaactaccaggcaatcatattgcttttactactgactctttcgtggtaacccctcttacttttggaaacggtgatattggtaagatagcggtgtgtggcacagttaatgatctggctgtaagtggagcccgcccactttatatcacgcttagcctcatcattgaggatgggatgccagtctcagatttgctaaaaattattgcatccgttcgtgaaacagctcgttcagccggtgtaaagattgttgccggtgataccaaggtggttggaaaaggcgaagctgaccagctttttataaacaccgctgggataggtgttctggaacgacctcctgtttctgttcaacatgtcaggccgggtcagaaaataattctgagtggttatataggaaatcactctatccatcttttatcgattcgggaaggcctgggttttgaacgtaatatattaagtgactgcgcccccctgaatcatatgattgaaaacgttttgctcaatacccctgccggaaagattgcatccatgcgtgacgtcactcgtggtggtctttccgctgtattacacgaacatgccagagccacttcatgtccgatattttttaataaagaaacgttgcctatccagcctgaagcagctatggctgctgatatgttaggtgtggatgtcatcaatctggccaatgagggatgtctttgcctgtttgttgaacctgatgtggcaaatcatgttctgaaattactccgagctcatccttttggtaaaaatgcagcccttattggagaagttaaaacaggctctcagccgaaagtgtatatgatcgaacctgacggtactcataccattatagaggaactttacggtgcagaactaccgagactctgttga

SEQ ID NO: 379070 - DNA, 2349 bp, Salmonella enterica
gtgcagaactaccgagactctgttgaatctgaaaaaaaagacacatgccggtttcgggtttgtggcattgtccagggtgtaggattcagacctttcgtccaccggctggcgaggactcatggtgcaaccggctgggttcttaatgattcagaaggtgtcctgctggaactacaggcacctttacaaaccatatgtaacataatcgatgaactgatatcacagcctccgccactggcacgaattactgatatacataaggtggaactggaaaaaccagccccacattattcaggttttgagatcagaaaaagccaggatttatcctgtatggatacaatcatccccccggattcaaatgtttgtaaagactgcctgtgtgaaatgaacgatccatcaaatcatcgttatcgttatgcttttataaattgtaccaattgtggtccgcgttattctattatccttggaatgccctatgatcgtgcacaaactactatgcgatcttttataatgtgcccacaatgtaataatgaatatcatgatattgaggatcgccgttaccatgcacaaccaaatgcctgtcccgcttgcggaccccaattacagttaactgacaaagatggagtatcaatatcagtcagtgacattatacgctttactatcgacaggttaaaagaaggtgctattgtcgcaattaagagtcttggcggttttcatctggtagtggatgcttccaatagtgaagctgttcgtgagcttcgtaggcgtaagcgccgggatgctaaacctttcgcagttatggttgctgacagtgacagtgcggatcgatgggctgttgttacacctaacgatatccatttacttgagagcggacctcgtcctatagttctcttacgcaaacgctcacgaacattgccagaagcagttgcacccaaaaaccctgacttgggtataatgttgccctccacccccttgcaacatatgttgcttgatgatcccgaactacctgtcgttataatgaccagcgggaatatttccggacaacccatcgtaattgataataatgaagcaatagaacagttaggaaaaattgcagattattttgtacttaataatcgcgatattcgcacacgtgtggatgactcaattgttcgtgttattaaccgaaaaaacaccactgattcacaaatatcatttttacgtcgctcacgtggttatgcaccttatcctattcatcttccttattcagtaggaaatgtagtagcgtttggtgctgaactgaaaaccactgtaagtattggaaaaggtaaacaagtattcatcagtcagcatattggggatttaaaaaatgatataacattcaaatctcaccttgactgtataaaacatatgcaagggttactgaccataaaaaaaacagatattattgcctgtgatttacacccggcatttcgttcaacccggagtgttctcgaaaattctgaggctaaagtaatccaggtacagcatcaccatgcacatatggcttcatgcatggcagaaaacggtctttcaggtaaaacaataggcgtgattttcgatggtacaggatatggttctgacggaactatctggggaggagaatttttatttggtgacttagaagacgtggagcgcgttgctcatttacgcccaatgctattacctggtggtgataaagccgttaaagagcctgttcgaatggcaatatcattactggttgaaacttacggtgaaaatttggatagttttattcgtttaccagctattcttaatttatcagaaaaaagacgtgaaatatttataaaaatggtcgaaaggaaaatcaacacaacgattaccagcagcatgggacgcctttttgatggagtttctgctcttattggtatttgtacagagattgaatatgaagcacaggccgccattgaaatggaagcccttctaaaaaaagattttcacatggcaaaaccttttaaatatattatagatgaatcttataacggaaaaataatcattgattatcgtcctctggtgaatgaactggttcagtcaatattagtcagtaatataaaagaggaagaacttagccgacgctttcactcaaccatagtggatattatagtaacggtttgttctctactaactcaacgttataaaaccgatcaaattgtattaagcggaggtgttttttgtaatgagtttctgctgattaacactcttgatgaacttgagtcaagagggttcaggccatattgtcataagctggttccagccaatgatggaggtatatcactggggcaggtagtcgtagcgtcaaaaatcataaaaatatag

SEQ ID NO: 379071 - DNA, 708 bp, Salmonella enterica
gtgaataaatatgtagagcagttttcagctgtattatttgatatggacggtgttctgatagattcccgaaccgttattgaaaacgcatggcgtgaagcagctctgatgtatgaccgccatctcactaatgaagatatacagaagcatatacatggacatcctggaccgtataccattcgaacattatttaatgacctgcctgtatcagaccaaaagatagttcaggctcatattattcatgtagagaatactactgactgtaaacttataccaggagtagacaaactaatagcatctttaggggaagccggtatttatgttggcatagtaacgagtggatggcgccaaaaaattaacagagtaatagagttacttcatgcagaaccatacatatcagttattgtagaacgtgatgatgttacacgtggtaaaccccatccagaaccatatcttcttgccacacaacgcctgggtattcctgcaagtcaggccgttgtcttcgaagatgctaaaagcggtgttatctccgctgtaacagcgggtagttattgtgttggcataggagatgaggatctcatgccattaggtacaaaagttattattcctgactttcaaaatgtaaagttaatcagaaacagtgcagatagctttatactaaaattatgcgttgatcactgtattttattaaataaaagtaattcattatag

SEQ ID NO: 379072 - DNA, 1164 bp, Salmonella enterica
atggaacgagtacaaaaatcccgatgggcagttactgtacttttttttgtcaacggttttatccaggggggatgggctgtgcagataacacagcttgctcctcgttttggtgcggatgatataatgacaggccgccttattctgacattcggtttgggggctttattcctgatgccgttgtccggtattttaatttcaaagtttggttcacaatggaatgttcgactgttatccatattaacttctgttgcgttaataccaacagggcttgttaaaagcctcactttattagttgtttttttatttattctaggtgccatgattggttcaatgaatgttgcaatgaatgcaaatgcagttatagttgaaaaaaaattagccaaagcaatactatccacatcccattgttcatggagtattggtttatttgtttcaggttctattggcggttacgctgttaaaaactttggataccttggacacatttttataatttgtactgtagctttttctcttgttttattagtaatcccttttataacagatgacaatccagaaccgaaagaaaaaaacaatttatcactgtatttaccccgccggcataaaatttatataataggaataatggctcttttaggaatgataccagagtgtgcagttgtagactggtcatcacgttacttaataaaaaaccttaatgctaatatagaagtagccagccttgcatttgcttttttcgcatgtaccatgtcaatagttcgattcgctggtgacgttatacgtgatcgttatggccctgtgaacactattcgtatatccagtattctggcagccgccggaatgttggctgcagccctgtcagaatcaccatggcaggcaattcttgctttttctctggcaggtagtggtattgcaaatattgttcctgtcatattttcatcagcaggtcatcagacaggaattacagcaggtaccggtataagtattgttacaagcataggatatttaggtacattaatggcacctgcaccaataggtttttttgcacaacatttcggtttctccacaatatatacctcaatggcttttatacttattattaattctgtaatggctccattattacgtaatataaacatagataaaaaagagcaattcaaatga

SEQ ID NO: 379073 - DNA, 462 bp, Salmonella enterica
atggttgaaactcaagacgatacagaatggttagctcaggagattgacgaaagtagtttcaatgatcgcagactcggtcggcgattttgtgaactcatggagaatttttggaaaaatataggaagcacgatcccgtttgcctgtcaggactgggctggaactaaagctgcttaccggtttctttcaaatcctcatgttgatgaatctgccattctgaagggacattttgagtccacgcgacagcgcgtagcaacactaagaaatgaaactatattactacctcaggatacaacaacttttatttatcaaagagataatccagatatcattgggtataccggaaccacgtcggcatggggaaagagaaaatataaatcaaaaggtaagattgttaattgtggtattttgatgcactccagcctcgctataacctcgcgaggtgtgccgctggggttatcataa

SEQ ID NO: 379074 - DNA, 198 bp, Salmonella enterica
atgacttttaagaagggagatattgttacactgaaaagtaatggtcaaaaaatgaccattacacacattgtcgggtggagcagcgatatttttgtgatcctgctgactgcgggatacgtcgaaacggaatggtcatataagggtgagacaagaaagggtacattcagagtggaatcactgacggaagcagaagagtaa

SEQ ID NO: 379075 - DNA, 423 bp, Salmonella enterica
atgccagactcagaaataacagatatgattgcctactactcccgcctgatgaccgggcgggttctgaaccccatttatttaaattactcgcccgatgatttcaacggtgaattacgtttacttattctttcagttaatgacggactgatcaaaggaaggatgatatcagcgatgctggataaaacagaatatataatagctgataaaaccattaattatctggaaaagcaaaaaaacaaactcaaaggactctgtaattatctgaagcaatgtcgtagcacacaacataaaaaggagataaagagtacaacgctcatactgattgatgaggctgttcatatctgtgatgaaggaaatgagcaaatggaaaaactggttcaccaggcaaggaaaacaagatgtttactgtggcttcacccctga

SEQ ID NO: 379076 - DNA, 747 bp, Salmonella enterica
atgaataaatcagttatattttttattattacatttcttatgtccggttccgcactcgctgaaaaaatcagattcagcacttccgccaccaatcctcctttcgagtcttttgatgaccataatcaactttccggttttgatattgatcttgcaaaagcattatgtaaacgaatgcaggctgaatgtacattcactaatcaggcctttgatagtctcattcctgccctgaagtttcgtaaatctgacgctgtgatttccagtctggatatcacgcctgagcgaagcaaacaggtcacattttcagacccttattacgaaaactctgcaagcgtggtcgctaaaaaaggtctttacagtacgtttgatgatttcaggggaaaacgcatcggtgtggaaaatggttcaacacaccagaaatttcttcaggataaacatccggaaataaaaacggttgcctatgacagttatctcagtgcctttacagatctgaaaaacggacggacagaaggggtttttggtgataccgctgcggttcatgagtatttaaaaacaaatccacaacttggtacagcaatccgaaaagtcaccgatactgattattttggaaccggactcggcattgctgtcaaccgggacaatccggcattgatccttaaaataaacaaggcattgtgggaaattaaacatgacgggacttataataaaatcattgacaaatgggttccggagcaggatatcaaaaactga

SEQ ID NO: 379077 - DNA, 1314 bp, Salmonella enterica
atgaaaaaaaatgatgataatctgaagaaagctgcagtcgcaagctttgtgggaagctttattgaatggtttgattacgcatcttatggatatatggttaccattcttgctgtcatattcttccctggagaagatcatataacaggtctgattgccgcttatgctgtattcgccctttcttttttcataagaccgtttggcggtattttctgggggtggctgggtgacagaaaaggaagaagaaaagcgttatcttactcgattattaccatgtcggtagcgaccacgctgattgcttttcttcccacatacaaagaggctggttttatatctcccctgttactgatactggcacggacggtacagggattttcagcatccggtgaatatgccggaggcgctgtcttcctttatgagtatgcccctgataacagaaaaggattttataccagtttaatacctgccagtaccgcgacaggattactttttggttctttgtttgtggcaggaatgtacctggctttaagtacagaagagctttactcatggggatggcgaataccatttattcttgcggcgccctccggttttatagggtggtatataagaacaaaagtgaatgactccccttcgttcagaaaatcagctcactccgtaaaagagagtataagcatgaaatctcttttcagaaatcaaagcagaagaataatcactggctggggagtttcgtgcctgaatgcagtggcattttatttattgctgagttatctgccgacatggctgataacatatcagggggttcctgaaaaatattcttttatgatatcaacgggtatattgcttctgtatatttttatggtgatattaacggggtgggtttcagatcatctgggcagaaaatcaatgttactgacagcttcaggatgttttattattttttcactccctttttttatgattataaataattataatgatagctatttattaattgccatcatgtattgttttcttgttctcttcctggcaatgaatgacgggactgcctcctgttttttatgtgacctgtttcctgttcagttccgttatacagggtttgcattcagctttaactgtgcaaataccctgctcggaggcactacgcccctgatgtcaacagaactgataaaattatcaggctcgccagtctcgcctgttttttttctgatattctcagcagtcattgcattattatcaatcatcctgaacagaaatctgttatgtgtaaaaaatgtgacggataatcatggttcctctcacaaaatcactgtataa

SEQ ID NO: 379078 - DNA, 942 bp, Salmonella enterica
atgagctcatcagaaatctccagaaaaaccgggtttatgtctgctttcggggcagccaccttaatgggatttgtcggctttttctccaggcatattaatgctcagggagatgttatcgctttttccaggatgttatgtggcgctgttttatttttctttattctgctcaaactggggcgactgaaagacctcaggaaatataaactctcatacacaatggtactcagtggcctctttatgggaacatgcctttcagcctatgtcgccgccacacaaatgacgtcaatagccaatgcggtattttttatttatattggcccgatagtctcatctgtcctggccgtcattttcctcagggaaaaaatgaaatcatccaccctgtttgctgttattgctgtttttgcaggaatgcttctggttgtcgggatagtcagattcagtaacggcagtattcatgtcggcctttcattttcgccaaaaacgctgacaggcgatgtgctggcactgttgtcaggtgtcggatacggactttttcttttttttggccggtacagaactgaagttcccggtgatgtaagatccttctggaattttatctttgcgcttgccgggatttgttttttattcctttttacacacccgtcagtttctcagatgaccttcagtgactggatgtggtggctggggatcggaatagtctgtggatttggggccttgtccctttgtactatagcaacacgtcatcttcaggcttcagagtttgcctgcgtcagctactgggaatgcgtggtggcggtccttttcggctacttcattttttctgagccgttatctcttccacaggcaattggaggggcattaattatcgtgggtggtgtcagcgaggttttattcagtattgtccttaataaatcacatgttaaggaaaattcacccggataa

SEQ ID NO: 379079 - DNA, 1131 bp, Salmonella enterica
atgaccagaattgtgaattcgtggaatgactttgatccactgaaacacgtgattgtgggtgtggccgatcacagttgtattccgcctgaagaaccggcgacatccgagaaagttccgatcgacagtcccatgcggggacagtggggaccacgcccgactgaaacggtggaaaaagcgaatgcccagttgaataatcttgtcaaagtactcgaaaaagaaggggtgaaagtagacaggcccacgccactgaactggagccagcccgtcatgacgcctgacttcagaaccgccagtatgatgacctgcatgcctccacgtgatacgttgcttacgattggtaatgagatcatcgaagccgcaatgtcattccgttgccgttactgggaatatctggcatttcgtcccctgctgtcagaatacttcgataaggatccggattttctctggacccaggctccgcgcccacgcttgtcagacaagtcatataagcacaactattatgacgaaaaaatcacgctggaagaacgtctgcttcgtaccgccaataaagatttcgtcacgactgaagaggaaatcatgtttgatgccgcagatgtgatgcgtctgggtaaggatttatttattcagcacggactgacaacaaaccgtaaatccatggagtggtttaagcgtaagtatccggatttccggatccatgcagtgaacttcccgggcgacccctacccgatccacattgatgccactttcgttcccctgcgtccgggtctgatcattaataacccgcacagaccgctaccaaaagaacaaagggctattttcgaggcaaatgactgggaaattgtggaagcagcacaacccgctcataaggagccgcctccgctctgctacagctctgtctggttatccatgaactgtctggttctgaatcacaagacggtcatcgttgaagcctctgaagtacaccagctggaacagatggataaactgggaatgaacgttattcctgtggctttccgggatgcgtatgccttcggtggcggtctccattgttccactgcagatgtattccgtgatggcaaatgtgaggactatttcccgaatcaaaaagttaaggatatcacgcgtgtctga

SEQ ID NO: 379080 - DNA, 513 bp, Salmonella enterica
atggaaaataaaaaaatttcgtcgtggataaacgaacagcaacgccttacgttatgcaggaaattaattatgaccgggcagtactcgtctcaggaagagataaggtcagaaatgaaaaaagcgggttataaaagaataagtcagtcttcggtctcccggatgctgacaatgctgggggtaataaaaatacgcaatgcccggggagtacaggtttattctcttcatcgccgtgcagatgcagacagtctgtcttctgaactcagtaaaccgcttatagcaatggtgaccagcgtggagcatagcagtaaatttattcttgtccacacaaccaaaggatgtggtcgtgtaatagcaaattttattgaatcatgctgtctgcctgaagtgctgggagtaatagccgtcagtaacgtagtctggatcgctcccaggaatacagatgaaattacatttttatatcagaaactggatgatctgctgaaaaacagggagttattacctgccagcagttga

SEQ ID NO: 379081 - DNA, 1005 bp, Salmonella enterica
atgactgtctgtctgaaaaatcgcaatttccttaagctgcttgatttcacaccggttgaaattcagtttctgattgacatggcaatacagctgaaagccgataaaaaagcggggcgtgaaaaaaagaaactggtggataaaaatatcgccctgatatttgaaaaaacctcaacacgaacccgttgtgcatttgaagtggccgcttttgatcagggggcacaggtcacctatattggctccagcggctcccagattggccataaagagtcaatgaaagacaccgcgcgggtactggggcggatgtatgacggtattgaatatcgggggtttggtcagcagattgtggaagagcttggggaacacgcaggcgttccggtctggaacggtctgaccgatgaattccaccccacgcagatcctcgccgatctgatgaccatgctggaacatgcgccgggaaaaaaactgccggagctgagctttgcttatctgggagatgcgcacaacaacatgggtaattctctgatggttggcgcagcgaagatgggcatggatatccgtctgatcgcaccgaaatccttctggccggacgccggactggttgcacaatgccgggaaatcgccagcgttaccggagctcgcatcacgttaacggaaagcgttgaggatggcgttcatggtgtggatttcctctataccgatgtctgggtctcaatgggtgagccaaaagaagcctgggcggagcgtgtcagcctgatgaagccataccaggttaaccagcaggtcgtggacgctacctgcaatcctgacgtgaagtttatgcactgtctgcctgctttccataacgagcataccagggtggggcgtgaaatcgaaattgcgtatggtctgaaagggctggaggtcacggaagacgtgttcgagtccccctgctctgtcgtattcgatgaagcagaaaaccgcatgcataccattaaagcagtgatggtcgccacactgggtaactga

SEQ ID NO: 379082 - DNA, 912 bp, Salmonella enterica
atggataaaaaacctactctggttattgctcttggaggaaatgccctgctcagacgcggagaaccactggaagcatccgttcagcgtgaaaacgttaaccttgcggcacaggttatcgcccgtctgactcagcaatggcgcgtggttctggtacatggtaacggtcctcaggtcggactgctggcattacaaaacagtgcgtatgaagaggtgtccccctatccgctggatattcttggcgcagaaagtcagggaatgattggatatatgctgcagcaggccttaaaaaaccagcttcctgacagggaagtcagcgtactgctgacccgggttgaagtcagtgaagatgatcccgcatttcaaaatccgacaaaatacatcggcccggtctataaccagtcacaggcagaatgcctgagggccgaaaaaaaatggcagtttaaagcagacggaaattatttccggcgggttgttccttcaccacagccacaacgtattgtggaatgtcaggccataagagcgttgatttcgcttgatcatctggttatctgtaacggtggtggtggtgtgccggtgattgacagggctgatggatatcatggtattgaagccgtgatagataaagacctttccgcagctctgctggcccgggagattaacgctgatgccttattgatcctgacagacgcagatgcggtttatctgaactggggtaaggaaaatcagcgtccgctgtgtcaggcaacgcctgacttattaaaagagatgcagtttgacgcgggttcaatgggacccaaaataagcgcctgctgccggtttgtcactgactgtaacggtattgccggaataggatccctgcaggacggttcagcgatcctttcgggtgaaaaaggaacactgattcgtaattaa

SEQ ID NO: 379083 - DNA, 1221 bp, Salmonella enterica
atggaaagaaattttgtcggctctgaaacaggacaattacgtagcgtaatgctgcattgccctgacctcagcctgaaaagacttaccccttcaaattgccatgagcttctttttgatgatgtactttctgtagagcgcgcagttgaagagcataatattttttcgaatacgttgcgtgaacagggcgtcgaggttttattactgaccgatctcctggctcagactctggatatccatgaagcgaaatcctggttactgaacactcagatttccgattatcgtcttggcccgggttttgcgggggatatccgtaattatctggcagaaatgccacatcatcagcttgcacagtatcttactggtggtctgacctatggtgaaattccttttcatataaaaagcatggtagtggatcttcattctgaaaatgatttcattatgaaacccctgcccaatcatttattcacacgggatacctcatgctggatctataatggtgtgtctataaatccaatggcaaagtccgcccgtcagcgtgaaacgaataatctccgggcggtttatcgctggcatcctgcattctccggtaatggatttattaaatatttcggtgatgaaaatattaattacgatcacgctacgctggaaggcggtgatgtgctggttattggtcgtggagcggtattaatcgggatgtcggaaagaaccactccacagggggtggaattcctggccaccgctctattcaggcatcatcaggctaaatgtgtcattgcagtggaattaccaaaacaccgctcctgtatgcatctcgacactgtcatgacccatattgatgttgacaccttttctgtttatccagaagtgatccgtaaggacgtgaagtgctggactctcacacctgatggtcgtgacgggctggcccgtattcaggaaaccactctgctacatgccattgaaaaagcgctggacattactgaagtccggttaatcacaacgggtggtgatgcctttgaagctgagcgcgaacagtggaacgatgccaacaatgtactgacaatacggcctggtgtggtcattggatatgaccggaatgtctggaccaatgaaaaatatgacaaggcaggaatcacagtcctttctgtgccaggaaacgaactgggacgcggacggggaggcgcccgctgtatgagctgtcctctggaacgtgacggaatataa

SEQ ID NO: 379084 - DNA, 1500 bp, Salmonella enterica
gtgctctacagcatggcggcgggcgtcacggaacactttaaggccgatccccccgaatggagccgtttcacgggtaaaaaactcacgccggaacaactgaaaatcgtcatcagcaggatgatcagcgtgcggttctggtcccgtcatttccgcacctttacccgccgctggcgcgagcatctttatatcgctgtgggtgacgttcgccgtcaacggtctgttatctgttcgcctcagtgggttcagtactggctggccggccgcaaacgcgggcgtgaaatcatggcggaaaccgaccttgaggacgaggagaccggagagacgttaccgctgttatctgctgtggatgccagcgtgtcaaataacgaaaagcgccgcgcggaaatgatgacgcgcgtcaaaggcatggaagagctggcggaactggacagccttgcgcaggacagtgattacatcgggttatttttcacctggacggctccgcgccagtatcacgcctggctggagaccggacgccgtaaccggaaatggaacggggccagcccgagggagacccagcactatttcacccgcacctttaaaaattgcagcaccgcgctgacccgccgcggcgttgatattttcggcatgcatatcactgaatctcaccatgacggcacgccgcactggcacggcattctgtttgttcgcagggagcaggaggcgacattacgcgaggtattcgaatcttacgccaacgcggagaactgcacttctcacaggccgggaatgcagccggcacagtctcaactgatgattaagcccatcgataaacgccagggtagcgccacagcctatatcaccaaacatatctgccggaatatcgagggatgcgcgccgggaggtgctgacagagaaaccggcaggccctggactgagattgcccggcattcggctgcgtgggccagtctttgggggattaaacagtttcagtttattggcggcccgcctgtttcggtatggcgcgaactaaggaagctcagcgatcagaaaaaagccgacagtgtaagtcctgttttcggcgaactgcatcgtgcagcgggctgcggagagtgggcgacgtacaccctgctacagggcgggctgctggcgaccagaaaaaacctcaccatgcgtacctggtataaacccggcgaagagccggatgaatgcggtcagtacactgccactatcaaaggtgtctacctgcaggggagtaataaacccccggtaacgacacgcacccgcaaatggaaagtcagatccccccgtcagagtactaaaccgggctccttgaaaatcaacaggaagtcagctttaacgccctggactcgtatcaataactgcactatgcgcagaaaacaaccagtagatcaccctccagatctccacctgaagatcccgatccaactggagctggatttcggggagatgaaaaaaagtgagagtgagcgaaaggtaaatccggacaaaagcaactga

SEQ ID NO: 379085 - DNA, 300 bp, Salmonella enterica
atgaaaggactggatctggaaagaatgacgccggagaagattcacggtatcgggctggagtgcatacgccgggctaaggtaatggaagagtcaggggcaacaaaagacgccatcaggaaaaatcttctgcctgcaatgcaaagaatggaaagagccaggcatgaactacagtctgctttcgacagggtgatagataaaacggcggagcttgaaaagtgtgaggccgatgtcagaaggatgctgaataaaattgttgagcagggcgctggcagcgacagtgataacgaacacggcaactga

SEQ ID NO: 379086 - DNA, 1116 bp, Salmonella enterica
atgcgggcgattctgacagcatttccacaaaacggcgccagggtaacattactgaaatccggcaacctgacaaacagacttcgtgacggccagcgtatcatgatctgcgacgtaccccgccaactggaaaatgcgccagcaggcgagatagaggaaacggggcaatggctggcccatgacgaaggcctgcaaccgttctttgccgacagcagggtaataaatgctgccggtggtcaggaggggctgaaaacgtgggtaagcagaatagcggattgtcagtgcgttggcggtgatcatgtcaggaacctgacgacagcacagacaccggacggcggtgccgtgaggttgtgccatgcgtgcgataacattcactacatgaagggataccgcgatctgagtgaaataatcaccagtaaccgcgcagaatggatagtggactccgccagaatgagtctccggctgaatgctgagcatcaactgacgttgccggagttattctgctgggcggtattgcgcggcgtggctgatgccatgcccgtggacatgatacgtcgttttaccacgctgccggaagatgaagtactcacaggcactataaaggaagcggacattaacccctggcaactcagcgcccgccagatagtggagaaaaaaaccggggaaggcatggcagctatgccccctgatattcatacagtgccagacgcaaaaaaccttattaaggattctggtcttaatgagatcgctacagaaagggtaaagcccgttctgacgctgaacatcgacagcgacccggcaacaggctacatgagaaagccaaaaatgatccgcctggaactgccgggctatacgcagtgggtgaaacgccagccctgttgcggatgcggaagacaggcagacgacccgcaccacattatcggtaatggctttggcggaaccggaactaaagcgtgtgatttgctggttatcccgctgtgcaggatctgccatgacgcgctgcacgctgatatcagggcatgggaagagcagaacggcagtcagttgctttggctggcgagaacgctggcaagagcaacaggcattggcgcaataacagctaaccgcagcgagggctaa

SEQ ID NO: 379087 - DNA, 654 bp, Salmonella enterica
gtgacaccgcagacaatcacctgggtaagaaatagcgtgatattcgcgctgaactgcggggggaaaccgcagcggggacaactggccgcattcgaaggatttgcccgagcaaccagtaaacgctacgggcgtcaccgggagcgcacgctaaaaataggcaaccgctggtactgtcgggacaccgatccggtttacgcactggagacggccaggagcaaaaaacagccggatatcataacaccggaggagttcagcagcgcatcatggcgtcgggcaatatacagcctggatgattacgaaaaagcgtggatactgtactgctacggcggcgagcatacctacatgaaccacatgctgatttgcgagtacctgtggttacagatgcataaccggctcagggcgagccggaagcgcatcactgacgacgtaacgggcaatcttattgcactggtcgggatcgctgcatggaacgccggacagttaatgagcggtaaagacaatgcagaaatttttgcggcgacatacgcggcgcaggaaattggggtaagtgcgccagcatggagccagaactacaaaaaacactggaaatttatgtacgataagtgcgcagaactggatcatgacgcactggaaaaactgatgcgaaaaatgtag

SEQ ID NO: 379088 - DNA, 261 bp, Salmonella enterica
atggtcgagataacgtggtcacggaccgcccaaaaacagttgcaacgtatcgatatacgttacagaaaatcgataaaagataaggttgcagagttaaagggattcccgctggtggctttagattttaagaagctgtcagggagcgaaaacagattcaggctaagagtcgggacatacagagtcatttttgatgttgaagacggcgagccgaagatcctggagattaaggaaattaaacgcaggagcaccaatacatactga

SEQ ID NO: 379089 - DNA, 375 bp, Salmonella enterica
atgaaaaccgggattcagtttattactgacgaaaaaggcattaaaaaaagcgtaattcttccactggaagagtacgagaggctcgttagtgaagcagatgcagacgagaactacgaaagcgtaccgtataaagccggagagcatgatgatgaaactattcctcatgatgtggtttccattatggttgatgaagacgtgtcattactagctgcatggcgtatttatcgaagaatgacgcaaaaagaagtcgcggagttgctgggggttaaacaatctgccgtctctcagtttgagaaggtggaaacacccagaaaaacgacactggagaaactggcggaaatttacgattgtcatataggtcaactggctgactaa

SEQ ID NO: 379090 - DNA, 372 bp, Salmonella enterica
atgcgtggccctttttcatatccgactatccagggctcaccaatgaaagtctacatagcgggaccgatgagcggactctccaacttcaaccgcgacagatttaacgagatagccgcgctggtggttgaaagcggcaatatcccgctaaatccggccactcttcccgatgggttgccggaacgcgactgcatggctgtcggtattgccatgctgcagtgcgctgacgccatttacctgatcgaggactgggagaactcagcaggcgcaagggctgaaaaggcgctggccgataagctgaatgtttctgatataaccattcacgttttcagaggacataaaaatgaaactgaaattactggaagagcgcattag

SEQ ID NO: 379091 - DNA, 489 bp, Salmonella enterica
atgaaactgaaattactggaagagcgcattagcgtgctggaaaaatgcctgggcgaacagactagccccgacatgctaaaagcgatccatgaggttagcaaaaaagcagcacaggaatttttaagtcagtgcgaactaaaaaaaacggtagtacatgacattaatggtgagagttcaactttttacaaccctgatggaactgtacgactgcaagttgggagattgaatgataagcatgatgaatatacacggatagaagccacctttccagtaatgaaatacccaagactgataactgaaaagggtatttttgacatcaagaagatcccaagaattggcggaaaggtagagattaccctttctgaagggaatgttttgtcgcttgaatacgaagaagattacgacccagcaacaacgctggaaggttacgaagcaagagcaaaagagtatgcgtcaagggttatgtctgaaataaaaaaggcgcattaa

SEQ ID NO: 379092 - DNA, 225 bp, Salmonella enterica
atgagttacggctatggtgttcaccccaaactgcctcctgagctacaggagatcgacaataaagcccagggagcaactgacgtaacaattgctattattgccttattgattgaagagtcaaaaaatcccgatgaaaccaaaaagaagataagcacgctgcttagtaaatacagttcaacgcaaaggcttgtccacttcagtcggctatcgtccattctgaaataa

SEQ ID NO: 379093 - DNA, 243 bp, Salmonella enterica
atgtacaaggtcaaagttacatacatattgccggaatcggatcaggtgcgtgtcgcagtatgcgcagtgaaagaagacggtagccagattttccagatggagatccagccaccgtacgaaaagggtaagtcactggatgcctacgagcaggccgcgatagagcagtacacctcgattgtcagtgatattgccgcctcggtacaaccggcaccggatgccaccgaagccagcgccaaaaagtaa

SEQ ID NO: 379094 - DNA, 291 bp, Salmonella enterica
atgctggagaaacatacaacgtggctggcctatctgtgggcggtgatttgtggtgctctcgctcagtggacagtacacgactacggggcgctgattggtatcgttctgggcattggtacgttctgggttaaccgccattacaaaaagaagctggagcagacgcaggcaagacaggcggcagcactggaaaagcgtaaccagatacttgaacagatgaccagaaagccggacagcgcgaccactgccctgatagtggaatcagagaggctggatgatgcagataaaagttaa

SEQ ID NO: 379095 - DNA, 492 bp, Salmonella enterica
atgcagataaaagttaaaaggcttatcgctggtggcgcgggcgcaattgccatagctgcggcgttaattaccggaccgaatggtaacgatggcctggaaggtgtgcgttatcagccttatcaggatgtggttggtgtctggactgtttgctacggacacactggcagcgatgtcaaaatcggaaagacgtacaccgagacagagtgtgccattctgctcacaaaagacctgaataccatcgcacgtcagattgacccctacatcaaggtccaaatcccggcaacaatgcgcggtgcactttactcgttcgcatacaacgttggcactggtgcgtttgctaaatccacccttctgaaaaaactcaacgctggcgacaacgccggagcctgtaacgagcttaaacgctggacgtatgcaggcggcaagcagtggaaagggctggtaacgcgtcgtgagattgagcacgaggtgtgtatgtgggggcagaaatga

SEQ ID NO: 379096 - DNA, 510 bp, Salmonella enterica
gtgggggcagaaatgaaccgcataatcacgggcgtaatagcttcattgctgatagtagtcgccgcgctggcatgggcaacagaccattaccacggtaacgctgtgcgctacaaagaccagcgcgacaccgccaccgacaacctgaagctggcgaacgagacgattgacgatatgacgaagcgccagcgtgatgttgccgccctcgatgccagatatacgaaggaattagccgatgcgaaagctgagaatgatgttttgcgcgatgatgtcgccactggtcgtcgtcgcctgtacgtcaacgcaacatgccccacagtgccgacaggtaaatccaccgccaccgcccgcgtggataatgcagccagccccagactggcagactccgctcaacgggattatttcactctcagagagcgagtgaagacgatgcaaaagcaactggaaggggcgcaagcgtacatccgcacccaatgccacagtaatgcaggaaaaagtagtaaccaatggtga

SEQ ID NO: 379097 - DNA, 492 bp, Salmonella enterica
atggacggtgaactgaaaaaccttaaatgtaacatcagtcagttggccgccataacaggattgcacaggcaaacagttgtcagtcggctttccggggttccccttgctccgggcagcaatgaaaagaaaaaactctatctactgactgatgtgatacgggttttgatggaaacgccagcctctccggcagcagagcaccaggacccgaataaaatgacgccaaaagagcgaaaggactggtttgattctgaaaagggccgcatctggctggaaaaagaaatgaaacaggtcattccattaactgaagttcgtcagcaaatgtccgcagttgtgaaagcgatcacccaggtactggaggtatggcctgacaggctggagcgtgataaggggtggacagcggagcaacttaatgaagctcaggaggtggttgatgaggtgagggacctgttggcgcagtccatgcagggtacagaggtagttgatgatgagtga

SEQ ID NO: 379098 - DNA, 441 bp, Salmonella enterica
atgagtccaagcgtttttcctgttcgtgccggtccggcaaaaattacggcgtcatattcccttttcgccagcgtatttaccggctcgtttatatacggcgtcagtgacgaatcccacggaattgatgtgttagcaccatgtggcactcgcataaactgcctgacagcatcagatacaagcattcttcgcggggggcgaaaatactcagccacttcacgacaaattttaaatgctgatccgtattgttcactcatcatcaactacctctgtaccctgcatggactgcgccaacaggtccctcacctcatcaaccacctcctgagcttcattaagttgctccgctgtccaccccttatcacgctccagcctgtcaggccatacctccagtacctgggtgatcgctttcacaactgcggacatttgctgacgaacttcagttaa

SEQ ID NO: 379099 - DNA, 267 bp, Salmonella enterica
gtggcgacagcggaagccatgctggaggcaggttataacccgcagaagcagatgcttgcttactgtacggatattgacccgctggcggcgatgctgtgttacatccagctcacgctgatgcatattccggcggtggtttccatcggcaacagtctgacgatggagattacacgggagatggcgacgccggcataccggctgggcctgtgggacctgaagctgcaccggcagcagactgaacgcgaaagcagacagcatgcggcgtga

SEQ ID NO: 379100 - DNA, 912 bp, Salmonella enterica
atgccggaaagtatttatattcagcggcagattatgacgtttctgggactggacgttcaggcggaggaaatcttcttccgcgtggacgaccgggacaccgattacgttaacaccgacatggtgctgcaccgtgaccgcctgctggcggtgatgcagtttttacttgatgaggtgacggaacagaacccgcagcagcgggagaagtgccgccatgctgaacaggtcctgacactgtggatacggggtctggacgcgctggcgcagtcgatgaacgacatggccattctgccccggacggtatcagagttcagcgggcgggtggatcggttattacccggtgaccctcatgcgctgttgtccctgccggatgaggcgtttctgcgcctgaccgcgcaggggcatctgatgtccggtgagcagatgagccggcagaatctggaggccaccctgccgtactgggaccgtttcgtgacccggatatccgcccggcttgctgcagcgtgtgactactgcctgctacagctgagcagactgtaccggaatctgaacacggagcccagacaactgcggtgctttacattgccgtttggccggctggagctgcatatgcagccgcgggatatgagcgactgtgaacatattatggagtatgacgatgcgtcggtggcggattacctggaagaagtgatggccggcagactgacgccggtgcgtatggaggccagggtgatttaccgtaatgacgcggaagtgtgtgtcttcagacacagtgctgatgttatcgacgttcaccatccgcacgtcagtgactggcgggagcctgtcactgaggcgcttgactggatacgccgtgagcgcacatcgctggttcagagcgtgccgcgcagaccggtactgaaactggcggcctga

SEQ ID NO: 379101 - DNA, 267 bp, Salmonella enterica
atgatttatgactggtatatacagcagcatatgcaggcagccacaggtcttgagctggacgatgaagatttcacctggcagttcaggggcgttgcgtccgaccacgttaatacgtatatgctgtttgaacacgagaagctgctggtggcaatggaaaccatgctggactcactggaaagtgatgaggcgacggtgacacggtgccggcaggtgctgacgctgtggataaccgggctggatacactggcccgtgagcgtaaccgctga

SEQ ID NO: 379102 - DNA, 648 bp, Salmonella enterica
gtgagcgtaaccgctgaaatactgccgcgggttcacccccacagcagcgggcaggctgaccagttgctgagcggtgatatccggccgctgcagcagtgcagcgaggaggactatcttcgcctgaccggccagacggatttaccggaaaaccagcgaataccgcagaaaacctttaatgccacggaaaaatactggcagcggtttgaggcctggctgggacgccagttgcgggagacgacagagcactgtttccggcaactgagccggtttgtggaaaactgtaacttcgaaccgcgtatcctccggagatataagggggaatacggtgacatacgggtggatgttatgccacaggatatcggggagattgatgtgatggagtttgatcccgattacatcatttcctgggtggataaagtggcggacggtgtgttcacaccgttgcagtttgtggcgaatgtgtactacaggaatggtgtgcagatggcgtcattccggggagatacggaggtggacaatatcagccacctgacggcgaaggattacggtgatgttgtggggcaggcggttgagtgggtgcgtgagcagtttgatgaacccgcatcagccagccagcccgtcgcacagttaccgcgtctggccgcataa

SEQ ID NO: 379103 - DNA, 225 bp, Salmonella enterica
atgtttgctgtgaacgactcacggcgggattttcccccgcaggagcacgcccatgccggacgcaccaataaaaaaacctggcaggatatcccaccaggtttttacattgtcataccggattatgcggccagacgcggtaactgtgcgacgggctggctggctgatgcgggttcatcaaactgctcacgcacccactcaaccgcctgccccacaacatcaccgtaa

SEQ ID NO: 379104 - DNA, 1161 bp, Salmonella enterica
atgaaactgattgatgatattgtaaaaacacaaaaagagtttgcagatatacgtcagcaaatacataaaaaccctgaacttggttttcaggagattgccactgctaaactggttgcaaatcttttacgggaatatggatatcaggtgcatgagaaagtaggaaaaacaggcgttgtggctgtcctgataaagggagacggtatcaaaaagattggattgcgtgctgatatggatgctctgccaatgcaggagttagcagaggtgccttataaaagtataatacccggtgtaatgcatgcctgcggacatgacggacatacggcatcattactgatggcggccaggtatttaagtaaatgtgattttaatggtcagttaaatctgatatttcagccagcagaggaaggcagtggtggtgcgctgagtatgattgatgacgggttgtttgatcgatttgactgcgattatgttttttcatggcataatttacccagtaaaaatcaggacaaaaagattttcttcagaaaaggtgtttttttgtcttcatcagaccggtttaaaatcaaaataaaaggttgtggtggacatgcgtctgcccctcagaacagtaaggacccgacactggcagcatgtcacctgattctggctttacaaagtattgtgtcgaggaatactgatcctcagcaggctgtggttatcagtgttggttcaattatggcaggaaatgaagaaagttataatattatacctgagcaggtagagatattactgagcgtccggaccttaaataaggatgttcgtaataaaacactgaagcgcatccgtgatattacagagcactgttgtgatctctttgatctgaccgctgagatggagtatttcgataaagcagatgttacctgcaacgatgaggatgccaccacattagcatggcaggttgcagcagaaattttcgggagcgactgttgtgcgtttgagcatccaccaggtatggccagcgatgacttatcttatatgctcagtgccagaaaaggttgctatgcttacattaataatggagacactgcttatgtgcataatggtcattacgttttcaacgatgacttactgagtattgcagccacttatttttccggactggcactggcttatctgaaatag

SEQ ID NO: 379105 - DNA, 1191 bp, Salmonella enterica
atgaagaagtattttatatggttacttgtatttactgtttacgcagtttttactataggctgggtgagtacgggtcagttaatgccatcaattcagcatgaacttaatattaacacacagcaggcaacgttaattaccacttctatatccatagctaaaatttttggcgctttttttgccggatggcttgtgtataaatttggaatgagaaaaggttactttattggttgcttatttatcagtaccggaatttttatgagttttgctgacagttattatgctgttcttattattcgtttcctgcaggggctgggatcggcctgtgcattagtcagtttatctcctgtaacacaaaagtattttaccgggcgacaaaaaaatctctttgtcagtattaacattacatccaatactattggtaatattatagcacttctctttgctggctggatagccagtagaataggacactggcaggaagcgctttctttatattcatggataaatctggttctggttctgatttggcttattgtcaccagaaaagagggggatcaggattcacaggttttaatgaataaaaaacatgaatttataaacgttctgaaaagtcgtgtgacctggggaatggtggcctattatataggaccgatattatttctaaattcgtcttttcttttctttccgacttattttcaggaatattctggtcttgacaaaaactctttagcgataaatcttgctccggcgttagtcagtgtggctatgttatttgctccttttttcggcttctggttaaagcgtaaaggtgttaatttcaggaagatgtttattatatcaccattacttactgcactggccggaatagtgatgttggtgagtaaaaatgatgcaattattatgtcgacatccgttatggcggggtttttctttgaaatggcaacaccttctttatttaatcttcctgtggatatgcaagacggaactgttgaaaaaaccagttatactatgtctgttttctggagtattacttatattatcgttaacatcaataatgaaataattgcttttagtgttgataaaaccggaagttttacttttggttttacttatctttttgtgcttatggcattgtttgtaccactgtcattatggatattgccaaagcgtgaatattttatcaaggagtaa

SEQ ID NO: 379106 - DNA, 1191 bp, Salmonella enterica
atgaagtatctgattgcattgttaagtctgacagtcatattttttatggcatggctggtgagttataacaggggtggtgtcagaaaaaaagcagccccaattatattctgcctgctggcagagtttctgctggcatttatactgaccggaacccgtgccggtgtgaccatgatggatgccgtatccggggtgttccgtgcgctttttgtttatgcagacaccgggacatattttgtttttggtgacctggtgaataagggcggggataattttttactgggcgccctgatgcccacagtctttatttgcgcattaatcggtattcttaaatatctgaaaatacttccttttctgatgagatatacgggagccgggttaaaccggatgacgaaggcggggatactggagtcctatggagccatcagcgctgtcgttcttggtatgacggcggtattcgtggccattaaagaaaaccagggaaatgttgagaaaaaccggctgtatacgctttcagcagcatcaatgtcctctgtggatttgagtattgttgctgcatacatgaaaatgattgacggaaaatatgtcatactggcgattctgcttaacctgttcagttattttataattgtttccattattaatccgtatgagttaaagacggacgataatgtactgaaaatttcagaagaagaaaatgaaggcggtttttttgccgtgcttacggagcatatatgggatggatttaaaatcgttggcgcagttgcagcaatggttgttggttttgttgcacttatcgccatgctgaatggtattttttccggtatcctggggatatcatttcagaatgctgttggttatttattctcacccctggcctttttaatcggtgttccgtggaatgacagtattcatatcggcggaataatggcgacaaagctgctggcgaatgaatttgtggctatgctggatttgacccggatattgtctgaactttcgcctcatactgccggtgttatttccgtttttctggtttcttacgctaactttggttccgtcgggattattgtcggggccgtcaacagtctgagtgcccggcagggcaggatcgttgccgggttcagtatgaaactactctatggcgcgtcactggtcagcttattatcggcaacaattgccgggatcatgctgtag

SEQ ID NO: 379107 - DNA, 948 bp, Salmonella enterica
atggtaaccagaatgaaagtgataattgacactgatccaggtgtggatgatgcatttgcactttgctatgcctcccggtgtccggagctggagattatgggtattaccaccacgtacggtaataatcatattcgtcagacaacagataatgcctgctttctcagtagattattcagtataccgacggaggtatggcagggtagcagccgcccgctgtatgtacctttattgaatcccggtaccacgcacggacaaaatggcctgggggatgcgtttgatgtgacaccaggcacgccggccggtaacgctgtcgattttattatcaataccgtcaaaaaatatccgggagaaattacccttgtgaccctggggctactgaccaaccttgccacagcgattaatcaggctcctgaaatcaccggcctgattaaacaggtggtgatgatggggggagccttcggacataacggacacgggggaaatataacgccggttgctgaatataatatttactgtgacccgcatgcagcagacattgtcttcagggaaaatcttccgctgacaatcgttggcctggatgtgactgaggaggttattgtccgtcgtgatgaactgaaggaagataccggtaaacctcacatcagcgtcctgaggcagatggctgactgttatctggatttcagccgacagcacgagcatattgacgggatgagagttcatgatgcgctgaccgtgtcgtggttactgttgcctgaggcgtttacggtaacatatgcaccggtaagagcggtttgtgacagcagtctgtccatcgggcaaacgatataccaggtagccacaaacggaagggatattcaggggtggagcgggaacagaaaacatagcatttgtaccggcgtgaatgctgatgttgttaagcaacattttcttaaccgtatctacagttaa

SEQ ID NO: 379108 - DNA, 1215 bp, Salmonella enterica
atgaaaaatgtgagacataaaaatataattcaaattcttaatatctatggtgctttaaaggttaccttcctggcaaaaaaattttctgtaacaaatgaaactatccgtaacgatcttaatgaactggccgtcagggggttaataaaaagatatcatggtggtgcatctatcgaattgacaactctggataatattgcaaggacagaagttattcattatcttgagagtaaaaaagatctgagcacaaaaaatgtgggtgcaataaatatgaaaaataatgtatgcgttcttggctcttttaatgtggatatgattagttatcttcatcgtttgccggagcccggtgaatcattactggctacaaattttatttttgctgccgggggtaaaggttgcaatcaggcgctggctgccagttatgctgatgcctgtgttcattttatttcaaaaataggcaaagatcagttcagtgattatgccatcaaattcattacctcatcacagattagttcatcctgtatttatcagactggggaatttaataccggtacggcatctgtttttgttaatgaaaacacgggggaaaacatgatctccatatctcctggtgctaatatggctgtgactgtcgatgaagtcctgcttcagaaagagaaaataataaattctgaaattattttattacaacttgaaacaaatcaggatgcactggaaacaattataaaaattgcccgggcgaataatcttccggtcattcttaatccggccccctacaacgagcatgttctgaaagtaattcatgacattgactatctgacaccaaatgaaaaagaagctggattattatctggtatcaatatcaccgatctttcttcagcacgaattgctgccatgaagattcatctgatgggagttaaaaacgtcattataacgcttggaaagcttggtgttatcgctttcgatggctccagtttcattcattccccggcctatccatcggctgttaaaaataccactggcgcgggtgatgcttttaatggtgcgctggccgctgaactttccagaggacggtcatttgcattatccctgaaatacgcatgtgcttttgcgtcactggcagtggaaacggagaatgcatctgacatgccggataacaagagtgttttattcagaatagagaataccgactacagacaaaccatcactgaaaagtga

SEQ ID NO: 379109 - DNA, 210 bp, Salmonella enterica
atgtctcagaaaaacgaatttactgaagccagagctatctgtaatgagattggcggtgctgtgctggagattcttgctcaaaaacgtgaactgtcggttcagtcactgattgatgttatcgaaaagggaatgagtgggaattttacttatacgagtgaccgggtgcaggggatggagtgggctgttaatatcctgaaaagatttatttga

SEQ ID NO: 379110 - DNA, 276 bp, Salmonella enterica
gtgagcagaagagtggataccggattgtctgaactggtttactccctgatatgtaaaaatccggggatatttaaatatgacctgtatcataaggtcagttcaatttccgggtttacaattacacacgcggaacttgatgatgttattttttacctccgcctgcatcagggtatatttgttatgcgtggttacggttattttgagaatgaagataaatttcattgtggtggttgtaataatattcccgggaaagtgatgaggaagaaagggggatga

SEQ ID NO: 379111 - DNA, 615 bp, Salmonella enterica
atgaaagacagaaacgaaattctggaatctttttcatggagtgcactggttgccataaaaatgggctggcgtgacgggaaaataacgtccgaactgtcggagcatgtttttattatgaactggctggcaacggccaggaaaaggaaatgttttccacgaacggtttcctcagagattgactggctgataaatgacggaagacagaaagggcataatgctggtctgcggatgaaactggagtacatctattccacctgtcagaaggatatcagcggacaggctgattactttcgttttacccgtgtaatggaaatactgaagagagaaggctggaaaggatatttgctgaccccggcgaaatggaaacaactgaagcgggaaaaaatcggtgacagggataatttaatattcatggatgagggagaagtaaaaatcagttttgaccagaatggcaggctgatacattcactgaaactgcgtgtctgtggcgatataaaaatggcggagaggatgtttgaggataaccatcttccggtcagaacagaatgtcaggatgaggcgcggtattatttttatctgcagccggagtcggctgccggaacggaagcccgataa

SEQ ID NO: 379112 - DNA, 924 bp, Salmonella enterica
atgaagaataaatcagcacgttcaaaagttgagcagttcaggcgggactttatcacgttagccaggaatgcgggcaggagctacgccaccgtcgctgacagtatgcgtatcgccggatactttctgaattaccttcgtgataacggaataaaactgcgtcatacagacagtataaaaacccgtcatatcgttgggtatcttcagttcaggaaagaacggggtatttccgtacgtacgattcagaatgaacgttcggccattcgtggcgttttaaatcaggcaggtcgttataaactggcagctccggataatccgttactgagtaataaagcactcggactggaggaaagctgcagggcggggacaaaattgccgttaagcccggaagaatttcataaagcctttaaggaagttgagaaaaataaccggggtgtggcggccgccatgctgctttcttacacgctgggattaagaaataaggaagcagtggaatcctgtaaatccgtgatgacgtggaaacgggcaatagaaaccggtcagaattccgtacgggttgttttcggtacgaaaggaggacggccccgtaataccgttattgtggacagggatgcggtaagacgggccatcaattatgctgaaaatgtcatgaaggaaaataacggaaagctggttgaccgtccggatatcagaagggcgattgacacataccgttatcacgttcgtcgtgccggactgacgggagaaaaagcgcctcacagtatgcgttatcatttttcacaggacgccagacgtttttatgaggataaaggatatacagagcgtgaaatatatgcacaggtgtcaatggacctggggcatggtgacggaagggggagatatgtaaaacaggtttatttcagaaatacagattctgatgatgaatga

SEQ ID NO: 379113 - DNA, 429 bp, Salmonella enterica
atgattcattacattttaatgaatattgaatcactggagtacatccgtgagagttctgatttacccgcaggcgggtatgatgagattgttttaaaattcgtttgtgaaacaccactgactgagtcagacacctgcgaaatgatataccgttattttggtgatgtattttttaatgagaatgacgacgatttttttatccgaaaaggcaaagtatcggaaatgggtggtattatcagcgtgataccacacgttaattatcctgagctgaaaacaggtgaatgtataataccggtgattccggaactggtcagcgaacttgatgccggtacatatgatccggattatggttcagttaatgtgaagaaaatagtggaaaggcaatttggggatctgtttgacgaaaaaggaaacctgatgattcataaataa

SEQ ID NO: 379114 - DNA, 186 bp, Salmonella enterica
atggtatgtattacacccgccgctgtactcatatcaggagtacagcggcggttttttgtttataaagcggggataattctgtggagtgttaataatccggataaccctgcagcgtcgtatgcaaccggtttatttaataacggtatgtcaggaatatgggcatacgacgctgcagcgattttttag

SEQ ID NO: 379115 - DNA, 303 bp, Salmonella enterica
atgcgagtcatcactgtactgagcagagccttataccggctgctgcctcatgatacctgcacatcgggtgactggattgccaatcatacaggttacctcagcttccgggctgtggtacgtgaggatgaaaatggcagatttcgtgcactcgtctgtaagcgtactggctatacccttctgaccttttcttatgaaaaggtgatggactgtggtacgtacgacactttccgtcacgccatgagcgtggcgcaccatcaggcctgccagctggcgcatctgcgctatgcctgggaaatggcctga

SEQ ID NO: 379116 - DNA, 411 bp, Salmonella enterica
atgatttttttactcaacgtgctttttcgttttttacatatgctgatggtgcttctgccgtcacagcgagtggtcacaccgtggctgcgccagatggtattggatgtacggctgatgataagtgttgccaccgatatccggctggcaggcgaggttctgaaacaaacgtcccgtaacggcggtgaagcttttccgggtgcggaactgcttgttgaagaaacactttattatgctgcgcacagtctgggatggggactttgtcatggtctttcataccgctggccggcgtggctgattcaggaactggaacgccgtggggcgaacatcgacgaaagtggctggtgcgagggacgcagtaacggattccgtggggcttatgaactccggaatatggtgacagtggaccactga

SEQ ID NO: 379117 - DNA, 378 bp, Salmonella enterica
atgctgatgacaacgacactgaataccgcgacagacgccttttgctggttatgtctgcttgagagtgagctgctgagtatccgggcgtttcagaacgccggtctttatacgctgtacgatgaggctgatgaagaaccggtttttgaatgctcagtttataacagcggcatggcctgcggggaatttctggacggtctggaggcgggcaccatcgcgcccctgacggcagccgggaaggacctgctggacacactgaaccggatggggcaggcgttatgcgccccggtctgggagcaggcagtgaagcaggggctgcatgattcgcgggccgaccgggccatttataaagccggcgcggatggctggatatacaactga

SEQ ID NO: 379118 - DNA, 636 bp, Salmonella enterica
atgaaggcgcggggacgactggatgagcgcacggccagtgtgcttaaccggctggcggctactgaacacctggatatcacactgagacataccgggcgttacacgcattccgggtgtacggatatcattactgatgatgtccctggttacgcccggaatctgcaggtgcggtttgaaaccgtgttgcgggaggactttgacagcctgtgtgatgaggctgagtcagagggatacagtctcctggacgcgcgctggccgtatccgtactttcagggtgatgacaggaaagcatcgttgctctgccggcgtaccgggcatctgacggtacaggcggagattacgggttatgacgatgctgaaatgttctttattgacgatgaactggcttataactgtctgatattaccggcgctggagcaggacgtgcgttttccgcaggtgaggttcagcgtgacggtgacggagactggtgaagagctggcgtcacgttactgtgacatgttctttcgctcagcggagccgctgagacgagcgttcttcggtatccgccatgaggtgaaggcgctgtttgctgaagctcggcattctctggaggagcgcagacagatttaccatgatatccggctggcagtctga

SEQ ID NO: 379119 - DNA, 975 bp, Salmonella enterica
gtgaaaaaacataaaaaaggttcatccggaaagacggcgcatgctgatgtttatcagatggtgactgaccgtattgttgccgcgcttgagcagggtactgcaccctggcgcaggccgtggcagagtgcggggcaggtctgtacgggtgggttaccgtcgaatgccctgacgggacgctgctacagcggcgtgaatgtgcttttactgtggatggccgccgttgacggcggttatgccagcaatcgctggctgacgtaccgacaggcgcaggaggccggaggccaggtccgtaagggtgaaaccggcagtctcgcggttatctataaggactggacaaaaccggcagaggatgaacacggtaacaggctgtacgataccgatggtaatccgctgaaggagaccgtacccatgctgcgccagcttaatctttttaacgtggcacagtgtgacggtctgcctgcacacatgcagccggatgacggtaccggacgaccgggtgaagattacgccgttgtttcccctgaacgtctggcggatgttcagacgatgctggaggcgactggtgtagaaatggagccccgtttccaggaccgggcgtactacactccggtggcagaccggatagttatgcccctgacgtcgcagtttgactcagaggcggactactggtccacactgttacacgaaatggtacacagtaccgggcaccgtaaacggcttgaccgtgagggtatcagcgctccccataagaaaggggatgatgcgtatgccatggaagagctgattgccgagaccggcagcgcatttctgtgcgcgcaactgggtatctacggtgaggtgcagcatgacagctatatcgacggctggctgcgggtactgaaagccgacaaaaaagcactgttccgcgcctgcagcaaggcaagagaggccgcggaatatctgctggcgccgctgaacatccgttcggcggcatga

SEQ ID NO: 379120 - DNA, 258 bp, Salmonella enterica
atgtccggtattcacccatttccggtccggaaacgtctccgcgaccgtaatccccaccgtacaggcatctgtgatgatgactgttccggtgacacgttaaccccgcaacaggaagaccgtatccgtcagctggtccgggaggagtgctatttccgtgaccgtgaagcgctgataaagctgaccgccatgacgctgctgctgaaactggccggcaccgtcatgctgggccttctgttgctggcgttccggtttctgtag

SEQ ID NO: 379121 - DNA, 450 bp, Salmonella enterica
atgtacctgaaagtcctgaaattcatactgatgaacctgtggtatctggttcgctggctggggctggcgatgtaccacggactgtcggcgctgtaccggcgaaggcagacgaagatgaccgtactgcggccccggacggtgtatgccgggcgctggctcctggcagacgacccgcagttctgcgggcgggccgtggtggtgaaacagggggagaatcttcgccccggcgtggaactgctgtacttcggcgaggaaagcgctgacccgtattacggggaacgttactttattgaccatggcgaggccacccggtcggcggagcagatgctgctgcgttttctgggcgggcgttaccgccggcgtcacaaccgtaacctgtcgccggcagtgccgctgccggtcgtggtgaacgacacacaggcttccggctccggccgggaggcggcgtga

SEQ ID NO: 379122 - DNA, 288 bp, Salmonella enterica
atgaacgccgccgcgctgctgacgaacccgctgcctgcggtggtgattggcgacgatgtctggcaacagatggtgcgttattcaccggcaccggtctgcgagacggagcggctgcagcggctggtttaccatgcggcgaaagccctgacacaggcccggaaatgcgacagcgtggtgaccttcggttacttctgtctgccaccggacggcagtccggacacgccgctctggcgtgacctgcaggtgacgcgcgaaccggaccggataacggtatcgatggtgcgttaa

SEQ ID NO: 379123 - DNA, 312 bp, Salmonella enterica
atgagcgacaacaccatcaacaaagcattgcgcgtgatgggctacgacaccagaaaagagatctgcggtcacggcttccgggcgatggcgtgcagtgcgctgagtgagtcgggacggtggagcaaagaagcgattgaaaagcaaatgagtcaccaggaaagaaacagcgtccgtgccgcctatattcataaggcaaaatatctggaggagcggatcgctatgatgcagtggtgggcggattatctggatgcaagcatggatctgtatgtgtcaccttatcagattgccgggaatctgaagaaaatatcgtag

SEQ ID NO: 379124 - DNA, 144 bp, Salmonella enterica
atggcttctttctggagagacacggaggtggagatggactacggtgatgttgtgggacaggcggttgagtgggtgcgtgagcagtttgacgaacctgctgcagttgaccggcctgtcgcgcagttaccgcgtctggccgcataa

SEQ ID NO: 379125 - DNA, 1077 bp, Salmonella enterica
atgacaggtgaaaacaccgtcctttcagatgtaccggttccggacatcgttcgttgtgcctatatggaaatacaggtcacagacctgaaggcggccaggcatttttatgttgatatccttgggttgttcgtcacggaagaagacgaaaatacactctacctgcgtacaatggaagaattcatgcatcacaatctggtgttacgtcaggggccggtggcggccgttgcggcgttttcattccgggtacggagccctgaggatgttgatcgtgcagaagcctggttcaaagcgctgggatgccggaccatacggtgtgcagacggttttgtgaaaggggttggtgattctgtacgggttgaagatccgcttggttttccttatgaatttttccatgacgttcagcatgtggaccgtcttatctggcgttatgatctttatactcccggagcactggttcgcctggatcactttaatcagatcaccccggatgttccggaagcgctgaaatatatacaggggctgggattcagggtgaccgaagatatccgggatgaaaacggtgtggtgtatgcagcctgggtacgtcgtaagcccacggtacacgatacagcgatgaccgggggagcggggccacgtatgcaccacattgccttctccactcatgagaaacacaacattctggcgatctgcgataagctcggtgccctgagaaaatccgaccttattgaacgtgggcctggacgtcatggtgtttccaatgctttctatctttatctgcgcgatccggatggacaccgtgttgaaatttatacccaggattattacaccggcgatccggataacccggtagtcagctgggatgtacatgataaccagcgccgtgactggtggggaaatccggtggtacccagctggtataccgatggctctgttgtactggatcttgatggtcagcctcagccgttgaacgaacgggcagaacccagtgaaatggcggtgactgttggagcagacggtttttcatatacccgcaaggatgacaaaactgcgggatttaaactgggtaatggtctgtaa

SEQ ID NO: 379126 - DNA, 1536 bp, Salmonella enterica
atggcatgcagggataataatggtgacctgatggtacatagtgatcagaaaacaaatcgcaactggactacatttgttgcggctttgagtgctgctgtaatgactcttgatattacagtggtgaatgtagcgttaccaagtatagggcagggacttcaaactgatttggctcatctgcaatgggttataaatggttatacgcttagctttgctgcttttttgttgctatcaggttcattatctgatcggttaggcagaagacgaatttttctcattggaatggtggtttttacagtgtcatcacttgcctgcgccctttctgtacatgcaaatattctaataatcgccagaataattcagggaattggtggagccatggtttttgggactgcaccggcactaatagcaggggcctgtgaaggcgaagcaccaggggtacggaccttttctatgggggtgtttgctgctggaagtgccttttctgctgctgtaggtccattaataggaggagtgttaatccagtttgccagttggtcgtggttatttgctattaatgtaccgttcggtgttcttatcattatttttactttaaaaaaagtgaccgaatattctcctgatgcttctctgtatccactagatttactgggagcaattctgataacggttgcgcttttttgtcttaattattcagtcattactttcccttctgttggattccaggatacgactgtctatattacttttattgttggttgtatagcatcagttctttttattcttaatgaatggaatagaggagatagtgcattattaaatcttaagttatttcgtataccagcttttattggggcaatattattaagtttttctggtcgtatttttagttttggacttatgccgttcatcattttttggttaagtggattgttagggtactcaccattgcagataggtgctattttcttcgttcagtcaataattatggttatcgcagctatatttagtggagtttcaggaaaacgtatacagtctcgggtattacttgcaggaggtatgcttgttgtagcatctgggctttttatttgtagtaatataaaacctgatagtgactggatatctattttaccattgatgatattgatgggaattggcacggggatgataatgcctcatcttatggatttggccgtaagtgtcgttcctgtaagacaggcagggatggcatctggtacagcaaatacttttttccctttaggaacttctacaggtgttgcgatttttggtcttttgttgactcaatatttatcttatgaattaccccctgaagtactaagattgcagggaattgtggatccagaactcctgatacaatctcttgcccggggacaggttagtatgcttaacggtcattctgtattacttgcgcaagctcgtcaggcatggagtgaagccctgaatttattatttattattgctggtgcagctagtgtactggctgctgcaggcagccagtggttgcttcggtctgtcaaatag

SEQ ID NO: 379127 - DNA, 753 bp, Salmonella enterica
atgaaaaaatcatggatccgttgtattcctggaggaaaaccaaatgctttagcattattttgtcttgctcatgcaggaggtaactcctctctttttaaggggtggcgtgacattcttcctgatgatatagacctgtatctgattactttaccaggcagacatgagttacttcagcaacctatgccggattccataaaccagctttccagccaattggtagatcaactattatcttatatcaacaatccttgggcaatttttggccacagtatgggagcagttatcgcacatgaagtgattattgaagtcatgagtagaaataagaatcctcccattatgctgggagtttcatctcgtgaggcacctcaattccatcattcaggaatattacatcaacaatccgatcagttattatgtacagaactgatacgtcttggggggacggcatcagaattactggaaattgatgaaatgcgaaatattattctgtctactatgcgaactgattactcgttgatagaaagatggaaacttagctcacatcaaaaaataccctgtcatatttgcgcctttattggttgtaatgatccagatgttaatgaaaaacaagctaaaggttgggaaatatggagcgaaactggatttactcttgatgtattttctggggggcatttttatttcaaccaatgcccccaacttttgatccaaaaattgatttcacatctgagaggaattatcaagaaaactatttga

SEQ ID NO: 379128 - DNA, 2406 bp, Salmonella enterica
atgttaccaatgaataaattacgccattttgcatttattttatttttgttaatattagcactctcattaatcggtccctggttagcaccatacccgatagatgagatacttgacattccattttctccaccacaaccaactatgattctgggtagcgactatctgggcgctgatgtacttagcagaatgcttagtggtggtcagactatcatactcctgactcttttagcggttggtcttgcatggattttaggtggaacatttggcgttcttgcagccttacgtggcggaatcacagaaactatttttctccgcattgcagatcttttactcagtattcccgcaatgttattactaacgctgatagtaacgattactggtactggctataaaggggtggtaattacagctaccctgataatgtttcccgacattttccgtatgacaagagccgctacacttcaacagttacaatatgattatatcgatctggcacgatgccggggagagtcgtggttcacattattatggtatgaaattgcaccaaacttattatcaccaatgataaccgatattggtattcgcctgcccgggactatttttatttttgcaactgccagttttcttggtcttagtacgaatcaacctgtggctgactggggattaatgataatggaaaacagccctgggttaacactacaacctctggcagtacttgctccagtttcaatgctaatattattgattattcctctaaatttttggctggatagtttatttttacatcgtcaacccataaatatgaactaccaggcatcagatacagaaattcccccacctgtacaaggtgctatactggacatccaaaattttacattagtacacgtagattctgtattactttcaaatataaatttaaaagtatctaaaggagaaataattgctttggtaggttcttctggaagcgggaaaaccacattactacatagtgctcttgctcactggccacagaatataaggctggaacaaggcaatgtgtggatgcaagggaaatcattactacaaatggatacttcagagttacgtaaacatcgcgcacgacatatcggttatatgcctcaagatccaaaagtaacgctggtttcatcacaacgtattggttctttccttaatcttattgcaaacagtcgcggtttaagtaaccgctcccggcgtcttcaaatatataataactttcgtcagcttggacttcctctggaaaagaaattcttatcacgctaccctcaccaactctccggaggacaacgtcaacgcattttacttacagcagcgttgctcgggtatcctgagttactactcctggacgaaccttccagtgctcttgatccattgaatacacgtgatatgcttttatggatcgcacaaactgcgcgtgaacataatatgaccgtattaatggttgctcatgatcttccccaggtaagccaaatcgccagtcgtatcctgcttatgtccaaagggaaattgctggaacaacaacaaactaaaagattcttgacgcatccagaaagcaccgaaggtcaaagacttattgattcttatacacctgttttaatctctgattgtatcaaacaaaaatctgaaacaattcttcatgtacgtcagttaagtgcatcatatagaggccacacagcctttcatccactacaatttgatcttaccaggggaggttgtttaaccattgtgggtccttcaggaagtggtaagacaactctattacgtaccttactcgggctacatcacaattgtcagggctcaatgtattttttgcaatcccgtctggcccctgaacttgcccaccgtacaaccgaacaacggagagcaatacagtatgttccgcaaaatccctggagttcattaaatccattttacacagtagctgctttactggaacgtccactccgtattcataagccaaaattaacacataataaaagacaaaaagccatcgccaacataatggaacacgtaggtttatcacatcatctacttaatcggcagacttcagaactttccggaggacagtgccaacgagtcgctctggctcgagcactaataataaaccccacgattctaatctgtgatgaagtcaccagtgcactggacggacccggtaaacgagaaattactgaacttttggataaactgagacacactcttgatatagcaataattttggtgacacatgatatatcacttccattccaactgggtggaaaccttatcgttcttgaacacggacatgtaatagagtatggaccaacaacaaagttgataaccgctcctcatcataaatttacacgtcagctaattgatgcttcaattataattggagggaacaagtaa

SEQ ID NO: 379129 - DNA, 1014 bp, Salmonella enterica
ttgatagtccactgttacgtgacgtctggttggcttaatatgggaggttaccaactttttcgggcattactaaatcgatgtttattggctgttgccacactatggctggcttccgtcatcatatttatctcgctatcctttctacctggtgatgcagccacaacccgactcggtggtacaggtacgatgacacaggtcgctcaactacgaacagagctggggttggatcgcccattaccattgcgctatataaactggatagccggtattcttcatggtgattggggatatagtaacatcaatgggcagcccgttagtaaccttcttcatgaacgaggcagttactctcttctgcttggtttagtagccagtttcctgcttttccctgtggccataatacttggcacatattgcggactatatccagggggaatatgcgacagggttgtaatatttcttactcttatatttgtcggagtaccagagtttattacaggtacctttctgatcattattttctcactcagtctacagtggttacctccactgtcaattatatcacctcaacattccatctggatacaatggaaaatgatgattttccctgtgctcacaattatagttccctgtataggacataatttaaggatgatccgttcaggtacaatatctgcttcatcatcgccagctaccataaacgcaagattaaatggtgtaccagaatatactgtgattataagatggatacttcctttatcattaatcaatgcactacccataatggcacgctattttacctggttacttggaggagcgttcattgctgagaccttattttcatggcctggccttgccataccgttgctgaatgcaactttgatgagagacactcctgttgttatgggaatctctttcataatatgtagtttaactatactcataaacttactggctgatgtaatcattatattactgaatccctccgttaatcgtgaaaatgttaccaatgaataa

SEQ ID NO: 379130 - DNA, 777 bp, Salmonella enterica
ttgagtgcgcgaactgaacaaaaaaaccctttaattaaaatctggcagtctgataactcacagatgaatagccttgcgttcagtatgaatctcagtaaacctccttttaataatccggatgttgttaatgcattaaaatatggaattgaccgtgaagcaatggtacgttcagtcacgctgggcatgggagaagtagctaatgactcacttggggttggtcaaacctggtttgattccagtcttcctgttcgtgaatacgatcctgaacattcaaaagctttattaaaaaaagccggtttaacatcagttacagcgatgatccgaactactgattatcagtatggcactcttgagagtgccatactgttgttaaaacaggcaagaaatgctggttttaatctgacactgaacaggttaccagcagctgattattacagtgattttactaccttgctaaacacaccattgcaaactaacagttatcactcaatgcccctccccgtttcactacctttttattacggaaaagacgccccatggtctttcaccgggccttcttcacaagaactgacgaagttagttaacgcgatgcaaagttcaaaaatggaaggtttacgcgagaaaatggccgatctccagcactggctgtggctctatggcggtgacgcaatttttgccagattaccatctgtggctggttcatctcccagggtagaaaacgtcaaggcagcaggtttttttgatagtccactgttacgtgacgtctggttggcttaa

SEQ ID NO: 379131 - DNA, 561 bp, Salmonella enterica
atgaaatccggtttgacacgtcgtacagttttacaggctatggggattggaacaggcttagtacttagtaataagttactttttgccggagaaaaaaagcaagaaatgtatccccgaggggggatcctgcgcgctgcgtttcctggctcggctaacaattctgtcaatgtactcctgtcgactaacagtacaattaataacgttcgtgcccgactgatatgggatccattggctgaaatagatggtggaaacatatcctggcgattaatgacatccgctgaatcaaaccatgacgccaccctatggacgattaaactgaggcagggggtaacattcagtaacggtcaaaagctgacggcaaaagacgttttatacagtttacatatatatagcactcaatcaggtagccaaaatggatggttaaagccgctggatatatccagttctcatattaaggatgactatacactttcatcactgcatatggtatatcactttttgatactgagaatcactatcatttttatacgcattattaattatggcgggtggcaaacatga

SEQ ID NO: 379132 - DNA, 723 bp, Salmonella enterica
atgcgtcctgagtgtcgttgtgatgtagcggacaccctgccatgcctgcttcagagtctgacagaaacaccggaagcggtattaatactgtgtctccggccacgcgaacatatttatcttttctacgccctgaaaaatctgtttctggaccatccggtactggttatcagcgatgagttgttgttcagtgaccggctggttttgcactgctggggaggtatttcctgcgcatcgtacggtgaaatacagtctgttatatcgggcctgcagaagtccggtcactgtccttaccctttgaaaggaaaactggttaaatttttatctgcccctgaatgcgtgacgggattttttgaagtcccgatgatttttaataacccgaagcgtctgatgaggtacatgtcattactgatgcacagggcgaccacgagctgtggcgtgacttcttcacagcaaaaactactgtgggcactctacaaaggtcattattcgctgtcagggcttacaaatatactgaacaaaaacgagaaacaaatctggcaggacaaaaacagactactggtaaagctgggtatgaaaaaccgactttatgaacttctttatggtacgcgtttctgcccggatatgcagcggaccgcgtttatttctccatctgacgccaaaaagctttgtggcgcagaaacgtctgcagaatatgaaaaaacgagagatccattgaggggttga

SEQ ID NO: 379133 - DNA, 603 bp, Salmonella enterica
atgaaaaatacaattttagcttctgttttggctttaactgcggtttccggctctgcaatggcagcagtcaccacgggtcagttaacgtttaactggcagggtgttatccctactgctcctgttacaagcggttcatgggcatttgttgacagccgggatatcccttttgttccgggtaccgagcaactgaatatctcaaggactacaacaggaattaaagctgtttccggaaaaaactatgatttctttattgttcccattacagggacagcaacgccgggaactgctgtcacacgggagaccacaaaaccgatgaattcggttaaagttttccttggtagtaatcccgtttcgggtggtctggttggtaacaagcagcttacccttagtatcagttcagaagctactgacggacagattgccgtcaatcttaatggaaacccactgaaagttggtaacgaaaatgccactacgattggtacagctaccgatcacgaagaacatattactattggtatgaatgccgccatagcaactgcggacgtcaaggatggtgcttcgctcagttttgtagcacctgtcgtatttgcagtggatatctga

SEQ ID NO: 379134 - DNA, 678 bp, Salmonella enterica
atgaaatttatttatttttccctgttcttaccctttacggtgaatgcctttaccgtggattcaatggtaaaggtggctggcaaggaaaattatttttttgtcagtggcaacagtaatgacagggaatatctgtatatcacactgtctgaattaatcagtgataaaaataaccgatcacacgaggtggtttttgatgcaactaatgtggcagcctggccggttgtggcagagcctgctgatgtcattgtttcagccggagagcaggtaaagattaaaattattaaaaattatgtatcctccggtaacgatcgtatttttggtatcacgtttactccggatgtactggatgagaacagcgacaaaaaatataaccttccccttgggtataaatcctggtttattgttcccggaactgaccctgtaaccggaagtccggaggtcagaaaaggagaacgtacgggagattacatcatcagtaacaacaccaacaaggtgatgaatgttaaaattaactactgcactcatacggatgaaaaagactgtacggcacagctgatcacaagaccgtattcaaataaaaaattttctttggggaataatgtaagttcagcagaaattactttttataccgtttctgccgatcagaataacaaaccagttaaaaaaataaaattatga

SEQ ID NO: 379135 - DNA, 2469 bp, Salmonella enterica
atgaaaaagatatccctgattgctctttcggtaggtatggtgtgctggaatgccagggccgaagatttaacgctggctatggtaaccccttcagacgttccgcaggctctgacgctggccaatggtgaccgccttgcgtcctcccgttacgcagggattatcacgccggaatcagagacggtcagggttatttttgatggtgtcagtgaagcggacctgtctgcagaaatatctctggacactgttcggtttgaaaacaatgaacagttccgggcatttcttaaaagcgcgggggtcagggataactacctggagaaaattctgcagcaaaataaaaacgggggattcgtacactcagcactgtgtaagggggcgagaagtgaatgcgtggttatcagcaagggaattgactttgtcattgattattataacaggacagttcgtctttttgttgcgccggcgcttctcaggcagtcatcaggcgatgtttcttatcttgttctcaatggcggaccggggctggtcaataatctgtcagcttattattatgacccttttggacgctatgagccctcttattatatcagggaccagggtgtgagtggttatggtgccggttatattcgttataacctgtaccggtcagattacaaaaataccgtggatgatttgtattacaaccatgcactgggagccggaaacaagatactgattggcagaatgcagaatagtgttaattttaacccttccagtatgcagtctgtgatgtcagatgtatccatgatcggcctgaggctggggacggctgatgaacaggttgaccacagtttcggaaaaagagtttttcgttattacagtccggtaaacgggaatgttgaggtccgtaaaaaaggagagctggtttacgcaacgtccacccaggccggttacggggagataaatctgggaaatctcccggctggccagtataacgcgcttgtccaggtgaagactgcctctggtgatatcatttcttcacagaatgtgctgattaataattctggtgcttttaacaataattttgcctggcattttttcgcagggcgaagtgattcatattacaatgattttgtaggggaagagcagaaaatcattgatgcaggttttcagtttccgatcagtactttttcagccgcttaccttggtggcacgattattgaaaataacaccgtcttcagtaccggggccatattcaaaaatgaatatatatctgtgtcagccaaggccggcatggggaataataattttcattactatgaattaaacagttatctggacaatctctcggtttcctggaaaaaagtgagtacaggaaaagagtggggagatcaacatataaaaaatgacaatacaacattttctgccagttataatataggtttgtcatccagtttgtcagccagtatggggtatacgtattcgtccgggctgatatatgacttcctgcctgatgacagttataagtatgaccagccttttgagaaaaggcattcagctccttcctatctcagtgtgagtaagagtatttttgccagcgtttattataacttcgataatggcagtacgctgtatatgaatgcaaacaaggatgtcggttctgaaaattacggtgtgtctctgggggtaagtattccgtttggagaacatattcgtatcagcagtgtttcaaattacaacaatggcgggaaattaactaataacagtacggttgattacagcagtacgttgtcagattcatggtcccagacaatttcagccggaacctacctggcggatacaggttataacacgatgacatataacctttcacataacagcgatgtttttcgtggttccgcttatatttatgcaacggataagggacagaggcaggcttctctttcagcagacagtactcaggttattaatggttcaggagtctattttgcgccttcttcatggcaggattctgcgtttatcacccgtgcccgtggggcggattatgatgtttccgtgaggaatatgacggataacaccacccggtatcctgatgccggtaccggtgttatcagtgttcctgcgtacaacaaaatcatggtaaccagtgatacggacagctcccggtttgttttctccgaccgtcagtcaaaacacacgaacatgctctcaatggttccggggtcatctttcgtgataagcggaaaaaccatcagtacgaatactgtcatcatgacgctcaggaatgcggagggagagtatgcagtgactgcatcctgtacggatgacagttgtatttctgtctccagactgaaccgcggggtgtttaaggttaaatacaccggaaccggtttcaccgtgcgctccggaaatgcgcagtgtcatgcggatgatgtgcggaatgcgaagtttatcagcgtaagttgtggcaggcatgaacaggggagcaggtaa

SEQ ID NO: 379136 - DNA, 621 bp, Salmonella enterica
atgaacagcattcgttctgtacggtttttaccggtactctgtctggtactcttttttcaggccgcctctgtttcggcgggtacggtacagatatctgacaacgggaaaacggcgacattaacactgccactgaaggccacgatttccgtggacaccatcatgcgggaaaaggtcactgttattccgctttcatcgttgtatgaacaggtcggctgggataagtcaggccgcaggttcagggattatcagtttcttgtccgggtcatgaaggacgcgccctcattgctgctttacgagattataaatgatgcctatacctgcagttacaataacccgaacagagtggcagcgtcaggcctgccggctgatatttctgtcgtgaatgccggttatcagtacagtctctcatgggcgggcggagcccgtaccagcctagggagcagccgttcagccacggttaatgcgcctgatgcctggctaccggtgcagggtggtgatggttattttatcgacctgaacctgaatatcacattccctgatgtcagcatttacccccggctcatgagtcagggagggatttgccggggcagcgtgacaatgctgattagtaagaaactgtag

SEQ ID NO: 379137 - DNA, 687 bp, Salmonella enterica
gtggtgatacatttaaaacggttcgtcatcctttttgtcattatttttccggcattcacccgggctttccaggttgacacgctttccagaataatgacgacagaccatgattatcttctgctgaccggcaactcagggagagaatatctgtatacagagttgagtcgtgtgcaggttgacagtaaggggaatatccacgagaccccgctgaccccggagcatattcaggactggccggtaatcgtcgaacccggtgaaattgtactcgaccagggtgatgaggtcagggtaaggattaacagaaacggtccgcagcgtcaggatgatattgtactggggctttcatttattccggagagtgcggccattaaagaaaaaagagggtcaggactgcagattgccgtggggtacaaggtatggctttttatccccgggacagcacctctgagggggaatgtcacagcttccaggcagggtgggaagatagtcgttaataataccagcaataaaatactgagagtggcggtcagtcactgcagtggtcccggagccggaaagtgtgatgacaacagtatcatctccttgcccggaacccgaaaagcctttgatgcgacagaaggtaaatatgttctcaatgtttacggcactgaccgtatgcagaaaaaaataaaggcgataacattatga

SEQ ID NO: 379138 - DNA, 1116 bp, Salmonella enterica
atgaaatcaggattactgtgcgtgattttatattttttactgtcaggtgccgttcttgcaggaaccacggtgacgtcagagtttgttatcacaaacagaaaaatagagagttataaattttcaagtacggatcccaccgcctcttttactgacaccggcaatggattgtttcagatgcatgatagtttctcggatgctaatttcaatgtgttgctgtacgggaaccagcagattggatttcagagaacacccaccagtttgtttcgaatcagaatgaccgggcaacggttggggcatagttttgaagtgtcaggtaaatatgctaactctagttttcggataaatgcaaaaaatacgggtaattactttaatagaaattggaattctggttgttctgttatgtatgctgacatgtctaatgacacttttactataaattccagtaataatatgagtgcagattgtgctggtagaaccgatgatgttaactatggatacccggcgaacggtattcttaactccaggggaatatcacgtgatgtttacctggatgtgggaagtttacagaataataaggcttaccgggatgcaccacctgatatttatactggtcagggtactttttcaggagaatggattgcaaacagggtgggggacggatatcagatattttatatcaacaagataaccatttttaaaaatccttattttgaaggggtcacattacaggccggggataatgtgtttgatgtcagaacgacaggaaatgaaattcatggtaacttagttataccttatgtcataaacgggtattttacgccctataataaaatcaccctgaacgtgacctcactgaacggatttaagctgaaagataccagttcgccggataaaaaggaaataccgtattccctcagtacaaatacaggcagtcagagggggtatccggtggccctaaatggcgtgagccagggagccgtaattatcagtaacctgcctggtgaaagttatgcccttcagggacgatttaatgctgattttacagttgataagtccacagcacaggctggtgagtacagtgacacagtgacagttgtttttcagatttcattatag

SEQ ID NO: 379139 - DNA, 789 bp, Salmonella enterica
atgaaaagcgcaattgaacgtcgtatggacattgcgaatctggtcggcgtgaaaggtaaggtcagtgttggcgaacttatagactatttttgtgtgtccggggcaactattcgcactgacttacgttttctggagtcaatgggacacattgtccgctctaacggttatgtccttttaaacaaaggagtcattgccagtttttcagcggaatcccgaagtcgtaaaggttctgtagccgcagggcatgaacaggatgttgccgtatcggcagaagagagtaataaagccctgtctgattcaaacggcgacggatgggagcagaagctgacggagataacaggcagcctggaacaatcattgttcattggtgccggagcgttaacccgacattgggcacaaattcaaaaatgggattcagggttaatactgacaaatgatatccagttagtaacctcccggttattccctgcgtctaaaatgacggtgattatgcccggaggcattgttaacagtgaagaaatgatgtttgagggtggcaaaacagaagaaaatttaaaagaataccgggtagaaaacgcaattatcgaggttgataattttgttcccgaagaaggtttttttgcggcccatgaaaatgatgtaaggttcttaagaacattacgtactattgcgaaaaaacttatacttattgtacgaaatgagaatctgtcacaaaccgccaatttctggattggcgatgcagacttcgctgaacactttatttacgcctcaaaaataaagagtctctga

SEQ ID NO: 379140 - DNA, 144 bp, Salmonella enterica
atgaaacagaaagacaggtccgtcagcgggccggttacccggataaggtatacgaccggagcgaaactgtttatcggtggtatttatttcgggataatttttcttgtggttctgcttatttacatgatgaggaacccatattaa

SEQ ID NO: 379141 - DNA, 789 bp, Salmonella enterica
atgagaaagatttatatttatggtgacaacccggaggttatcacggtgatgcgtgagggattaaaagacctcctgtgtaaatccgggtattacagtgaaaaggctgaaccggtgtttggttatgccggtgttattcagaatgcgggagagcttctggagcgggtacagaaatccattctgcccccggtggtgttactgaatattcagcccggcagaaatattctgttattacaggcgctgagggaaatccgtgaaggggtgggaattgccgtgttcagtcctgaaatcatatacccggacagaattgtggccaggtggtttaactgcacgctgaatcaggacacggatgtggcagagggtgatatggaacgatatctgctccatgcggtgagaaagggcctcatgaagtaccgcagaaagacagactgtacccgggccgggcaactgataccggaactggcccggcatatgacggagacggtgaaggagctggattacatactgcatatctcgttgttgtcggagtcgctgaccagaaaggaaaggacgatgctgtcgtatatccgtgaagggaggtcagttgaacagaccgcggcattaacgaaagcggggagaaacgccgtgggaggatggtacaggaacctgtgtgagcgactgacccttcagtatgacagggaggacctggcggaaaaatttacgctgtcaccggaaagacagaacaatccgttcaggataccgggcggtacatggcggagaaacgccactcagcagacagaagggatattctga

SEQ ID NO: 379142 - DNA, 2355 bp, Salmonella enterica
gtgaagcactcaaacctggctgatgattccagcaattatgaaagcgcagaacatggtccggcagttaaactgtccggagacctcagaacggccaccgctcagctggatgcagacggaaaaccggtgaaaaatgagactgtccgtggcgctgaccagattcatctgcagaacgtcaacatccacaacagcttcacgcttgcagataaagtgcagatgctgaagaatgacgtggctgcgctgaaccagcaggctgcggataaaattgctcttggtcagcctgctgacggagatagtagtgttaatacctggctgaaaacgcagactggtttactgaacagtaaatacgacaaccttaaactgaccggcctgcagattgacaccacaaccgtcaatccgtcgtttgaccttacggacgggaagtttgttaatactaaagctactgtggcacctgatgccgccaacattctgctggataacctgaatatcaccctgcagaacgacagtgtgggggggacatcgacagcgattgacctgtccggaaccggtaaccatattcaggccaacgatggcgtgtttgacgcaggtcaggtgaccggtacaggcagtcaggctaatgtgcttaacatcactggcgcaaataacctcgttgattttgatggctcggttctgaagggagatattaagtcaacgggtgagggtaacgttgtcactcttacaaaaggtagtctgacgggtaatgctgaagctggctctggcgacaatcttcgtctggtgctgaacggcagtacctggactggtgcctccggtccgcacagcccggatgtcgtcctgaaaaacaactctgtctggaatgtgaaggacttcaggaataaacatcctgacgatgtgaccggtccttactcttctgtccgtgctctgtccctctatggcaacaacactattaacctggtcagttctgagggtcaggcgcaactgggtggtcatggttttgcaggcgcgaaatcaggtgtcaccctgaacgttggcaacgacctgttcagcgatggtaagggtgtgacctccgttctggcaggcacttactcgccggataatcttcacagcctgacaaataccggtctggccgggggttatcagtttggcatcctggatgtggatggactggcgaaaggcggacagtatcgcctgtctgtggaaagcgccggtgctgagccgtacaccatcggtggacgtctggctgacagggctgacgcaaccagtgctcatgattttgtgtcatacaaaacgtctgaaagccgcgtcgtcacggacgggagtggaaaccccgttactcagactgttaaatctgacgctgacttcaccagcctgagcgcaccggctgagctgggtgtgtaccagtacgccgctgagaaagtgatggacggggtgaacaaccgtacgaacatctactaccgcagcaccggtcagctgtccaacagtgccgccaccgtggtttctctggcagcagcgccggttgatgtggcaaacctggagtcagacactctggcgaaacacatgaacagcgtgcgtcatggtaaggattccggcgtgtgggtgtcctacttcggcggtgaaaaccgtaacaccacggcatcaggaccggagtataaactgaaaactaacggcgtcatgctgggcgttgacaccctgacagaaaacaactggctggcgggtgtggcggtttcttctgcacgttcagatatgagcgtaatgaacagcagtggtgacctggacagctatggtgcgcagttctacatgtcccgtcgttatgacagcggcgtgtttgtggacagtgcgctgcagtttaaccacttcagcaatacggcaaaagcccgtatgactgatggtcagcaggcgaaagcagacttcagcggtaacagctacggccttgaagctaaggtgggttacgcctggaacagcgaaggattctttgcggagccgtatgtccgtgcagcggcgcgtgcctttgacggtgagcattatgccctgtccaacggtatgaccgtgaacagcaacgactataagtccatgctgggtgaagtgggtgccgacctgggttaccagtatgccatcagtggcggttatgtgaagccatacctacacctggctgcgcttaacgagtttgctgacggtaactctgtccgcgtgaacaacgtttcgctggatgacagtgtgaagggcgccgccttccaggccggtctgggtactgaagtgaaggtgacggataacctgggtggatatgcagcctttgattacacgaagggtgataacaccgagcgtccgtggcaggccactgtgggtgtgaactacacctggtaa

SEQ ID NO: 379143 - DNA, 261 bp, Salmonella enterica
atgcccgtggtcggtggcgcttcgtgcggtgatgacggtttccatttggtatcggttaaccagaaacgttcctataccgaggataatgccaatcaacgcgccgtaatcattcagcgtccattgagcaaaaaggccgctgataaacgcccacaggtaggccagccacgaggtgtgcttttcgaggttcaaaatggatgtcctgtgagggaaaaagaaaaagccgcactgtgcggcttgccgaaaaatccctgccgttattag

SEQ ID NO: 379144 - DNA, 261 bp, Salmonella enterica
atgatttcaactcaaattcaaaatgcttctaacgttattgccttaacaaggtccttcattttattagcatctgttctcactgacgaacaacgcaccattctactttcaggtctggagtattattctgaatatgattataaatcttccataccagaaaccgcccctctcaaacctgaaatccgttctgcccttgatgctgaaataaaggaatgctttaagaaaatcatttctgaaataactcttgcttgcgagaagcaataa

SEQ ID NO: 379145 - DNA, 891 bp, Salmonella enterica
atgaaactgagcgttggcgatataagattttccgaatccggttacgcatccacgaccgttgaagttgagaccggaacatacccttatctccgtttttcaatatgtacgatggacgtttccgttccgctggtggaaggtaaggcgctggagcagtacaaagaagagctactggcaaaagcacgcgaacgaatcgccagcatgtatgaagagattgtatgtgatggacaggatgctgaaagtttgttgaatatgttggacggtaaaattaaaccgacagaaataagtaaaaaaatactgtatgacatcagtatgccacatgtcgatctggaaaagcgtatcgccagtatcgagaagcaactgagtggtagtctggacactggtgcgctgaatgcgatttatactgtcggtaaaaaagccgctgaggatttaatgggaaagtcaggtgatgaaggactttgggacatgggattcaggattgaagatcgagagggggtgttggtggtatgcgatgagaatggtgagagcgaaccaaccagcgaacatcgcgacaaaataatcgaaatggccaccagggtgctgagaaacggtaaccggaacatgttaaagcgtctgggacgcgctatgggactgcttcaggtggttgctgagattgagacgaataatcaacttcatgggtcagcacgcaggggagatgtgttgagggattttgataacccgccctttaagaaattacctgataactggatttcacctggcgttgaatatctcaaaacgcgcctcgatgagggggcgcgcgaggatgaactgattatttcatctatttatgatgtcgccagtaaagcagcggctgattttattgcttctcgcaagcaagagttatttcagaaatga

SEQ ID NO: 379146 - DNA, 183 bp, Salmonella enterica
atgaaatctactgacctgataaaggaactgactgctgccggatgtgaactcaaaaggcataatggaggaagccatcagatatggtggtcgccaataaccgggaaaacatttccggttccgcatcccaaaaaggatttacctctcggcactgtcaagtccattaaaaaactggcggggatctaa

SEQ ID NO: 379147 - DNA, 432 bp, Salmonella enterica
atgtttttctcagtgggcgttgaaacgccaaaagatgaaaacaccgcgtatggtatggtcgttcctgcgttttcagatctcgggtgtggttgtctctccgccgctgatacgcaggagcagatcgcgccaatggtaaaagaagctattttactgaccgttgaatgcctggttgaaaatggtagcttttctgttgaacaaattcaggacgccgggcatttcgtctatgctgccaatcctgaatatgccgatttcgattcctggtttgttattgacgttgacttgtccggatttgagggaaaacctcagcgcatcaacatttcattaccagacacgttgattaaacgtattgataatgtcgttgtaagcaatccggcttatcgtgaccgtagccatttccttgccgaagctgcccgccacgaactcaataactga

SEQ ID NO: 379148 - DNA, 654 bp, Salmonella enterica
atgataccgcagacaatcacctgggtaagaaataacgtcatttttgcgttgaactgcggggagaagccgcagcggggtcaactggcggcatttgagggattcgcccgcgcaaccagtaaacgctatgggcgtcaccgggaacgctcgctgaaaataggcaaccgctggtactgtcgggacaccgatccggtttacgtactggagaccgccaggaacaaaaagcagccggacataataacgccggaagaattcagcagcgcatcatggcgccgcgccataaacagcctggatgattacgaaaaggcgtggatattgtactgctacggcgaacaacacacgtacatgaaccacatgctgatttgcgagtacctgtggttacagatgcatgaccgactcagggcaagccggaagcgcattactgacgacatgacgggcaacctgataaccctggcgggtataatgacgtggaacgccgggcaactgatgcgtgggaaagacaatgcggaaatttttgcagcaacgtatgcggcgcaggaaattggagtaagtgacaaagcgtggtggaaaagctacaaaaaacactggaagtttatgtacgataaatgcacagaactggatctcaacgcgttggaaaatctgctgcgaaaaatttaa

SEQ ID NO: 379149 - DNA, 1116 bp, Salmonella enterica
atgcgagccatactgacagtattcccgcaaaacgcagccaaagtaacattactcaggtcgggaaacctgacccacaggttccgcgatggtcagcgcatcatgatctgcgatgttccccgacaactggagaacacgccagcgggtgaaataccggaatcggggcaatggctggcacaggacgaagcattacagccgtttttttctgacagccgggtaataaacgctgctggtggtcaggaggggctgaaagcatgggtcagtagaatacctgattgccagtgtgagaacggggatcatgtcaggaacctgacgacagcacagacaaaagagggcgacgccgtaagactgtgccatgcgtgcgataacgttcactacatgaagggataccgcgatctgagtgaaattatcaccagaaaccgcgcagagtggattgtggattacacccgtatgagtctgaggctgggcagggatcatcaggtgacgttgccggagttattttgctgggcggtattacgcggcgcggctgatgccatgcccgtgaacgtgatccgccgctttgccagcctgccggaagatgaagtgctcaccggcacgataaaggaagcggatattaacccctggcaactcagcgcccgccagttggtggagaaaaaagccggggagggcatatctgctataccccctgatatttatacagtgccaaacgcaaagaaacttataaagaattctggctttaatgggaccgctacagaaagggtaaaacccgttctgacgctgagcgtcgacagcgacccggcagcaggctatatgagaaagccaaaaatgatccgcctggaactgccggagtacacgcggtgggtgaaacgtcagccctgttgcggctgtggtaagcaggcaggcgacccgcaccacattatcgatcatggctttggcggaaccggaactaaagcgtgtgatttgctggttataccgttgtgtagggtatgtcatgacatgctgcacaaaaacgtaaaggcatgggaagagcagaacggcagtcagttattgtggctggcgagaacgctggcaagagcgacaggcattggtgcaataaccgcagcgagggcgaaagaatga

SEQ ID NO: 379150 - DNA, 303 bp, Salmonella enterica
atgaaagggctggatctggaaagaatgacgccggagaagattcacggtatcggactggagtgcatacgccgggctaaggcaatggaagagtcgggggcaacaaaagacgccatcaggaaaaaccttctgccggcaatgcagagaatggaaagggccagatatgaactacagtctgctttcgacagggtgatagataaaacggcggagcttgaaaagtgtgaggctgatgtcagaagaatgctgaataaaatcgttgggcaggacactgacagcgacagtgatagcgatacggcaactgagtga

SEQ ID NO: 379151 - DNA, 1473 bp, Salmonella enterica
gtgctctacagcatggaggcgggcgtcacggagcactttaaagccgatcctccggaatgggaccgcttcacgagaaaaaaactctcgccggaacaactgaaaatcgccatcagcaaaatgatcagcgtgcggttctggtcccgccacttccgcacgtttaccagtcgctggcgcgaacatctctatattgctgtgggtgacgttcgccgtcagcgatctgccatctgttcgccacagtgggttcagcactggctggccagccgtaagcgtggtcgtgaaatcatggcggaaaccgatatcgaggatgaagaaaccggcgaggtaatgagcctgctggatgtggtgagtggtagcgtatcagacgcagaaaagcgccgcgcggaaatgatgacgcgcgtgaaggggatggaagacttatccgggatgggtagggctgccagtgagcagaactataccgggttatatttcacatggacggcaccgtcacagtaccacgcctggctggcaaccggacgccggaaccggaagtggaacggcgccagtccgcgcgaaactcagcagtatttcacccgcctgttcaaaaatttcagtacagccctgtcacggaaggggatacacctctttggcattcgtatttccgaatcatgccatgacggtacgccacactggcacggcctgttgttcgtacgcgaagaccaggaggccgcattccgggatctttttggggaatatgcgaacacggaaaacctgacgctggcggggaatcaccgaagcagggcggtatctcagttaatgatccgacgcatggaggagaaaaaaggcggtgccgtggcctacatcaccaagaacatcggtaaaaatattgagggttgcgcacctggtggaacagatccggagaccggcaggccgtatacggaagtggcacgtaacaccacggcctgggcgtcactgtgggggattaaacagtttcagtttatcggcgggccacctgtatcggtctggcgggagctgagaaggttaagcgatcagaagaaggcagacagcgtcgctccggtatttggcgatctgcaccgcgccgcagatggaggagactgggcggagtacacccggcttcagggcggactgctgacaacccgaaaaaacctcactatgcgcacctggtataagcccagcgaagagccggacgagtgcggccagtacaccgccatcatcaagggcgtctatctgcaggggagcaacaaagccccggtagcgacacgtacccgtaagtggaaagtcagaacaccccgccagaacgctaaagcaggctccctgagaatcaacaggaagcccactttaacgccctggacttgtgtcaataactgcactatgcgcagaaaacaaccagcagatcaccctcctgatctccacctgaagattccgatccaactggaactggatttcggggagatgaaaaaaagtgagagtgagtga

SEQ ID NO: 379152 - DNA, 345 bp, Salmonella enterica
atgcatgggacgacggatgcgaccggtaataaagcgctggctttactacggtcatttactgatgacatgcgggagtggggcttagttgtcagcagtgaagaaaagctgacggcgctggcccgagaatattttgcggatcaacagaactctttgggcgggctgcttctttatattgcatggtatggtggcggagaaggcgtggtatttgagcgaaaccgtcatgatgatgtttttggcctgatgacagtcacctttttctatcatctagtcacgggatggggaatgtcgccggttcatgcacgttatttttactcttcagtccgcatccggatgaaagaggaataa

SEQ ID NO: 379153 - DNA, 357 bp, Salmonella enterica
atgggacaaaaaagaaccgaagaaagccagacggataagtggaccggaaaacctgatgtctgcgtaatgagtgatgctgtggcggaggcgctggaggcagcaggcctttatcgccgggcggcgagacgctggctggaggtactggaccagtgccgggactgtgatgagcgggcatggctggctacccgtcgtagtcactgtctggaaaaagccagaaaacctgaaccaaaagcagaatatttaggtgaagtatgtcaggctgcgtctgatacacaaaaaaggatgggcattcggtcacaggaaatgttcaggaagtatcccgctgctggtgactcccgtaaaaagttgtcatgctga

SEQ ID NO: 379154 - DNA, 324 bp, Salmonella enterica
atgtccgataatcttcgccgcagcctgctcactatcggggagctggacatcagcctgcagcccgggcttcagacggttattgaatgttataccgaaagattcgccaccattccccccggtatgtggtaccggtactaccagggacagcactggttaacccgcagtcttccgggctcggctttttttctgtttctcagtcgctggcagaacgtaccggaagtcggatgctttctggggtgccacggtcagtttgtacttgcctcatacaagtccgtccgggaggcccactgcaacgtatggataaatcagcccgtagacagatag

SEQ ID NO: 379155 - DNA, 207 bp, Salmonella enterica
atgaaaagtaaatatgaatggttgtaccaactgagaaagtgcagtaataaagaaacgctggaaaaagtagccgaatctaatcgttataaactgtcaactgatgaactggaacattttaactcagcagcagaccatcgtttggccgagctaacgatgaaccgcctgtatgataaaattccagccagtgtatggcagtttgttcgttag

SEQ ID NO: 379156 - DNA, 1236 bp, Salmonella enterica
atgacagaaaacattcagaagaaattcagaagcaaaattccgcttggcattgatgtactgagcgcagcaaagcttcgtattaacaaagtgtttgatgcttttgaccggataaccctatcattttctggcggaaaagattcaacagtaatgtttcatcttgtagcagaagaagcccgacgtcgtgaccgaaaattctgcgttttgttcatagactgggaagttcaataccattcaacaatcagtcatgttgctaacatgcgtgagctttatgctgactgtattgaggatttttactgggtgtgtctgcccatgaccacagttaatggtgtgtccgccattcagcctgaatggatcgcatgggaacagaatgcaaactggatacgtcagccaccagatggggctattacagcttatgactacttccctttttatcaatatgggatgacctttgagtcttttatccctgcttataacaaatggttctctactgaacagccagctgcagttatggttggtatacgggctgatgagtcacttaatcgctttctggcgataagttcaaggcgtaaacttcgcttatcacctgaactaccatggactactcagcagaaagatggaaacagttatgctgtttatccattatatgactggaaagttcgtgatatatggcgttttcatgctgtcagcggtttaccttacaacaacatttacgatcttatgtttcgtgctggagtgagtctgcccgctatgcgcatttgtgaacccttcggcccggagcagcgtaaggggttatggctgtaccatattctagaacccgatacctggagtaaggcctgtgaacgtgtcagtggggcagccagtggggcaaaatacgtcaggcatggccgggactactttggaaaacatagaattgaaaaaccataccatcatacttggcaaagttatgcatattttttattatcaagccttccgctacctacagccgaacattaccgtaccaaaatagctgtctatttaagatggtatcaggtacgggactggcctgaaggaataccggatgaacaggatggagatacagggagtcgtgatatcccttcctggcgccgtatatgcaaggtcattatgcgtaatgattactggtgccgtggcttgtcattcagcccgacgaaaagccagaactatcgtcgttacatggaaagattgaaacggcaacgcgaggagtggggtctgatatga

SEQ ID NO: 379157 - DNA, 633 bp, Salmonella enterica
atgaaagctgaactggaagaaaaactgaaatccattgaaagcttattacgaggaatgtctgaggatgaacgtctttccacgttgaacattatccgttccagattgcatgagctaagtccattcaaagatgaacctgttgactgtgttttatggattaaagccagtaaattaaaagccaatgaatataaccctaatatcatggccccaactgaacagcgcttgctatacacttcactattgactgagggatatacccaacccgtcgttgcgacaaaggggttaaagagtttcaccgtagtggatggttaccacagaatgcaacaaggtaagcataagccagttcttagggaacgcctgaaaggctatctgccagtagttatattacatcatgaaagtggaggtgaaggagaaaggcgagctgcgactgtcagacacaacagggcaagaggacaacatgcagtagccgctatgtcagaacttgttcgcgatctgtcacggctggggtggagtgacgaacgtacagcgaaagaattagggatggataaagatgaagtgcttagacttaaacaaatcagtggactggcagaaatgtttggtgatgaatcgttttcggaagcatggacagtggagtaa

SEQ ID NO: 379158 - DNA, 258 bp, Salmonella enterica
atgataaaagaaaagttgaaaacccgaaacggaaagcggtttctgttctctgttgcgatggtgtttatcattgctgcaagtgttatgacacgggctacaataggcggtgttatatggcagtataatattgaactgaaagactggacgctttctatgtttattattcagtcagcaatgatatttgtttacagcgtggtctttactgttttgttttcgataccgctcgggatttttttcctaagtgatgataagaattga

SEQ ID NO: 379159 - DNA, 498 bp, Salmonella enterica
atgctgaaaaaagatatgacagagaaacttaacgaccaattgaatcttgaacttttttcttcccttctttatcaacaaatgagtgcatggtgcagttatcacagttttgaaggtgcagcggattttctgcgacgccactctcaggaagagatggagcacatgcaacgcctgttctcatacatgaccgataccggatgtatgccacgaatcggtgctgtggaatctcctgtggtggaatttgattccttgacggcgctgtttaaaaaaacctacgaacatgaacaattaatcacacataaaatcaatgaactggtacatgtggctatgagtacgcaggattatccaacttttaactttctgcaatggtacgttgctgaacagcatgaagaggagaaactgttcaaatccattcttgataaactggcactggcaggtgacacaggtgaagggttgtatctgattgataaagaaattgcctcaatgggaaattctgtctga

SEQ ID NO: 379160 - DNA, 426 bp, Salmonella enterica
atgaatctaaaacttttaatgtacacaactctaatattttcatttagtgctttttgtgaagatataacatactcagcaaaagatatcttgcaaaatttagaattaaacacttttgataattcattgtctcatgggacttatgagaaaaagacaactttcaaacaaaccgaatttacaaacattgagagcaacaaaaaaaaacacatcgcacttaccaatgaagataattcatggatgatatcattaaaaataatagggattaagagagatgagtatacagtctgttttgaggacttttctctcataagaccgccaacatatgtagctatacaccctctacttataaaaaaaacaaattccggtaacttcatagtagtgaaagaaataaaaaaatctatcccgggctgcactatatattatcattaa

SEQ ID NO: 379161 - DNA, 1068 bp, Salmonella enterica
atgtcagatacaatgactgttgtagctaatgttcctactctgttctcaggcaccactctgagtagcttcagacctaattttgaggctaatacgataacgatcgcattaccgcattatgttgatgtgcctggtcgtagtaattttaaacttatgtatatttttggttttccatttgacactgaaatggaaaaaaatgatgacttttcaaataaaccacgggccgaaagtaaaatatcgaaaactgaaggtactgtttcttatgaacagaaaatcacagttgaagccggcggtatagaaagggatggtgttaaatcgtatcgtgtcatggttcttgaaggcacaatttcagatgccattaaccatcttgataaaaaagaaaatgataacatcctgaatcaatataaaaacaggattattcttgctgataatactgttattaatttcgataatgctgcccagttgaaagaatttcttcatcgttcagttaaaattgttgatgatggtatcattaccagtaatggctttgaagggtttaacccaaaaagtcattttccttccaatccgggtagcgattattttaacagtactggtgtgacgtttggttctggtgttgatcttgggcagcggggaaaacaggacttactgaaggatggcgtgcctcagagtattgctgacaagcttgatccttattatatgcttcgtggtcagagtgcatatgataaagttaaatcaaatccgctgacgctttctgataatgaggctcatatcctgtccaatatttatattgataaattctcacataagattgaagggattttcaatgacgctaatatcggtcttcggttcagtgatcttcctttgagaacccgtacagcactggtgtctattgggtatcaaaaaggttttaatttatccagaacagcccctacagtatggaataaagttatcgcaaaagactggagtggtcttgtaaatgcgtttaataattttggtggtggaacgtctgacagacgaaaacgagagggcgctctggtacaaaaagatatcgatagcgggttgttaaaataa

SEQ ID NO: 379162 - DNA, 249 bp, Salmonella enterica
atgaaacaccagcatctgacagaagcagaaacccgccgactggcagaagccattgccgccgaaacccgcgcactgggctttgtggggaaagaaaaaaaaatgccgaaggaaacaaagcgccgtatccgggcgcgggtacttaaagcaattctcgatgaacgaacggcagacagaaaacgggacgccgccctggctgaaggacgggagccggaagacaccttcacctggcaacctcagcgccgccggtga

SEQ ID NO: 379163 - DNA, 993 bp, Salmonella enterica
atggcactgtcacaggatatgagagagcggatttttgcagcggccgacgcactgtttgcagccagtgaaaccggggaatttccgaacgtggaagcggtacgccaggaaagccgggcggggatgaactacgtggtggaagccatgaaggaatggcggcagaaccagcgccgccaggtgatgacggtgcgtgatccgctgccgccggagctgcacacgatgatccaggaggccgggcagcatttctggacgtcagcgcggcaactggcgaacgagtcgcttgatgcggcgcggagtgcgtttgaatcggagaaaaacgatctgatccagttgtcggcggagcagtcagcggcgtttgaacgccaggcgacggagctggccatcacccttgagcgtctggcggaactggagcggctggcagcggcggccggagaaaacgagcgtgagatgtcgcggacgctggaggccacgcgggaggcgcgtcagcgggcagagcaggaggcagcgctttcccggctgcaggcggaggaaaacgcccgccgtgcggacgagctgcgggcggagctggagcacgcgcaccgggaagcgggcgcagcggcagcggatgcgcggacagtcacggaggcgctgtggggagacgcggaacggctgcggacggaacgggacagggcgcagcagcggctggagcaggccggggaagagataacccggctgacggagcaactgacggcggcgcggggagagacggcagccttgcagacggcgctggcagaggtgagggcgcagaacggcgcggcggaagcggaaaagggacggcagcgcgcgcaggtgtccggcgcggaaacggcgcgtgatgaggcgcgacaggaggccgcagcggcgcgggaagcggcggcccggctgcggggcgaactggaggcggtgcggacgcagaacgcggcgctgctggcggcgctgaaaagcccccccgacgacgatatgctttccccgagctga

SEQ ID NO: 379164 - DNA, 297 bp, Salmonella enterica
atggccagatttaaacgaaatgaattaccggcgctgacggcggaacgggaagaggaactgcgggcgatggccggtcgcccggacagtgagattgattacagtgatattccgccactgagtgacgcgatgatggccgacgcagtgcgggggcggttctggcgtccggtgaaggcacagacgtcagtacgtatcgatgcggacatactggaatggctgaaagcaccggggaaaggatatcagacccggatgaatgcgatcctgcgcgaggcaatgctgagggagcgacagcataagtga

SEQ ID NO: 379165 - DNA, 300 bp, Salmonella enterica
atggatgcagaaactgtgtttgaatgggatgaagtcaaggccgcatcaaactaccggaagcatggtatccggtttgaagaagcggcaagggtgtttgatgatccgtttcatctgtcgatacaggacaggtacgaaaacggggaataccgctggcagagtatcgggatggtgagaggctgtatgatggtcgtggtggcccacaccacgcgttttgaggacgggacggaaattattcgccttatcagtgccaggagagcagagcggagagagttgcggaggtatgagcatggccagatttaa

SEQ ID NO: 379166 - DNA, 1512 bp, Salmonella enterica
atgatagttaagtttcatccgcgtggccgtggcggtggttcgggaccggtggactacctgctggggaaagaccggctgcgtgcgggggctgtcgttctgcaggggaagccggaagaaatccgggagcttatcgacgcgtcgccgtatgcgaaaaagtacacctccggggtgctgtcgtttgcggaggcagatttgccgcccggacagcgggaaaaactgatggccagcttcgaacgggttctgatgcccggactcgataaagaccagtacagcattctgtgggtggagcacaccgacaaggggcgtctggagctgaattttctcatccccaataccgaactgctgaccgggaagcgtctccagccctattacgacagggccgaccgtccgcgcatcgatgcgtggcagacggtggtgaacggcaggctggggcttcacgacccgaacgcgccggaaaaccggcgggcgctggtcacggcgtccgcactgccgaaaacgaaacaggaagccgcagaagcgattacccgggggttgctggagatgacttcatccggggagcttaaaacgcgtcaggatgtcactgaggcgctcacaggggcaggttttgaggtggtgcgggtcacgaaaaacagtatcagtattgcggacccggacggggggcgaaatatccggctgaagggagccatctatgaagagtcttttaacgctggcgaaggatttagagcaacaatcgaaagcgcagcagcagcgtaccggcgagatgctgaaaaccgcattcagcgagcacgagaagtctgtaaaagcggaactgaacgcaagcgcgaagagaatcagcgacgccatcagcgcccacgagaagggtatgaaagaggccatgcagtcgaaccggctgaacgtactgcgtatggtcgggcggacgtggctgaccatcgcgatggtgtcggttctgcttatcgggacgagcgggagcatactgtggtggcaggggaagaaaatcgtctcgaatacggaaaccctcagccagcaggaagacagcctggaaaagctgaacatcctgacgtggggtgtgcgttatcaggcggacagggatggtcgccggtttctggtgatgccgtcaggaacgaagcccgaagttatccctttcgagggaacgtactggattcaactgaaacaggagtaacggtacatgacggagctggaaaaacaattgctgaacgcgttagagcagctacagcgggactactcgaaaaggctggacgaatgggagatcgccttcgcggaatggcggaagctgtctggtcttatgcaacaggagaacgcggcgctgaacgagcgcgtcacgagcttgagcaggcaggtacagagtttgagcgggcagctacgccggttgtcgaacgactgaatgtcattgagcagcgacaactgcagtatgagagggagattcagcgccagcgagtacaggagccggaaccgccacaaccccgttacagggggcccacaccaggctggtaa

SEQ ID NO: 379167 - DNA, 342 bp, Salmonella enterica
atgatgaaacggaacaagatgctgaccatgtgggtaacggaagatgagcacgcccgactactggaacgctgtaacggtaaacaacttgcagcctggatgcgtcagacgtgtcttgatgagaggccgtcacgtgccggcaaacttccctcgatatcgccggcgctgctgcgtcagcttgccggcatggggaataacctgaatcagatagcccggaaggttaacgccggtggcggtaacggacacgaccgggttcaggttgttgcggcgctgatggcgattgatgccgggcttgaacggctgcggcacgccgttctggaaaaggggacagatgatgatagttaa

SEQ ID NO: 379168 - DNA, 192 bp, Salmonella enterica
gtgaccaggcaggaaaaaaccgccctcaacatggcgcgcttcatcagaacccagacgctcacgctgctggaaaaactcaacgagctggacgcagacgaccaggccgacatatgcgaatccctccacgaccacgctgatgagctttatcgcagttgccttatacggttcggggacaacggcgaagagcactaa

SEQ ID NO: 379169 - DNA, 291 bp, Salmonella enterica
atgccggaagaaaagcgtaaaaccccaaagttacccgatgatgcgatagcccgggagctggagtaccgaaaactgtggcgaagggcagcctgtcgctggcgctgtattcttgtcatgacagaagaccccattgttgcagaacggatcgtacatcgtatggcatggtgtcagcagcagatcccactaaagcgaccgggaacacttgtattgtcggcgaatgacctgcgtcatattgataaagtcgctcgtgcgctgggatgtggcccgattgcccggcactggatagaatag

SEQ ID NO: 379170 - DNA, 426 bp, Salmonella enterica
atggataaaaacatcgcgaaacgttcctgcactgcggggattcctgatttcgttccacgtaagtccacgaccgatgctgcgcaccatagccaggctaaatcaacttattatgctcctgatattccggagcaaactctgccgcctgttactccctgtttcagccaggcagatattgatgaatttctctcccgtaagccgaaacaatataaaatgacggaacgggattataaagaactggggagaaatacccttttgggtcttggtagtctttttgatggtctggtaaccgccactgtaatttgtgctccagttgtagcagaaatgatgaatacaaaaaatacaagcaattctgattctgaatatcgatatggaagcgacggaaccatatacaaaggtaatgcagtaatcttcgaacctgaaaaataa

SEQ ID NO: 379171 - DNA, 1533 bp, Salmonella enterica
atgaccgcgaacagtattattgaatatatcctggtgtttttcggctggataatgaataacgcgctgtgggacattatatcagggacaggactgtacctgctgccgctggtgtttaagtgcgccggagtctggctgaaaacccgggaagaaggatttgatgaagggaacaagggtatgctgctgcagccccggatggagcatgcgttgtatgtaccttacctggtgattctgttctgcgttataccggttgccccggtgaatatcagcacgatgaagtttgacagcagccgggcacagcagtgtcatgtgtcggtggccaccccgcagagttccggttacagtcaggtggtcagcgaccttggcggcagtacggcacaaatcccggtatggtggtatctggtccaccggctttcaaagggaaccacgcaggcgatgattgcgtccattccctgcgggggcaaaatccgccagatgcgttttgaggtccagcacagccagttgcgcgacccggtcctgattcaggaactgcaggatttctccggcagctgctactcacgggcatactatcgcctgaagagtacaaatcagtccctgacggataaaacgatcaattcggtaagctggataggcagcgattattttctgaacactgcggggtattacgacacctacacgtcgaaacagccaagaagggcgtggccgtggaatgaggcgcgtgatgcaggatatgcgaacacgggcgacggagggtatccgacctgtaaagaatggtggtcagacccgaagagggggctgaaagaccgcgtgctggcgagtctgccatcgcgggttaaggccgatttccagttacagaatgttaagcactggcaggagctggctctgcgttggctggtgagtccgcgtaatgtgtccctttccggtggcggtgaaacctatgtgacgggcagtaatgataatgcttcgggtcttgtgggtaacgtcacccgcctggcgacaacggttggcgtggggatgaaacagtttgaggccctgcccgggtttgatgcactgaagcaggcgctgccgattgtacaggcactgctggagatgatggtgattattgtcattccggtactgctgatgttcagcgcatatgatacgaaaacaatagtgaccatcacgttcgcactgtttgcgctgatgtttattccgttctggtgggaagtggccagctggctggatgaccagttgctgacgataatgtacggtgccagggatgattcggggctggatagtggcgtgccgtttgcgaattttgtgagttcagtgagtgacggctggataatgaacctggttctgggggtgatgtatattcttttcccgctgtcctggttcgggatgatgggctggaccggagtccatttagggaattttgccacacaaataataggtgatggagctaaattacctcaggatgccgggaatgaaggcggtaaaaaaacaaaagatgccgctgtttctgcagttacaaaaggaaaagggaaattgaaatga

SEQ ID NO: 379172 - DNA, 363 bp, Salmonella enterica
atgacgaagatgaagacgcccggatggctgaaatcacgtccggtgaacattttgctgcaggtgcttttgtggtgcgtggtgttcacactgttgctggctgttctgtatgtcattgattcccgctacggaggtattcatgaccggatgctgcagtggcgtaccccgttactggtctggcgtctggtactgtacgtcattctcatcacgctgtggatgtggccgggagggttgcgccgtcgttatgcagaccaggtcagagcttcggggcacccgcatccgcggttcgccgtgttccgtacggaagtcatccccgtcctgctggttgctttttccgaatacagcaactggacgcagttacagtga

SEQ ID NO: 379173 - DNA, 1464 bp, Salmonella enterica
atgaaaacaacacagcagacaacacggcaaaaaacacgattttcccggtctttcctggtgccggtcgtggccctgacgatggcaaccggaatgatgctgcccggacaggtatcagctatttcgcttccttccctttccggtgccggaaagacggcgggtgacgccgtcggtaatgccgtcagcgacggcctgttctactcgattggcggcgggtctgtgatatctcagccgccgaccaccaacagtatgcagcttctggggctgaaggcgggcatcaacagcgacctgatgtgcggaaattttgacatcaaaaccaccatcggcaaccagcttaacggtgtgaccagcggatttaaggacctgatgggcgatgtgatgcagggtgccacgggggcggtgaccagcatgccggcgatggcggttcagcgagcgaatccgggcctgtacgacatgataaccaacggcgtggcacaggcaggcctttcctttgaccgttcaaagctgagctgcgaaaacatgtcaaagaaactggcggattacaccatgggagaccgtgcatggactgactcagcggtcggggatgaataccgtgatgcggtgaaccgcagcggcggggatgcactgaaggcagaagaagcgaaggacaatgccacaggagaagagggggcccgctggattggtggtcagaaagcaggtgggaaaggacagccggcaatacagcccactcacgacctggcgaaggccgggtacaacatgatgaacaaccagccggtcagcagtaacagcagcgtcccgaaaaacaagtgtaacggttcggcctgcaggatattcagtaacgcggaggaggcggctgctgcggtggtgaaggtactgggcgaccgcagcatccgcacctgtacggacccgtcgaagtgtcagagtggcggggaggataacgcccccggttcatccgttgccggtaccggttttgggccgatgctggatgaggcgacaaaaacgaatctggaaacgctgaaccggctggtgaacagccggggagcaccttctgcagaggagctcggcaaacttaagacaggaggactggccgtcacccgcggggtgattgaggcgctgcgcgatgacacggaccggagtgcgctggtacagcggctggcaggcgaactggcaatggcggacaccatcgagactgcgctggccatgcgtcagatgctgacgaccggggagtctgaaccgaatgcggcggcgcagaagcaggctattgaggaaggtgaccggcgcgttgactcgctcgaccggggactggaaacgctgaagaacgagatggaactgcgccgggccatcaccagtaacagtctgctgaagacgctggaacgccaggaaatacgtaacagtgcgaaccagctgcaacagaaagatgcaggcggtgatgaaaaaatgagcacgattgagcaaaggagccagtga

SEQ ID NO: 379174 - DNA, 798 bp, Salmonella enterica
gtgaaaacgtcggtgaaggtggagcactttattcctgaagccgtgatttctgtctaccaggataagggggaaaacccctggacggagatgaagacagtcagcggctcatcgggcggggtggagaatgccatcagctccgggctggccgggctgagtgccggcggcgggcagtccacggcaaaacggccgcagggcagtgagagcctgctgagtacaagattcaagtacgccgacgccatcggtcatccggccactgctcttatcggcgggcagattccggggtattcctgtaaaagcgccgccaccccgctggttccctattttctgagtacgctggacagcctggtctggcgtacgggcctgccggaagccctgtatccggaggcgctgatacccggtaagcgtgacatcggcagtatgaccggcagaaacatgtggggcaacgtttacccgcgcggcggttttgtcacccagcaggatgactataaggccggggccgtcatagcccagcgggtggcggacatcatcacccgcaatggacaggttcacgtctaccagccactgaccggaaaacgtcgaccgggctactggccgcctgaaccggtgacggaaaacaccggcacgaaaaaccacaaatggcagcgtcttacccccgcagcctcgcagtcctgcgcagtattcccggatacgggcggaaaggtggctgaagacggcaactacgcctggacgttgtggcagccgtacagctgctgcaaaccccgtggacagacattcctttacagcaccgatttcagctga

SEQ ID NO: 379175 - DNA, 135 bp, Salmonella enterica
atgaaaagttattttcttgtaaccgtaattatattctttttatcaggatgtcaggcgaattatattcgggatgtacaagggggaactgtagccccgtcatctacatctacgttgacagggatagcggagcattaa

SEQ ID NO: 379176 - DNA, 528 bp, Salmonella enterica
atgctcaacactcaagataaaaataaaaaagcgaaccaacttttatatattttttcatttattggggtaacaccactaataatcatattcacaatctatataaacaatcctcaatctccgatactgtataatctatataataaaacagaaagtctccatgctattacatcagcttacaatccagtaatgacaaaactgatggcaacttataataaaagcgcaccaatacttggcataattttatttctatactcattcaaaatgagagaattaaataaaaaaactgataaaaacaccattataaaagcttgtttttttggacctgtattctatgcaatctacatttatatcactatattctacaatttagaattaacaacatccagcggtttctttagaatgatggcacataataacattgcattattgatattatattctggaatctattttactattctaacactaacatactcaatactactaattcccttaatgacattcagatttttaaaaggaaggcagtag

SEQ ID NO: 379177 - DNA, 1290 bp, Salmonella enterica
atgagtggtggagatggacgaggtccgggtaatacagggttaggccacaacggtggtaaacccagcgggaatataaatggctcatccgggagaggtggccattccggaagtggtggtcgtggtcataacatgcgcgctccgaccgcagcagaagttgccgggcaattcaacagttatggtggtacaaaaattaattcatcacaggtatctaatatccggagtgatggttctggtggatacagtgctgatattcgtggggagactcataccgtatcttccggaggtacaagccatacatcaaatacagtgggtggtttttctggcgtgttaacgtcaggccactctaatggtaatggaggtggttaccatcacgaaagtggtggttccggagtaggcagtaaaggtcaggttcatataacaagtaaccccgggtggagttcatatccgggcaaggaagatagttacttaccaacaaataaagacaggttgattaaaggttttattcagtcaattgatgataattcaggttcatacactatccattatactggcggtgcagtagctactgtcactgttccagatggtgacgtaaataatatgaccgttcattatcttgttggatatggacctgtatcagggaacaaattaacccgtgatacgattaaaagctttattgactataaagctgaaagaaatgaacttgatgtgttagaaaaggccagtgatcttattgttactatgggggataaggttggtgaatacctgggagtcaaatataaggcgttagcaaaagaaattgctgatgaaattaaaaattttcagggcaggaccattcgcagttatggtgatgcaatggcttcgctgaataaaattttatccaatccggggctgaaagtttacaaaggcgataaggatgctcttgttaatgcctggaggcaggtgaatgctcaggatatggctaacaagctcgtaaatatgagcagggcttttaaggttgctgatttagttatgaaggttgagaaggtcagagaaaaaagtatcgtgggtcatgatacaggggactggggaccgctgatactggaagtggagtcctgggtgttgagtggtattgcttacagtgtggcgcttagtattttttcagcgacgctaggtactgctcttttaagttttggtcttcccgttacggcggtaggtattatggggatcattatagcaggtgttattggtgctgttattgatgataaatttgcagatgagataaataacgagattattccttctgctcattaa

SEQ ID NO: 379178 - DNA, 249 bp, Salmonella enterica
atgaaacaccagaaactgaccaaagctgaagcgcaccgcctgggtgaagccattgccgccgaagcgcgcgcaatgggctttatagggaaagaaaaaaaaatgccgaaggaaacaaagcgccgcatccgggcacgggtacttaaagccattctcgatgaacgaacggcagccagaaaacgggacgccgccctggccgaaggacgggagccggaagacgccttcacctggcagccacagcgccgccgatga

SEQ ID NO: 379179 - DNA, 297 bp, Salmonella enterica
atggtcagatttaaacgaaatgaattaccggcgctgacggcggcgcgggaagaggagctgcgtgcgatggccggtcgcccggacagtgacatagattacagtgatattcctccactgagtgatgcgctgatggccgaagcagtacgggggcggttctggcgtccggtgaaggcacagacgtcagtgcgtatcgatgcggatatactggaatggctgaaggctccggggaaaggataccagacccggctgaatgcgatcctgcgtgaagctatgctgagggagctgcaacgtaagtag

SEQ ID NO: 379180 - DNA, 300 bp, Salmonella enterica
atgaatgcagaaaccgtgtttgaatgggatgaagttaaagccgcatcaaactaccggaagcatggtatccggtttgaagaagctgcaagggtgtttgatgatccgcttcatctgtcggtacaggacaggtgtgaaaacggggaataccgctggcagagtatcggaatggtgagaggctgtatggtggtcgtggtggctcacaccacgcgttttgaggacggaacggaaattatccgcatcatcagtgcccggagagcggagcgaagagagtggcggaggtatgagcatggtcagatttaa

SEQ ID NO: 379181 - DNA, 1533 bp, Salmonella enterica
atgatagttaagtttcatccgcgtggacgtggtggcggctccggtcctgtggattacctgctcgggaaagaccggctgcgtgaaggagccaccgttctgcaggggaagccggaggaagtccgggagcttatcgatgcgtcgccatatgcgaagaaatacacctccggggtgttgtcgtttgcggaggcagatttacctcccgggcagcgtgaagaactgatggccagctttgagcaggttctgatgcccggacttgataaagaccagtacagcattctgtgggtggagcacagcgacaaaggacgtctggagctgaacttcctcattccgaacaccgaactgctgaccggtaagcgtctccagccctattacgaccgggccgaccgtccacgcatcgatgcgtggcagacagtggttaacggcagtctggggcttcacgacccgaacgcaccggaaaacagacggtcactggtgacggcgtcagcccttcctgaaacgaagcaggaagccgcagaagcgattacgcggggattactggctcttgcttcagccggagagctgaaaacgcgtcaggacgtcacagaggcgctcacagtcgcaggttttgatgtggtgcgcaccacgaaaaacagtatcagcattgccgacccggacggggggcgaaatatccgactgaagggagccatctatgaagagtcttttaacgctggcgaaggacttggagcagcaatcgaaggcgcagcagcagagtaccggcgagatgctgaaagccgcattcagcgagcacgagcagtctgtcaaagcggaactgaacgcaagcgcgaagagaatcagcgacgccatcaacgcccacgagaaggatatgaaagcggtcatgcagtcgaaccggcagaacgtgctgcgtatggtcggccggacgtggctcaccatcacgatggtgacggtgctgcttaccggaacgagcgggagcgtgctgtggtggcaggggaagaaaatcctctcgaatacggaaaccatcagtcagcagaaagagagcctggagagactgaacgcgcgcacatggggagtgacttaccggagcgacgaacacggccggtttctggttctgccggagggcatgaaggcagacacgaactggacggtgaacgaagggaaacagaatgcagtgagacttgtacgggagtgaaggcacatgacggagctggagaaaagcttattgctcgcgttagagcagctacagcaggactactcgaaaaggctggacgaatgggagagcgccttcgcggaatggcggaagctgtccggtcttatgcaacgggagaacgcggtgctgaacgagcgcgtcacgagcttgagcaggcaggtgcagagtttgagcgggcagcttcgccggttgtcgaatggctgaatgttactgagcagcggcagttgcagtatgagagagaaatttacgagcgggagagtcagcgccagcgggtacaggagccggaaccaccacaaccccgttacaggggacccacaccaggctggtaa

SEQ ID NO: 379182 - DNA, 339 bp, Salmonella enterica
atgaaacggaacaagatgctcaccatgtgggtgaccgaagatgaacacagacgattactggagcgctgcgacggtaagcaactggcgtcctggatgaggcagacgtgtctcggtgagaaaccaacccgcgccggaaaacttccttccctctcaccggcattactgcggcaacttgccggtatggggaataacctgaaccagatagcccggaaggttaacgccggtggcggtaacggactggagcgggtgcagacggttgctgcactgatggcgattgatgccgggcttgagcggctgcggcacgcggttctggaaaagggggctgacgatgatagttaa

SEQ ID NO: 379183 - DNA, 192 bp, Salmonella enterica
gtgaccaggcaggaaaaaaccgccctcaacatggcccgtttcatcagaacccagacactcacgctgctggaaaaactcaacgaactggacgcagatgaccaggcggacctctgcgaatccctccatgaccacgccgatgaactttacaggagctgcctcgcacggttcgggaacgactgcgacgaaagctga

SEQ ID NO: 379184 - DNA, 558 bp, Salmonella enterica
atgaaacgcaacgtactgttattaccgttactgatttttctgctgattgccgcggcgctgctgtggcaactggcgcgcaatgcgcagggcgatgacccgacggcccttgagtcggcgctgaccgggaagccggtgccggcgttccgcctggagtcgctggaccggccggggcagtattacggggccggggcgctgacgcaggggaaaccggtgctgcttaacgtctgggccacctggtgcccgacctgccgcgccgagcatcagtacctgaaccggcttgccgcgcagggtatccgggtggtgggactgaactataaggacgaccgggcgaaggcggtggcctggttaaacacactgggcaacccgtatgcgctgagtttatcggacagcgacgggatgctggggctggacctgggtgtgtacggcgcgccggaaaccttcctcatcgacggcaacgggattatccgctaccgccatgcgggcgatttgaacgcccgggtgtgggaaagtgaaatgaaaccgctgtgggataaatacagccgggaggcggcgcaatga

SEQ ID NO: 379185 - DNA, 1935 bp, Salmonella enterica
atgatgcctgaatacggcaacgcgctgctgtgcctggcgctcggcgtggcgctgctgctgtccgtttacccgctgtggggcgcggcgcgcggcgacgcgcggatgatggcgtcggccggggtgttcgcctggctgctgtttatctgcgtggcgggtgcgtttttcgtgctggtgcacgcctttgtggtcaacgacttcaccgtggcctatgtcgccggcaactcgaacacgcagctgccggtgtggtaccgggtggccgccacctggggggcgcacgagggctcgctgctgctgtgggtgctgctgatgagcggctggaccctggcggtggcggtgttcagccggccggtgccggcggatatcgtggcccgggtgctggcggtgatggggatggtcagcgccggttttctggtgttcatcctgttcacctcgaatccgttcgcccgcacgctgccggccttcccggtggaggggcgcgacctgaacccgctgctgcaggaccccggactgattttccacccgccgctgctgtacatgggctatgtcggcttctcggtggccttcgccttcgccatcgccgcgctgctgggcgggcgtctggacagcgcgttcgcccgttttgcccgcccgtggacgctggcggcgtgggtgttcctgacgctgggtatcgtgctcggctccgcgtgggcctactacgagctgggctggggcggctggtggttctgggacccggtggagaacgcctcctttatgccgtggctggcgggcaccgccctgctgcactcgctggcggtcaccgaacagcgcgccggctttaaggcgtggacgctgctgctgtccatctgcgccttctcgctgtgcctgctgggcaccttcctggtgcgctccggggtgctggtgtcggtgcatgccttcgcctccgacccggcgcgcggaatgtttatcctcgcctttatggtgctggtcaccggcggttcgctgctgctgttcgccgtgcgcgggcacagggtgcgttcgcgggtgaacaacgcgctgtggtcgcgcgagtcgctgctgctcggcaacaacgtcctgctgatggccgccatgctggtggtgctgctgggcacgctgctgccgctggtgcacaagcagctggggctgggcagtatttcggtgggggagccgttctttaacaccatgttcagcgggctgatggtcccctttgccctgctgctgggggtggggccgctggtgcgctggggccgggaccggccgcgtaaaatcagaacgctgctgctcaccgccctggtctccaccctggcgctgtcggtactgctgccgtggctgtttcaggaccgcatcgccgccatgacggtggccgggatggcgatggcctgctggattggggtgctggcggtggccgaagccgtacagcgcgtgtcccgcggcgccaggatttccctcagctaccaggggatggtggcggcgcacctcgggctggcggtgacgattaccggcatcgccttcagccagaattacagcgtggagcgtgacgtgcggatgcgggcgggcgacagcgtgaccattcacgactaccgcttcaccttccgggaggtgagggacatcaccggacccaactaccgcggcggggtggccatcatcggggtgacgcgcaacggggcgccggaggcggtgctgcacgcggagaaacggctctacaacaccagccggatggtgatgaccgaggcggcgattgacggcgggctgacccgcgacctgtacgccgcgctcggggaggagctggacaacggcgcgtgggccgtgcgcctgtactacaagccatttgtccgctggatatgggccggggggctgctgatggcgctgggggggctgctgagtctggcggacccgcgctaccgccgcccgcgccgcccgtcgccggaggccgtatga

SEQ ID NO: 379186 - DNA, 480 bp, Salmonella enterica
gtgaaccagcgacgcagaaaccggttatgggtggcctgcgcggtgctggcgggtctggcgctgaccaccgctctggtcctgtacgcgctgcgcgcgaatatcgacctgttctatacccccggggaaatcctctacggcaagcgcgagacgcagcagctgccggaagtgggccagcgcctgcgcgtcggcgggatggtgatgcccggcagcgtcaggcgcgacccggactcgctgaaggtgaacttcagcctctacgatgctgaaggttcggtggcggtgagctatgaggggatactgccggacctgttccgcgaggggcagggtgtggtggtccagggggagctggatacgcgcaaccacgtcctggcacaggaggtgctggccaaacatgacgagaactacaccccgccggaagtggaaaaggcgatgcaggaaaaccaccgtcgtccgcaaagtatcgataaggacacctcatcatga

SEQ ID NO: 379187 - DNA, 174 bp, Salmonella enterica
atgggcgggtacgccttttttgtctggctggcggtggcgatgaccgtggtgccgctggcggcgctggcgctgcacacggtgctgcagcgccgggccattctgcgcggcgtggcgcagcagcgggcgcgcgaggcgcggatgcgtgccgcacaggcacaacaggaggccgcgtga

SEQ ID NO: 379188 - DNA, 747 bp, Salmonella enterica
gtgacgactatgtggaaaacccttcatcagctggcagtgccgccccggctgtatcagatttgcggcaggctcgtgccgtggctggcggtggccggtatcatcgcgctggccacgggctgggtccggggctttggtttcgccccggcggactaccagcagggggagagctaccgcattatgtatctgcatgtcccggcggccatctggtcgatgggtatctatgcggcgatggcggtggcggcgtttaccgggctggtctggcagatgaaaatggccagccttgccgtcgcggcgatggcgccggtgggggcggtgtacaccttcatcgcgctggtcaccggctcggcgtggggtaaaccgatgtggggcacctggtgggtgtgggacgcgcgcctgacctcggagctggtgctgctgtttctctacgccggggtcatcgccctgtggcacgcctttgacgaccgcagaatggccgggcgcgcggcgggcattctggtgctggtcggcgtggtgaacctgccggttatccactattccgtcgagtggtggaacaccctgcaccagggctcgacgcggatgcagcagagtatcgacccggcgatgcgctcgccgctgcgctgggccatcaccggctacctgctgctctttatgacgctttcgctgatgcggatgcgcaacctgattttactcatggaaaaacgccgcccgtgggtgggcgaactgatactgaaaagggggcgccggtga

SEQ ID NO: 379189 - DNA, 1218 bp, Salmonella enterica
atgagtaaaaaaccgtggcgtgcaggaaaagacctggcatctgttgttgaaaatatggagattgggaccggccagcgcggtgacgggaaagatgcgtttgtcacgcagcgtcagcttgcagaactgaaactggcgaaaatgagtggtggtagtggaggtatcagacttgctcccggtttggggcaggggatcttccctgagataccacctcctgaacgtcccacaaagccagaaggtgttcaggtgacgggcggttttggctatgtgctgcttgagtggatgatgccgaaatataacggtcactccctcgctgaggtctggcggggtacggaggataacctttctgatgctgttctcgttggtacaacaccggggcaggtttacagcgattcggttgatccgggctggaaaggattttactggatacggtttgttaactcagcaggcgtgtctggtccgtataattcacctgatggaactccggcagaaacgcagatggatgtgcaggctgtgattgaccagatacacgatgaagcggctaaatccccgatagtgcaggaactaaagagcgagataaaaacatcgtctgatgaggcgaaaaaggacgccgttgaggcggcaacgcttcagacgacagaagttgtaggcggtctgagaacagatacgtttaatgccctgaacagtgtgaacaaacgagttaccagcattgacaatgacggcggtaaagcgtttcaggcaatgtgggctcaaaaagcaagcgcggccggaataaaagctggaattggtatcgttgccggaaaagatgcggcaggtaatccgattagccaggtggcgatagcggcatcgcagttgtttattttcgacccgaataaccccggcaatacggcgtatccgtttgcggtgtcaggcggtaaggtcgtgatccagaaagcggtgatttatgacgcggtggttgaaacgctgtcggcgcaatatatcgtggctgatgatgtgaaaattggcgcaacgctgactgctccctatatcagaagcgccactatcagtaacggtaattttacggttgactcaaacggcaacgtgaatgccgtgaatgcgaacctgaacaatgttacttcacgtgggggggctttttacgatctgtatgcggtcggcggcacgatgggcaatgttcatattctggagaactgtcagatagacggtcgcctgtcagaaagctga

SEQ ID NO: 379190 - DNA, 1068 bp, Salmonella enterica
atggcagggctacagaattcgaatattacccggcagcgtatctatcgttctgcttctggtggcggtaatgcagatttcctgctggtgaccgagctggatgccggagtgctgtcatttcacgatgatttacagactgaacagcttggacctgtacttgagacagaacattacgttatgccgccggacaacatgactggcctttgcatgatggcaaacggtattgctgccggatttgccggaaacgaagtgatgttttctgaggcttttttgccgtatgcctggcctgattcgtacagacagaccacggcggaagatattgtcgccatagcctcaatcggaacggcgctggttgttgcaactaagggcgagccttatttattcagcggtgtttcaccgtcaaatatttcaggggcaaagctgccgttaacgcaggcgtgtgtcagcagacaaagcatggttgtgatggatggttttgtactctatgcgggaacaaacgggcttgtttcggtgagtggtgatggtaacgcgcttattgccacagaaaaaattatctcgccggaacagtggcgcgaaatgtttaacccgtcatccatcaaagcatatcagtatcgcggcgaatatgtggcccgttatacgaaaactgatggcagtcaggcagtctttatcttcagcccgcaggatatggatatccggcatatgagcacgacgttcgatacggcgtataacgatacagcaaccgatacattgtacctggtaaaagggcttgagttatctgtatcacagggcgctaacacgccattaccgctggtctggcgctcaaaaacgtttattgcgcaggaaaataccagtttttcatgccttcgaatcaaagcgccttatcctgaacgagtcgggatttctgtatttgcgaacggacagccggtgatccagttaccccctggttccctccgtaattccgtgctgaaactgccgccagtaacagggcgtgaatggtatctcgaagtgtcaggttttgggcaggttgagcgcgtcacactgagtacatctatgccggagatgcccgcatga

SEQ ID NO: 379191 - DNA, 753 bp, Salmonella enterica
atgattagcaatactattagaatgttggatatgaagagaaaaaacttatctgaacaagacattgaagctgcacgcaggctaaaagaaatctggaactctcgtaaggattcgttaggacttactcaggagcgagctgctgaaatgatgggttttacaactcagggggcggtcagccactacctgaatgcccagacaccgctaaaccttgagacagtcctgaagttttcagccttgctgagggtttcccctgaagatatcagacctgatatgacaggtctgattaatgtcgcacgcaaatatactcccgaaacctcaagtgaagaggatgctggtcagcctgaaactgatatacaaagcagggcaatggctacgtcagtgtacagaatgaaaaagctgctggaacaaactggctggagccagttcgagctggcccaacgcatgggtattaattcgcaggtggttcaacaatggctcatcggaaaagcagcccccaatcctgtaaaccttgacaagctgactgaaattacagggtatccatcctactggtttatgttgcccccagaagaaacagatcagatttctacacctgatgcaatgaggattggccctactcaaagagcgctattaagagtattcaacgcttttcctaaagaagagcaggaaaaaattctaaacgaaataactgagaaaaaagaaacaatggaagcactcgttgctcgctggatcaaggctcagaaaaataatcagtcttaa

SEQ ID NO: 379192 - DNA, 285 bp, Salmonella enterica
atggtgacaaaaatcacaactcacaccgactggatacgcagccccataaaacaacggcccgcttccagtggacattcctggatattacgtaaaatatgcgaagtgctttctcagaaaggtgatccgacattaatacaatgtgcttattgtaacaagctcattaatgaagatgacgcaatcgagaaggaacttatttatacacatggcagtcaactggcccgaaagaaacaaaaatattgtagcagtcgttgtgccagttatgaccagatggcacatgaactttaa

SEQ ID NO: 379193 - DNA, 342 bp, Salmonella enterica
atgaaaaataaaatacctgaagaatctgtattacaggaactcaaaaagctcactacccgtatatttcagatatgtgttgaaaataatatgccagttgttattggttactcatacgagttaagcagaaacgaagatggctattcaacaaacaaatccataacagcatatgcagatgaaaaaaaaggagcatggaactccacgatagcagccgcagtcatgatgctcagaatgaaggaggtccctaaaaaagctatccacgcgatggcagaaatggccgccgcctgtgaattagttcgggcaatgtctgaggattcagattcagaggaaaaaagcctgcattaa

SEQ ID NO: 379194 - DNA, 291 bp, Salmonella enterica
atgccggaagcaaagcgtaaaactccgaagttacctgatgatgagatagcctggaagctggaatccggaaagctgtggcgcagagcgatctgccgctggtgttatgttctcaccgaaacagaagatgtccatgttgccgaacagattgttcagcatatagcctggtgccggcagcaggtaccacaaaagcgcccgtgtgaactgatactgtcagcgaatgacctgcgttatattgacaaagtcgcccggaaactgggatgtgggcctattgcacgatattggatagagtag

SEQ ID NO: 379195 - DNA, 483 bp, Salmonella enterica
atgaaagaagctttctttaatcctgatgatattcaggaaaccatcacagggctgaaaaaacaagacagtcacggtctgcgttcgtccaccaacggcattcctgattttgtcccacgcaggtctcaggaaaataaatgtcatcaggcaaaatcaacgcactctatacctgatattccggcgcaaacaattcctccagcagctaatactgttttcagtcaggcagacgttgatgagtttctcgcccgtaagacgaaaacgtataaaatgactgaacgggactataaagaactagggaaaaatacattactgggaatcggtagtcttcttgatggtctggtaaccgccactgtaatttgcgctccagttgtagcagggatgatgaatacagaaaataaaagcgattctgattcagagtatacatatggtagcgatggatccatatatcaggatggtgtagtaatcttcaatcctgaaaactactaa

SEQ ID NO: 379196 - DNA, 1533 bp, Salmonella enterica
gtgactgcaaacagtattattgagtatatcctggtgtttttcggctggctgctgaacaacgcgatgtgggacattatgtcaggaaccgggttatatctgttgcccctggtgtttaaatgtgcggccgtctggctgaagacccgggaagagggatttgatgaggggaacaaagggatgttgctgcagcccaggatggagcatgcgctgtatgtgccgtatctggtgattctgttctgcgttataccagttgctccggtgaatatcagcacgatgaagtttgacagcagccgggcgaagcagtgccatgtgtcggtggccaccccgcagggctccggttacagccaggtggtcagcgactttggcggcagaacggtgcaaattccggtatggtggtatctggtgcaccgtctttcgaaaggcaccacacaggcaatgattgcgtccattccctgcggggggaaaatccggcagatacggtttgaagtgcagcacagccagttacgcgacccgatcctgattcaggaactacaggatttctccggcagttgctattcgcgggcctactaccgtctgaaaagtacgaatcagtccctgacggataaaacgattaattcggtgagctggataggcagcgattattttctcaacacggaaggatattacgatacctacacttcgaaacagccgagaagggcctggccgtggagtgaaaagcgggatgcggggtattcgaacacgggtgacggggggtatccgacctgtaaggaatggtggtcagacccgaagaaggggctgaaggaccgggtactggccagtctgccatcgcaggttaaggccgatttccagttacagaatgtgaggagctggcaggagctggcgctgcggtggctggtgagtccgcgtaacgtgtccctttccggaggcggtgaaacctacatgacgggcagtaatgataatgcctcgggtcttgtgggtaacatcacgcggctggcgacaacggtcggtgtgggaatgaaacagtttgaggcattaccgggttttgatgcgctgaaacaggccctgccgatagtccaggcgctgctggagatgatggtgattattgccataccggtgctactgatgttcagcacgtatgacccgaaaacgatagtgaccatcacatttgcactgtttgcgctgatgtttactccgttctggtgggaagtggccggctggctggatgaccagttgctgacgataatgtacggtgccagggatgattcggagctgaacagcagtgtaccgtttgcagattttgtgggctcggtgaatgacggctggataatgaatctggttctgggcgtgatgtatattcttttcccgttgtcctggtttgggatgatgagctggactggagtcagactgggggattttgccacacagatggtaaataatggagctaaattgcctcagactgctgggaatgaaggtggcaaacaaacaaaagatgcggctgtttctgtaattacaaaaggtaacaggaaactgaaataa

SEQ ID NO: 379197 - DNA, 354 bp, Salmonella enterica
atgaagaagatgaccattcccgcgtggctgaaatccggtccggtaaggattcttctgcaggttcttttatggtgtgtggcgttcacgttcctgatggtggttctgtatacctttgattcactgggggaactccatgaacggatggtacagtggcgcattcccttactggcctggcgtctggcgctgtactgtattctcatcaccctgtggatgtggccaggaggattgcggcaacgttatgccagccaggtcagttcctccggtcatccgaatccccgttttgcagtgtttcgcatggaaattatccccgtcctgctgattgccttttctgaatacagcacctggacacagtga

SEQ ID NO: 379198 - DNA, 1440 bp, Salmonella enterica
atgaagaaagcacgatacacaacacccttttcttttcccagggccgcactggcgttgttcaccagtatgctgctgtcgtgtccggcatcagcgatttcacttccctctctttccggagcagggaaaagtgcgggtgacgctgtcggtaatgcggtcagcgatggtctgttctactcgattggcggcgggtctgtgatatcgcagtccccgacctccaacagtatgcagttactggggctgaaggcgggcatcaacagtgacctgatgtgcggcaactttgatattaaaaccaccgtcagtaaccagcttaacggtctgaccagcggatttaaggacctgatggggaatgtggttcagggtgccacgggggcggtgaccagcatgccggcgatggttatccagcgcgccaatccggggttgtacgacatgataaccaacggcgtggcgcaggccggtctttcatttgaccgctcaaagctgagctgtgaaaacctgtcaaaaaaactggctgactacaccatgggagaccgggcctggacggattcggctgtcggggatgagtaccgggatgcggtgactcgcagtggcggagatgcactgaaggcagaggaagcaaaggataacgcgacaggtgaagaaggggcccgctggatagggggacagaaagctggcggcaaggggcagccagctatccagccaacccgtgatatggcgaaagccgggtacaacatgatgaacaacctgccggtgaacagtagccgcagtgttccgaaaaaccagtgtaacggctcggtctgccggatattcagcaatgcggaggaggcggcggctgcggtggtgaaagtgctgggtgaccgcagtatccgcacctgtactgacccgtcacagtgtcagcgcggtggggaagacaatgcgccgggggcatcggtggccggtaccggttttgggccgatgctggatgaggcgacaaaaacgaacctggaaacgctgaaccgactggtgaacagccggggtgcgccttctgttgaagaactcggcaaactgaaaaccggaggtctggctgtcacccgtggcgtgatagaagcactgcgtgacgacacggaccggaacacgctgatacagcggcttgccggcgagctggcaatggcggacaccattgaaaccgcgctggccatgcggcagatactgaccacaggagaatctgaacccaatgcggcggcacagaagcaggccatcgaggaaggcgaccggcgtgtcggttcgctcgaccgggggctggaaaatctgaagaacgagatggagttgcgccgggctgtcagcagcaacagcctgctgaagacgctggagcggcaggaaatacgtaacagtacgaaccagcttcagcagaaggatgcgggtggtgatgaaaaaatgagtgttattgagcaaaggagccagtaa

SEQ ID NO: 379199 - DNA, 798 bp, Salmonella enterica
gtgaaaacgtcggtaaaggtggagcactttattccggaagccgtgatttccgtctatcaggataagggagaaaacccctggactgagatgaagacggtcagcagtctgtcgggcggaattgagaacgccgtcagttcaggcctggccgggctaaatgccggaggcggacagtccacagcaaaacggccgcagggcagggagagtctgctgagcacccgcttcaaatatgccgatgccctcggtcatcctgccacctcacttatcggcgggcagataccggggtattcctgcaaaagtgccgccaccccgctggttccctatttcctgagtacgctggacagcctggtctggcgcacgggcctgccggaagccctgtatccggaggcgctgatacccggtaagcgtgaaatcggcagtactgccggcagtaacatgtggggcaatgtttatccgcgcagtggttttgtcacccagcaggatgactataaggccggagccgttattgcccagcgggtggccgatatcatcacccgcagcggacaggtacatgtttaccagcagctgacgggccaccggcgcccgggttactggccaccggacccggtcacggaaaataccggcacaaaaaaccacaaatggcagcgtctggcacctgcggcatcacagtcctgtgcggtgtttcctgataaaggcggaaaagtggcggaagacggcaactacgcctggacgctgtggcagccgtacagctgctgcaaaccacgcggacagacattcctttacagcactgatttcagctga

SEQ ID NO: 379200 - DNA, 231 bp, Salmonella enterica
atgctttgtacgggggatatcggcgtcaacatcattgaagataaagataataaatacgattatctcctgccacatatggcaaaaacggaacacagttgccgcgaacagacagaaccggaggatacgggcccccacaatgcctgtgcactggttgtcagtacaggcatgtacatactaccaggagctgccctctttatagtcgttaaaaacccccttaccgataccccctga

SEQ ID NO: 379201 - DNA, 366 bp, Salmonella enterica
atggcaaaatacaataaacccgtttttgtaaatgaactaatttctgacagaaaaataaaaacagcaagtaaatttatcgcctataaaacatggaatgaccccagcctttggtttgctgaagtgacagatgacggaaatgcttttttccactggcatcaggggagaaaatccgaaggtcataaggatactattattaattatatctccaaagatggacagaaatggcaggcaaccatcaaagattatgtttttttccactcaccagaaggagataacacccgtggtcatcatgataccgtaatccactatatcagtggtgataataatctttacgagggcagttttgctgagtggtatgatgagtaa

SEQ ID NO: 379202 - DNA, 930 bp, Salmonella enterica
atgaaaacatcaacttcagcacaaccatttccagtcttcttaaataatttaaatgaatctatttatggtactaaggatattgatatcaataatactcactccgggcatgttagcttcttgcatatcaagtctattgataaacaaattgcgaagtatattaggaataaagagtatatttctgcacacgatagagaacaattatataaactgttcgatgtcatccaaaatcaaggcagccagtgtactgctaaaaaattagccaagcttaataactctcttagagatttatcaaaaataaaatctgaatcatgcaaggcatgggatgctattacgagtactaaactcaatattaaggtactagatcaacataaaagcaggctgcaacaagagcgtgattgtcgttttcagatattatacgaaaaacttagtgctttacctgaaaagaatattccagaacaggtcagacagaaatttgcagactgcatagcagaaaaagatagcaaacaactccttatcaaatttcaagattttattgagtcatgtgcaaataaaataacaatcaacaataaccttactttatataatgacgtggatattaaaagtatacaaaaagccatatctaaccttcctgcaagttcattaacctgggatcagtttaaatgtgagcttaatgaaattcgtaagctaaattcagatctggataaaatggaaaaaagtatcatccaaagcaagatccgtatcgatacactagcagaaaaattttttatcacaaacaatgaccagggcctgaatgatcttaaaaagatggttgtaaaaccggcgccaatagttttccataataaacagtcaaatataaagttgctacgtgacaatttatttgcacttacaataagaaaaaatgcagaattgctaacagattccggtaattaa

SEQ ID NO: 379203 - DNA, 2145 bp, Salmonella enterica
atgatgaaaaagagacacagcattaatgaaatgactttcaggttttttctttgcattatattatctgtatgctcatggatgtcatttgctgacagctcagctaagggtgataaggatatttttccttatgatcgccaggccgaaaagatagcgacgacagtccgaagtggaaactattccgaagccgtcagctcatatttaaatgccggtatgtcagagcagatcagtaagtggttaggcagttatggttatgcacgtataaatattgcatccggtacaaatcaacagcagggacgatattccggtgattttctcttacctgtatttgattcagaaaatgctttgttattttcccagatcggtatacgtgagcataatgacaggacatatgcgaactatgggatcggaataagatactttcctgccagttatatgacggggatcaatctgttcattgacagggattataccggggggaacagccggctggggattgggggagagtatttttatgactatctgaaaatatcatcaaatctgtacaaggggatgacagactggcacgactccactgactttaatggtgaatggtcggaaaaacctgccgacgggtttgatgtgaggattgatggtaatttaccctttttccccgctgtaagccttaaggcatccgctgaaaaatactacgggaataacgtttcggtactgagcagaaaaaaactcagaagtcatcctgttattatttcatccggtattaattatacaccgatcccgctgctcacgttcagtctggatggcagtaaaagtggcagtgcatccggtcttcaggcaggtattcagttcagcctgaatttcagtcacgatataaactggcatcttacccctgaaaaagaaaaggggattcagattaataagagtgaaaaatataattttgtaaacagaaataacgtgattaccatgcagtataaagaaaaaaagagaacgccggagtatagaataatactgacggtcatcaggaataacagccctgctgatggtataacagagaatattgttcaggcccaggtgattgacgttaactatcacccgttacctgacacaaaagtggaatggaagtatgaaaataaacaggaagtggctgtcaccacgagttctgccctgacagacaggaacggactggcatactttaacctgacgagtacagcaccgctcactctccctgtttccgttgtcatagggaagatgacagaaagtacggatgttatttttgttaaacagactgcaaaatatctgaatatgcaactgattaaaaatgatgaggtggcaaatggcgaggcgtttaacataataaaagcaaggctgactgatgaaaatcacaaccctgttaaaggcatggcactgacctggagtgtccccgggtttattaaagtcagggaggaggcatcagttactgacaataatggcgaaatacagacatcgttcagctccaccgttgccggtggggttagcgtgaccgggagagccggtgagctgacgtctgacattaaaatgaatttcacaccgtcttccgggcctgaaataaaagttgaaaatatcctgaagctgataattaatgacggcgcaattgcagatggtatatccacaaactcagcggctatttatttaacagataaaacaggaataccagtccccggggaggaaattagtctgtcgacaaccggcaatgcggtactcagcgcttataaaataaaaacagacagccatggcatggcggtaatatatattactgataaaacagctgaaacagtaaatatagcggccagtacaggatcggcaaaggacgtcattgccaccacatcgtttatggcgtttggcgtgctttcgttaaccggtgataaatcagatgcggctgcagatggtcaggatgaaatacatctgacggcgaccgtcagggatatcaaaggaaatccggttaaaaatacgccggttgtgttttcagtatcaggtcatgccgttatcagcagtccttcggtgatcaccggggataatggagaggccggtgtttcggtgtcaaataagtatggtgaagtggttacggtgaatgcccgggcagaaaatttcaggaccgatccgggaattgagtaa

SEQ ID NO: 379204 - DNA, 138 bp, Salmonella enterica
atggggctgctggagacagcgaaaatgaacggtctgggcgcatcgttgttaacggatgtactgaaacgtctgccgggctggccggaggaaagtcgggataagttactgccgttcccggcatacgggttcagcgagtaa

SEQ ID NO: 379205 - DNA, 594 bp, Salmonella enterica
atggaaattatagatatactgattgttgttgatgctatcaggatccttaatgatcacggcaagaataacgctgctcatacaggggaatatgttaatctcaaaaatgacggacataattacatatatatgcttgggacatggtatcatatacaggatcaggcagactctgaactggatattttcgctaaacctggtgataaaattcgctggcgtatgactacgctctcaatgggagaaaaatatcagggaataattaaagagtttgtcatcaccggcggaaaaaacaatataacgctcccccgacctgcacataaaacgatcataactccccggattgatacaaatgagctttcgcttgataaggctgttttcagtatggccgatgacatattctgggaatccacggtcctgcaacccggacctgtcacctaccatacaaaatttgtgctttacgccggcggtggcggtggggggggcagtaatcatacaggaagtgatggtggtggtggtggtggtggctgtaatcatacaggaagtgacggtggttgcggtgactgtggtggctatcaatgggatccttttattaataagtga

SEQ ID NO: 379206 - DNA, 234 bp, Salmonella enterica
atgaccgagctggaaacacatttactcaacgccttgaagaacttacaacaggaattcgtcgcgcagcagcgcgtattattgaaggtgcagaacgactttcagaccgcgttagagcgtactgcacgggcagaccagacgatattagagcaagtcagttacttgacgaatcgtgtagaagaattgtcagagcaaatggagcatttcaggaacctctacaggcagaacaggcgctga

SEQ ID NO: 379207 - DNA, 300 bp, Salmonella enterica
atgcggtatgaaattgaatggatcgagaatgcaatggaggatctggccacgttgttcgaatacctggccgagaacgcctctctttgggatgcaaacgacgtaacagaccgcattctgcactcgactgacaaactgaccgactacccccggctgtatacgtcggatgagcgctacggtgctggtgttcgccgtatcagcctgctgggacagaatgtgttgtacgaggtggacgataccgcgcgacgtgtcatagttctggctgttgtcggtcaacggcagaacccgaaagcgatccgctga

SEQ ID NO: 379208 - DNA, 270 bp, Salmonella enterica
atgagcaccacacactacgagaacgccaatttcctgcgggagctggccgagaatctaccgcgtattctgcccactggtagcgctgacaaagcggaacttttgcaacgtctggctgacgatgaactggcacaagccgagtatgacgacagggttcgcgccaaagttgcagccgccagggctgacacccgcccgcgattgaccacagaacaggtgcgccagcggctgcaaactcgctatcaggaactcagggatcagcacgatgcggtatga

SEQ ID NO: 379209 - DNA, 411 bp, Salmonella enterica
atgacagaaccctcacttagcatcatagacgccagcatgttccccgtggtgtgcatacatggggcggagctagtacccggagatggggcaagcatcataggcgattttgagcaattaatccggtatgaaaagccatttgttctcgttatcgagaatggcgctggttcttcccgccgtcagcaggaagaaggtaaggcgcgtatgctatggctgaaagaaaacaagacccgcatggcggccgtatgcaaaggtatcgtgtttgtcacaccggacagccagcgcctgcctttggttgaaaaacaggcagcaggattgcaatctgtattagggatcacttttagggcaagagaaagtttcgacgaggctcatgctacgggactggctttgctgaagggcacagctacgggatga

SEQ ID NO: 379210 - DNA, 444 bp, Salmonella enterica
atgacccgtcaaaaccgttatgaatccgatgttgtcgcttggtcccaggaacaggcagccctgctgcgcgccggacgtttttctgagatagacattgccaatattgccgaggagatcgaggacgtgggcaaaagtgaacaacgcgaactggccagccgtatggccgtacttcttgctcacctactgaaatggaaatttcagtctgaaagacagtgcaaaagctggaagttaactatttccgggcagaggaatctgatagctcgtcgccttgataaaacgcccagtctgaaagccacactgaaagattctgtatggttatccgatgcctggtttgacggcagaatgtcagcatccaaagagaccggactttctcttgatgtttttccggaagaatgcatctggacgacagaacaggcactctccccggagttcttcccggattaa

SEQ ID NO: 379211 - DNA, 519 bp, Salmonella enterica
atgagtactcaaaatgtgattaccaacgaggaacgaatagttaggcaaagtgatcttttagctatgcaggaaaaacacgaaaaggaactccaggatgcaaggaaaaacaacagatttacacaagtatacccgttagggtggaaacgccttatggaactagcaaggaataatccaggagcatttggattatatacttaccttgctcaacatatcgacggcagttgtggtgcagtggttgctgatcaaacatttcttgctaaacagcttgaggttactacaaggactattcgtaattggatcggttatttagaaaataacagggcattggtgaagatacctgttgctgggagggtctgtgcatatgcgctaaatcctcatgaggtctggaaaggttacgataataataaatctagtgcagcgttcctaagcaagacgctcgtcaacaacgatggtgaaattaaacgccgtattatgaccatgttttcaggtactgatatgagtactgttcaggaggactaa

SEQ ID NO: 379212 - DNA, 300 bp, Salmonella enterica
atggcaaagaaacagcacatgttacaggtcagaatttcggatgatgactacctggcattgcaggcactggctgaatcggctgatatttctatgtcggcgctggtacgtgaccatattggtaaaatccacgtgcggaaccggagcgatgagagagcgcggatagtgatgcttaaccgcatcaacgccaatctgaacatgatcgcacgctgggtaaacacgcataaatcagcggcctcggcggttgaagttgtatctcaccttatcgccatcgagcgccatattcaggagatggcacgatga

SEQ ID NO: 379213 - DNA, 504 bp, Salmonella enterica
atgagcgtgagtttgacgctacaggagcgattgaagcagcaacacctggagcagagcgagattattcagaacctgacgagggagcagctgatcgctttgcgcaaagagttgaacggcatattaagcaaagagctgaataccatgcaggccgatatgcaaaaacagatcaaagccatgtcgccggaactcaaccggcgcagaaaggatttgatttggcgcctgactgccagccgggtattaataccggccctgacagcagcgagcgtcttggctgctatctggctgagcggctggggcctgtctacatggcaggaataccggataaaccagaactggcagacgctccggaagcaagagaaggcgctcgatacgcaggaccgggaaggtgggaaaatccagtggagccattgtggggagcagagacggctttgtctgaaaatcgacgagagctgggggacgtttgggaaggatggcgaaaactacaaaataccgctggggtactga

SEQ ID NO: 379214 - DNA, 1224 bp, Salmonella enterica
atgccaaagaaagccagagaactgtcagcacttaccgtttccagacttaaaactgatgggcgttatgccgttggcggagtggatggattatacctgcgtattgcaggacgctcacgagcatgggtgctgtgtgtcgcaatgggaacccgtatcaacagggcaggtaagacggttccccgacgtctgaatatgggactaggcccgtatcaggaagtttcactggcagaagcgcgtgacaaggcgcgtgaactgcgtaaacaaatccgtaatggcattgatccccttcaggaaaaacacacccataaagctttacaggaagcacaggcccgtaagcaaaaaacctttcgtgaatgtgctgaagcggtgctggaaattaaggggcgtgagctaaagaataaaaaacatgtggctcagtggcgttctacactggaaacttattcttatccggttattggcgataaagttgtcagtgaaattaccaagatggatatgctggcaatccttgaaccaatatggctaaccaaaaacgaaacagccagccgtgtgcgtggtcgtatagaaacggtaatggattacgccaaggcgaaagagtatttcgaaggggataacccggcagcttggaaaggtgtattaaaaccgctgttgccgatgccaagtaaagttcagaccagaaaacatcatgctgcactgccttataaagatatcggttcatttatggcagaactacgtcagcgagccggaatttcagccagagcgctggagttttccatactgaccgtagcccgttctggtgaaattcgtggcgctgaatggagtgagatcgatctggataggaaaacgtggattattcctgctgaaaggatgaaagccgcgaaagagcatcgagtaccactgtctgatacggctgtcgaacttcttaaagcattaccgcgacttacagataacaatcttgtttttccggcacctcgtggtgggcaactgtcagatatgtcattaacagcggttttaaaacgtatgggacgtagtgatttaacccagcatgggttccggtccacgttcagggaatgggccggggaaaccacctcctaccaacgggaagtgattgagcacgctcttgctcaccagttagcagataaagctgaagccgcttaccagcgtggcaccttatggcccaaacgtgttgcgttaatggatgactggacaatctattgttctgtagcgtaa

SEQ ID NO: 379215 - DNA, 846 bp, Salmonella enterica
atgaaaagaagtgaaataaggaaggcgattgaacagtggtttgatgttgaacgctatgaggcgatagagaaactcaccctacagcagttttatgttgaggttgagcggcgtatcttggcccacaaaatgttgctgaaacgggatatgctaccgcctctgaacaggctcttattggatgattaccgcaataagagcctgagaggcgaaattttattcagtggcgacacatccactcagggacatgagcttgccagaacctacgccgttgtccctgttacccggagtaatgcgcaattatatgcgaaaagtttaaccctgcttggtacccatcccgaaacagcccaaagaagccagtctgaatacctgtcggaatatctgaaggaatccggcataaaaaacctgtcctctattaccgtcgatatttttctgcaggaggcatcaactgaagacattattgaacatttgaaagtgctcattcctcaatggaggaaacagctaaaaatgaacgatccggctgttcgggaatatcgatttggcaaaagtacattgagaaaaattattgagtatcgtcttattccaatgatggatctgattttttggggcgctgacaataacgacaccaaaattccactttccctgatttcatcgttgcttcatgaggacagtgacaaagatcgtgatgaaggaatgctaaaagcaacggattatccgttggcgatggcgttgctgaccgatgagagctatctgaaatcgtttgaagattatatgatggaaaacaattacctaagagatatgccgattgcagatcacgtaaaagacgataagaagaaaaaagaagccaagtaa

SEQ ID NO: 379216 - DNA, 282 bp, Salmonella enterica
atgaaagagaacaacaaaaaccaacagcgaacagagttctgtgagcaaagatatattaaaaatgaaatcgcaggaaaaagattaatacgtatacctgaagtactcagtcgggttgggttcagccgtaccactttatatgagcgtattaaggaggggagctttcccgacagagtaaaaatagggctaaggtccgtagcctttgttgaaagtgagattgatgcttggattgaaaaagtgattgctgaatctcgctgcgaatctgaatacaactactttaaataa

SEQ ID NO: 379217 - DNA, 312 bp, Salmonella enterica
atgaaaaatagaactatgctgccgtgtgtagtgactgtcactaatgatgagacagaagtatttatggaaatggcaataaataactttagaaaacatcttcaggtcatgattgattgtatgggaaatgattatgagcgtcactttaaagacagacgctatattgaagaagtgatttctaaagtgattgagcgaacaaaacaagagtttgctgaatcaatgaaagataataaagggaaagaatattatctgttcttggatgaggtgagaaggaatctgagagttatttactctgcgtatcgtactaactattaa

SEQ ID NO: 379218 - DNA, 387 bp, Salmonella enterica
atgaacgaaaaatgtttaggctggaatgaaatacccgtaaaaatatccgcaagtaatgctgagacagcaaactttgctactgatgttgtaaatacctataacgagttaatacattacttatactttaatctaggtgatgatgtatttctgaaaaaaatgaaggatggattttacagggagatattcataacggggattattaatctcacgctacaggaatggtttgaaagtgctgaagagataaagattaaacacatatcagtcccagaggtcaaaactatactaagtagctatcatgagtttttgattaaatgctttaatggagatggttatgttcattattacaaaaaaatagaaatcagcgctaataaacagtctgtaatataa

SEQ ID NO: 379219 - DNA, 288 bp, Salmonella enterica
atgagtgaaaaactgataaaagaatcaaggaaagtattcctgcaccttgctgagctattttatgaaatgagaataaatacgcttaaggaaacacgtcctgatgaagtagagacgttgatggtagatgatgcattcatggaaggcatttataaagagtgcattaaaaatgctggtgcaatttttaaaaaagtagtcagggctgagtattatgagcaagggcattcagtaaaaatggttgataaggaggtggtattgataacactgcgtgttaatcataaaagaagatga

SEQ ID NO: 379220 - DNA, 291 bp, Salmonella enterica
atgtctaaaaatattgaaattaaaaatacatctacagagttgttttatgatctggcaaagcgttctttcgaagcaagttggagaacaatgcaagatatgtgtagtgacagcatttcgcatcttgtcgatgatgctgattttatgagtgcatttatacggctcacgattaatcatatttatcataactttgatacgcttacgaaacaagaagaaaatcaaggaaaccttgatgacgtgaactatgaagaagtagctgaacggcttgtacgtaatgcttgggtgttttgttaa

SEQ ID NO: 379221 - DNA, 1629 bp, Salmonella enterica
gtggatgttttcgatgctatcaaaaagatgacacctggggcgagttattttgctcttggtttgattttctttgccttgatgacgccactttattcaaacttgtttaatactcgtttgatttacagtgattcttatcattctgttttctttgttaccggaatatttataatttttgttatctttgagcttattttaaaaagcattatttatgacaaagcgtcttctcagattaaaagtaacaatataaaatgcaatgctttttttttatatgctttaaaaatttcaaactgcagaaatgcggcagtaaagatacgtactattgaatcttctgtagcatcattttgggaatcttatcctttaatctcagtagatttctcattaacatttttgtttattatatgtctttttgtaatgatgggggggtatgctttccccttgtttatctattatatagcgttagcttttctttgtgttcatatccgtttttctgcatataaaaaaacgttgcaaacaaatagcgtcagttatgaaaaaatgtctacattaatatcattagaagaaaaaagaaaagagttgaagtttctacgcagcaccttttttgaaaagctattgatggataaaactaatcgtgacgaatataccaaaatggaaatgaatattgaaaatcatcattgggctgaaatgataaaggctaactcttttgtttctatgattgtgatgtttatttcatcctattttgctgtcgtcaatggtagtttgacgacagcctctattattgccattatgattatcaactctcggctctcaggggctttagttgggggcgttaataagttatatttatcacgattacattcgtttcacatcatgaatagtttaagcgagctattaaaagataaagatacatttgtatcgcatagcggtatatatatatcacggattcaacaactatcagttgaaaaattatctatttcgtttgccgaacgaaaactgatcgaaccgctctcatttacggctgttcctggagattttattggcattgttggtgcatcaggagcgggtaaatcatctttaattaaagcactgtcaaactctattaattgctatacagggtcagttaagctaaataatgttgatataacacacatttctgaagagtatatacagagctgtatcgcttatcactctacaaacagctcttttataaagggctcgcttcgtgaaaatttcatgatatatggtgttgtggatgatagtgatatcatagagatattaactttatgctgtagaaatcttattctttcgaaagaaaacgtagacgaaaaatttgttgatgagctaaacctttccaatggggaaaaacagaaaattttattatgtctcgcattatttaaaaaaccggagatggtgttcttggatgaatcgacatcttatctttcaaccgctgacgctttagattttctggaaagaataaaacatctttactcagatagtattgtcatttttgcgacccatgatatatcactacaaaggttatttactcgaaagattgaactctcacatgaacatttaagaactgtaagttgtaatacaacgataagtattccgaaaatgaaactgaatggatga

SEQ ID NO: 379222 - DNA, 522 bp, Salmonella enterica
atgctcagtgataataccggcgtccctgactcaacgactgccgcaacaactaccgctgtaaattacgtgctgaatcaggctgcggccgcatatagtctggcagaatcaaaatacaccgcaggaggagcaactaccagaaaagctggtcttgttcagcttgtgaattcaatgggagggtctggttcactggtgatgccacaggcggctgtaactaccgcaatacagacgtatccgtctctcggcaaaggtcagacattacaggatttaagaggctctcgtagtatagacgcaacttataccaattcaaccggttttccgattgcggtttacgtccgtattgcaggggggacttcagcaaatttatacgttcatgtaaatggaatagaatttggtgggggtgggtcaatagcatctaatacatccatagcaacggcattttttattgttcccaatggtgcaacttaccgcgtaatggcttctggttcctccattgcattacaggcgtggtcggagttgagataa

SEQ ID NO: 379223 - DNA, 354 bp, Salmonella enterica
atgaaatattttaagacgaataaaaatgaaatttatgtgtccgacgatgatgcagataaaaagttttataaagaagggttaattccgataactgaagaagaagcaagcgaaatattaaacccgccgccaactcatgaggaacttattcaggtcgcagaaaatgaacgccagcgcctgctgactcatgctgataaagtgatacttgactggcgtacagagttaatgctgggtgaaatcagcgacgctaacagggataaactgtcggcgtggctggcatacaagagtgaggttaaaacagttgatgtgacaaccactcctgataatgttaactggcctgttccccctgaggggtag

SEQ ID NO: 379224 - DNA, 291 bp, Salmonella enterica
ttgcaccatcaaaaaaacattcagttgccgaaagaaaactcatacatggttaaagaagaggggcgctggggaaatgtgacaatgaaaaaggttgataactataaatattataaaggtcataatgagtgggtcagttgtaagcgtatggcacaacacgcaatggttctcgaaaaaaggatagcgcaattaactgaatcgcaaaacaattctttacgtacgattaatattgcatggtctaaatttagtgagaaagatatatcaggtctgaatcaattaaaaacgatggcttga

SEQ ID NO: 379225 - DNA, 675 bp, Salmonella enterica
atgttcccaaaatcgggggagaagtgtatgggcaagttaggtggtgaaatgaaggcgctggcaaaacattgcggcggtagccataaaacagtgaacgatcgcatccatatcgtgcaatgttttgatcagtatttacgggaactgaacatccagatccagcgggtggcgcagatcaaggttcgccacattgaaagctacattcatgaaagactggcgcaggggatcggcaaacgcacgctacagaatgaaatggcttcgctgcgtgctgtactgcaacaggccgggcgtaagcaggtggcagagcatgagcgactgacaaataaatccctggggctttctggcgaatcccgctctggaacgcggcaggccatcacaccggaccattaccggcatgtgctggaaatggcgcgcacgaaagatccggggctggcggcagcactggaactgtcgcggctgatgggattgcgttcacaggaggcggtgcaaagcgcacaatcactgaaaacgtggaaacaggctgttgaacgtggcgatacgcgtctgacagtagtttttggcaccaaaggcggacgaccccgcgaaacggtgattctggatgctggcgcaatcaaaaatgaacgttcctatcgctttaaatgctccggtagtgattaccccttttccatcgtcacttag

SEQ ID NO: 379226 - DNA, 1071 bp, Salmonella enterica
atgaataaactgagatacctaaagacctggctgtcaacgctggttatgctgctgacaatgtccggtattcctgcatatgcagctctggatgattcatattgtaatacttccggaaatttcagtattaagaatgtcaatctgaagggggggaaattctccccgggacaggaactgcagactatctctattcccgtcacctacagatgtaaacttgcacccaaaagttatggaggaccttatcagctccacctgaatgtaaattacagtctgaagactctggtggaggccctggacggtacaggactgggtttcgatttgaagattgatgaaacgggggggccttctgctgaacttaaatgggcagacatactacaggcagtcggcggctggaatcgccgattgcctttcggtaaggataaggatttacctgccggaactgactacaattcaggcggaaccctgacgctgcgactttttgttaacaagggatttactcagacgctggcgaattttcatattccttccttaccagggatagcggtaattccttttggtgggcccgctgtgccgaagcccccctatgacagcataaccacttcggcttttaacgtccgctttattcctgaaaattctggcaacgtcattgttaatccccctgtcgtaagaatggggcatttttatgccagttataaagaaacactgtccagacaggtcccttttaccgtcaccgcacagcagaacacagggaccggtctggtaccgccgttcattgcgccactgaatattaagtttaaaacaaatgacctgcagctggcagataatggccgtagcgtggttctctacaatacaaagggacaggccaccggtatgaaactgtctgtatctgatatgaagtcgggagaaagcgttatttttgataccgcaatgaaaatgggggacatgaacatggggtccgacgcaaccggaagcgtggttaaaaactatatagcaaaagtggaaacaattcccggagagccgttaaatgtgggggagttttcggcggcaatgacggtagttgttacctacatctga

SEQ ID NO: 379227 - DNA, 510 bp, Salmonella enterica
atgcaccctgacagaaacgccaaaaaaaagcagttccttatagccgataatgatattcatcatccgctccagaaaaaccatgatgcctgcttcattccggaaagtgtccgtcagtataacggtgagcctctgtatatccttgccgcacagtggtgtatgcagcagaaaaaatgggttacgcgcaaccagatatcagaagcctttcatattacagcgagacgagccagctacctgatttcttatctgagaaaaaaaacgtcgcgggtggtctgtctgtgccgtcatgaagttctttccggcaaggctctgcgttatgaaatttatgtcacgcagattatggaatgcccggagaaggccagacgcggacgtaccacatcccctccggtctcacgtcgtcgagtggggaatgccgggacggcgcaagccaacaagctgtggaaccagttatgcagtaacaggaaagcggggcatattctgaacaagaaggaagatgatgataacctcctttaa

SEQ ID NO: 379228 - DNA, 2049 bp, Salmonella enterica
atgccgccggtgatgaccgcagggaacggacacggggagggcggcagtaatagctggtattccatcagagctgcagccaataacacggcggaagtccgcatttatgatgaaattggtggatggggaatttcggctcgctggtttgcggaggagctgacggcgctggggacgattaaccgcataaacctgcatattcactcgccaggcggcagcgtgcttgacggacttgctatttataacctgctgaaagcgcacccggcacaaaaaacggtatatatcgacggtatggcctgctcgatggcatccgccattgcgatggtgggcaacccggtcattatgccggaaaacgccatgatgatggtacaccgtccgcgcggcgtggcgggcggtgaatctgatgatattcgcgaatatgccgacctgctggacaaaatagagggcgttattattcccatctatgccgaaaaaaccggaaagacaccggaagaaattgcggccctgctggagaaggaaacctggatgagtggcgcggagtgcgtcagtgaagggtttgccgacaaactgatacagccagtaaaagcgatggcctgtattcattcaaaacgtgttgaggagtttgaacatatgccacagagcattaaaggtatgattatcgccccgcagggcaatgcaggcgcgcaaccgcatgcaaaagcccctgagtcacagattcagccgcaggctcagtcgccggtgactgtagatgaaaataccattcgcgcgcacttgcaggaagagcagcgtaaccgtatctcaggtattcagaatgtgttttcactttccggcgatcgctatgcctcgctgatgacggaatgtattgctgatgtggactgttcgctggaaatggcaaaggataagttgctggccgaaatggcgaaaggtatcacgccgaccaatcagcttaacggtccgcagaaccgtgctgagtttcataccgggatgtataccggaaacggcaatattaccggggatgctgttcgcgctgccgtgatggcccgcgcaggatatgaagacgcacagaaggataacccgtacaactgcatgacccttcgtgagctggcgcgcatttcgctggtggcgcggggaactggcgtagccagcatgaatcccatgcagatgatcggcatggcgtttacgcacagtacatctgatttcggtaacattctgctggatgtggcaaacaagtccattctgcagggctggcaggaagcgccggaaaccttcgatacctggaccaaaaaagggcagttgtctgatttcaggattgcgcaccgtgtgggcatggggggattcagctcactgcgtcaggttcgtgaaggcgcggaatacaaatacgtcaccaccggggataaacaggcgaccattgcgctcgccacctacggggagctgttcagcattacccgccaggccatcatcaatgatgatatgaatatgctgacggatgtcccgatgaaattgggacgtgcggcgaaggccaccattgccgatctggtttatgacgttctcatcagtaaccagaaactgtccagtgataatgtggcgctgtttgacaaggcgaaacacgcaaacgcccttgaaaaagccgttatggatgtggcgtccctggataaagcgcgccagctaatgcggatgcagaaagagggcgatcgccacctcaatatccgtccggcatttgtactggtgccgacggcgctggagtctgtttcaaatcaggtgattaaatctgtcagtgtcaagggggcggatattaatgccgggatcattaacccggtgaaagatttcgccacggtgatcgcggagcctcgtcttgatgacgccagtcagtccactttctatcttactgcagcaaaaggcagcgataccattgaggtggcttaccttaacggcgtggatgagccgtatatcgaccagcaggaaggattcacggtagatggcgtaaccacgaaagtccgcattgatgcgggtgttgcgccggtggattatcgcggcatggtgaaatgcaccgtataa

SEQ ID NO: 379229 - DNA, 330 bp, Salmonella enterica
atggcgaccctgtttaacgccgtgtattccggtccggttatgccgtggattgacccgctgaaagaggcgaacgcctggcggatactgatacgtggcggagcggcaacagagagtgactgggtgcgtgcccgtggcggcgcacctgctgaagtgaaacgccgccgtaaggcggaaattgacgaaaaccgtaagctgggactggtatttgatactgacccggcacatgacccgggggaacaggataatgccggaagtgaagacaacagtggcggcgataaaaatgccgccggtgatgaccgcagggaacggacacggggagggcggcagtaa

SEQ ID NO: 379230 - DNA, 420 bp, Salmonella enterica
atgtcagatatacagaaaaatgccacacctggcaggcctaaaggctgccttaactatcctcctgaatttaaacaacggctcgtcgctgagtcatgtaagccgggggtatcaatctcccgactggctctggataatggtattaacgccaatctgttgtttaaatggcgccagttatggcggcagggaaaactgcaactaccttcaggggctgtaaccagtgaccctctgttaatccccgttacgattgaatctgaaacagcccctgtttccgcagcgacaatccagccatcaactccgtcagcgggagatgacacacttaacgcctcctgtgaggttgtgttcagacacgggactctccgcctgaacggcactatcagcgaaaatcttctggcaaagttgatacaggagcttaaacgatga

SEQ ID NO: 379231 - DNA, 351 bp, Salmonella enterica
atgatgtctcttccatccggaaccaaaatctggctggttgccggcgtcactgatatgcgtaaatcgttcaacggtctgggtgaacagatacaaaccgtgttgaatgaaaaccctcactccgggaatctctttatcttccggggaagacgcggtgatatggtgaaaatcctttgggcggatgcggatggcctgtgcctgtttaccaaacgtcttgaagaaggccagtttatctggcctgctgtgcgtgacgggaaaataactatcacccgttcacaacttgccatgctcctcgataagctggactggcgtcagccaaaaacttcccgccttaatgccctgacaatgttgtaa

SEQ ID NO: 379232 - DNA, 1593 bp, Salmonella enterica
atgaataaacaactctctgcccgcattgctgacctggaaagacagctcagcctgaaagatgaacagctccgtatcatcgaggaaacggaaaacttcctgcgttcagcgcttgcccgcgctgaggaaaaaatcgagcaggaagagcgggaaatagagcacctgagagctcaggtggaaaagctgcgtcgtatgttgtttggcaggcgttcagaaaagcttcatcggcaggtggaacaggcagaagagctactgaaacagcgtgaacaggagagcgatcggtacagtggtcgggaaaatgacccgcaggttccccggcagcttcgccagtcccgtcatcgtcgcccgcttcctgaacaccttccccgtgaaatacaccgtctggaaccatcggaaacctgctgtcctgagtgcagcggagaactcgactatctgggagaggtgagttcggaacaactggaactggtgaccagcgccctgaaggttatccgcacagtacggataaaaaaggcctgcacgaagtgtgactgtatcgtggaagccccggcaccatcacgtccgatagacaggggaatagctggcccggggctgctggcgcgggttctggtgtccaaatatgcggaacataccccgctgtaccgccagaccgaaatcctggcgcgtcagggagtcgacctgagccgctccctgctctcaaactgggtggatgcgtgttgcagactgatggcccctctggatgaagccctgtacaactacgtgatggatacccgcaagctgcacacggatgataccccggtgccggtactggcaccgggtaataaaaagacgaaaaccgggcgtctgtggacttatgtgcgtgataaccgtaacgcaggctcctcagatccgcctgcaacgtggttcgccttctcgccggacagaaaagggaaacatccacagcaacatctgagaaactaccacggggtgttgcaggcggatgcttacggtgggtacgatcgtctgttcagtccggaacgtgaaggaggtccactgacagaagcagcctgttgggctcacgcccgccgaaaaatccacgatgtgtatgtcagaacaaaaagcccgacggcggaggaagcgctgaaacgtatcggagaactgtatgccatcgaggacgaaatacgtggttgtcctgaaaatgaacgcctggcagccaggcagactcgtagtaaagcgcttctgacgtccctgtatgactggatggtggagaaaaacgcgacgttgtcgaaaaagtcaaagctgggtgaagcgttcggctacatactgaaccagtggaaagccctgtgctactactgtgaagacgggcttgcagaagcggataataacaccgccgagcgcgcgttgcgcgcagtctgtcttggaaagaaaaattatctcttcttcggtaacaaccatggaggtgagcgcggagccttactatacggactgatcgggacatgccggttaaacggtatagatccggaagcttatctgcgtcatatactgagcgtgttgccggaatggtcgtctaataaagtggctgaactactgccatggaacgtagatctctccaataaataa

SEQ ID NO: 379233 - DNA, 267 bp, Salmonella enterica
gtgtttcgccttgtcaaacagcgccacattatcactggacagtttctggttactgatgagaacgtcataaaccagatcggcaatggtggcttttgccgcacgtcccagcttcatcgggacatccgtcagcatattcatatcatcattgatgatggcctggcgggtaatgctgaacagctccccataggtggcgagcgcaatggtcgcctgtttatcccctgtggtgacgtatttgtattccgctccttcacgaacctgacgcagtga

SEQ ID NO: 379234 - DNA, 1806 bp, Salmonella enterica
atgcaggctacctcacagcacccttctgcaacggcgattaaggataatattagctctgatagcaatacatttgacaggaaagccttttcggagaaagttgcttatctggataaagcgttatcgcgaggtgagaataaagcaagtattgctactgctaacttaaaatcggaggtagtacaaccgaaagaaatgcggttagaaaaacgctccttattaccgatagacaccggctgcgtggcatcaacgagtgttgaaaagcaagggaccgtcgggcatacatctaatttaacaaacgtaaatgccagtacgtctggtgtcatcactcgcgaccagagtactaatacgcctgccattaacgacaggatcgccagtgatgcccataatcctgatagtcatttgaactcatttgggaataacgctgatatagagcgccgtagctcagctaacaatcatgttcaggagcgaggtaatttgagctcatctgagaataatgttggtgaaggcagttctgacttaactgacaataatattcactaccgagaggatttgagttcatctgagaataatgctcctggaaacagtcatagttcagctaacaataataatctgcaactaattgatagtattaacaatacttctactaaagataaagttgaactcaatgcaacgcctgtgcaagaggcgaaacaaaaacacacgcaccgaatatctgataacacacttttctccattattggcatagcgacgctgcttcttggggtaggtattgatgtgctaggtttcacgttacgaggggagcgttctactgccgacacggcggaagcagatcaacttgttgatattccagccgacttacaagatgagattaccagtctggaaaatagtgtggagcttgaagatcagattagcagtatgctgaacgatattgctacacaatgtgaagacaacgtcacacaaataactgaagttgcagagtggctttcttcagcacaagatcaaatcctttcagacatcgaaaggaaagcttatgatacagcgctggtacaaacagaggcaactgctttcgctgatccaaataaccaacagatgacagtcgacgattatggtaacttggttccaactggtcaattgaccactgctgcaaaagaggaatgcgaagaacaagccactcaaattgcgcagcaagcaaaaaatatggcgagcacagcgttaagctctacaattgaccggattaatgcaaaggcgacggatataagcaaagtcagtgatactctggctaacgccagcagcactgccaacgatattagtcaatcaacacagaccgttataaacaaactggggaacattgaacaaaccgtcgaaaattacgtgaatagtcaaaccaatgtaacacaatccggtatttcgagctccggatttgatgcaatagaagggctcggtagcgtcgtggcggcgctctcagtaccaatttttgcaaaactttttacgaacatccaccacaacaaactggctgaaaaacaggtaaaagatcaatcggttaaccaaaaaccatctgcaatacaggatgatataactgcatctgacaatgccggctcgtcacctgaggagggaggaaatgatatgtatgcggcggccactgatgcccgatctgatcttagtagcaacggatcgttagccgcgagagacggatcgttagccgggagaatagacaattttgcggaagatatagaatctgacagcagtgattcgtcgtcagtctatacggaggatacatcagattctgtcgatatcggaacgttagtctag

SEQ ID NO: 379235 - DNA, 1068 bp, Salmonella enterica
atgacagaacgattattcaatatgaaatcactgatactgtcaggtgtgtttcttttctttactgtctgtgattctgcgcgggcaaatatcgactggtcatattgtgacgcgaatggacatgtcggcattcagaatattaatcttaagggtggaacattcttcactggtcaggagctgcagagcgttaccgttcccattagttatacctgttatacaaaatggaaaagttatggaccctcttactacacaactcttaatctttacaatatgggggaggtagtaactgcactaaaaaaaagcggtctcggcatggatatcactgttcaggaagggacgtcggcttccgtaacatttacatggaaagagatacaggcaggattttctggctggagcagctcaaaagtattcgggcaatatatggaccaggagaaaacatataaccggagcggaacgctgacttttcgtatatttgtgtatcaggcgtttacgaataattttttgaacataactataccatcaagcacgattaacatattaccctatgacccaaatggtgtaagccccccatctgtttcattcagacctttaactgtttctgcctttaatctcaggtttattcctgacaactcaggcagggttattatctctccttctactaccatcaatatggggcgtttttatacggaatataaggaaaccatggtgcccagggaagtacctttcaccgttacagcacaacagaatgtcggaacgcagatcccgttcgtcgccccactggctatagagttcaggaccaacggtctgacactggcagatgctgacagcaccgtgattcttaagaataataaacaagaaaacaatggcttcagactgtcggtaatggatgtggataatgacacaccagttaaatttaatgtgaaagcagatatggaatctatccatcttgataacggtgccggtggcagaattataaagcactacaaagcaaaagtagaagccataccaggagcggaaattaaaacaggtgatttttcggcagcaatgacagttattgttacttacaattaa

SEQ ID NO: 379236 - DNA, 402 bp, Salmonella enterica
atgcttggatttgtttctgcattatcttccgctgtggcagtaatgatattattactgtctgtattattagctaatttgctatctgtagctataacgaaagacaataagcttgattcggcaaatctaacctatgaagctgataataaagatcagactgacgttgtcatgggtaaaggattttctttgtcagtcaaggatctcttgccgttacgttcatctgatgctgcagtcagactatattgtacatatggtaataatttaagtctcgaggtggccaaaaaatacactacttataattatatcgttgccaaatcagccttaggagataaagaaattattgtagaacaaccgatctatgaaactaaaaaaaataattgcattgtagaagaagtgaaaaaatga

SEQ ID NO: 379237 - DNA, 1209 bp, Salmonella enterica
atgttagcggtctttatgaccgttgctgctttgattgtttatatttgtgtggcgaaaattgatattgtctctcctggtactggcgtgataaccggtgcttcagataaactagtaatagtcagtcctgattcaggctttattaataaatttgatttaagaactggctcaaaggttaatatcggagatatacttttttcgtatacgaaccttgatgtctttcaccaggaaaaaacacttaatgagttagtattatttgcagacagacggatcgttagcctggaagaggatcagcgattgcttaaaatactcctggctggagaaatatccgaggaaagtgagtttagtacggaaaataaagatttcttcagtcaggaacttagtgcttataagcttttgaatgagtatttttctttaagaaatgaagaaaagaatttaaagctcagagaggagaagatgattgaagaaaaaaacgatcttcacgatcgattgcttcttttgaaaagaaaaggaaatttacttaaatcggcccgcgcgccagaaatagagataataaataataaaactgaaataagtcaaattatatctcaaataactacaggggagatcagtttactctcattacaaaatgacattaagctggcaaacaataggtttcgtagtagcgtccttgagcaactcaataacaatgctgaacaactggaacagttacgtagagaacgtcttgaaaatcgggggcaattggaactactaagaaataaaattaaggctaatagtgttttatcaccgacgaatggcataatattaagtattgaacgtagctttgagaagggttcttatgtcgaaaactcacagccagtaatgacaataaagaaaagtaatgaaagtaaagtcattgatgctcgtattttagcaaaatacaggccttttatctttatgggcacaacggcaaaaattactgtgaattcacctggctataaaaaaacactctcaggtgaaattacgaggataagtgctgattcgttctcagatgatgaaaaaaatggtgctgaacgttattacaaagttgaaataaagccagatgataaaattatagtccctcctgagttagagggtgtccaggttaatgtatatgcgctaagtaagaaagtgactctgttaaattacattacagcgttagtcggcgataatattgtatttaatgtatggtaa

SEQ ID NO: 379238 - DNA, 501 bp, Salmonella enterica
ttgaacgaacaggctaatgctgcaaaatttaacgcctggcagcaagattcattagttcaggttagtctggtcgcagaggaaagatataataatagtcaaaggattgataaagattcatgggggggcattcaggtttcggtaaacctatttgattatgataaaaagattgctagtcaaaccggtataaaatcatatcaggtattaaagacaaggatggattttaaatataaagaattgttggcaaaaatgaaatcattacaactgacgataaattctaatcaaaaggaacttaaaggattagaagagcaaagcagaactacagaagtgattttagctaatcagaaaagagaatataatatctcacaatcatcttattatgaaatgttaaacacgcaatacgactattttgcattagagcggaaaatggttgaaatgaaaattagtgatgctatcaacaagatatctttgctacaggtatctggcgaactgttaagtttgtga

SEQ ID NO: 379239 - DNA, 405 bp, Salmonella enterica
atgatgagacagaagaaacgtggccatcttcagccaggtgtccacctcccccatcacgggtcttcgggccagaagccattctgccgccctgcgggcgtcatctgcggcgcggaacagcctccagtggtcagccgccaggttgttaccggctggcagtccgtcatgttgcggcccccggttatccggcagccccagacgggcggcaaggaacgccgtcccgatatccgtgaccagcgcctcatacacactgtcagtacgttcgtcgaccgtcagtccgtaccggttaagccgctgcgggtgaccggaggcctgtaccagaagacggagcatctcatccccgtacgttatgcacctttcggcactaccaccaccgtttactgtcggcagttctatacggtcatgtaa

SEQ ID NO: 379240 - DNA, 1179 bp, Salmonella enterica
atgattaagatggtatgcaggacgctgaagatgataacgagggtaaaccggtcgtcatttatgctgctccacagaatgaagcgaatgccactgtggctgctgatggtgtgtactcttatgggaccggaatatgccacagcagacggatgtaagagcctgactggttccatcagactgcaattaccatcgtcagtgagttttcctccgggtgggcacccggatgcatctgaatcaaatcctgtgcctctgtttaccggaagtacatatagtattcagtatgaatgcaccaataatacatcgtcaccaagacaagtaaaactggtcaggcttcaagatttcaatccgttgctgcaggcgttacaggcggcaggaatgaagttaacgctcgatatcgaagattcttccgggggggggaccgtctcctggactcccacccttcagacacctgaggcaacgcctttcggtgccagttacacagggactgtcagcaacaggacggtaagaatcaccccgaaactgtctctgataaaaccaccgacaacaggattttctgtcgtaccgtctctgacggcattcgaaataatttctggtctgaaatcttcttcacgattcgatggtccccagattaccacctcagcagtcagaatacagtacgtcccgacatgtttcgtacgaaccagtctgggcacgaataacgttaactttggaccggtgttgacaaccgatgtgaacaatactctttcccgaaacattccttttaatattactgcagacgtaaatggaaactgtgataagggaaatctccagagcgcttacacagtaacagtgtcaggaaacacaacgaattattatcttgaacttcccctgaaagtctcattcattctgaataatggcggggaagttgctccggacagtaaatccatacttctgtatacagacaaagacgatagacatctgaaaaatggactgcagctgaaaatcaacgcaccagatggtgaaccggttacatttaatgtggccagcttacctgtcaataaatttggtgattttcagggcagcgaaggtggaggtacgtggcgtgtcagcaatacctataacgctgttctgtcttctacaggagacccggtgataaccggaaaatacagcgcacaggttaccgtgaaggtggactattactga

SEQ ID NO: 379241 - DNA, 159 bp, Salmonella enterica; identical to SEQ ID NO: 378630

SEQ ID NO: 379242 - DNA, 750 bp, Salmonella enterica
atgatttctgtttgtataccaacttacaatggtgaatattatattgaagagcaaattgatagcattctctcagagataggtcctgatgatgaaataattatttcagatgatggttcaaccgactctaccttatctatcattgaggagtacaaggatccccgcattaaggtttataaaaatagcataaaaaatataaattatttcaaagatcgtactgagattcttttaaaaaaagtctctttaaatgtgcaaaatacattgatgcattgtcaaggcgactatatatatttagctgatcaggatgatatttggataaaaggacgtattgcaaaaactatatcttttttgaataccaattccccaactttagtggtttgtaattgttctgttattgatgaagatcgtaacgtaacacaagattcgtattttgattatataagtccaagtagtaatattttcagaactatggttaaaagttcatttcatgggtgttgcatgtgtttcaaccgtagtttattagataaattatttccttttcctgaatatagcattggtcatgatctatggattggattacaggcaatgaaatttaaaggggttcttttttattctgaaccgttacttttatatcgcaggcattcatctacagtaactatgactggtaataagagttctaatactcttaattttaaaattaaatataggttaatgatgttgaaagaatatttgagaatagataaaaaaagatga

SEQ ID NO: 379243 - DNA, 552 bp, Salmonella enterica
atgaaagtggcaaaaaataaaaagagcgaacagtttttaaatattaaaactttcatcccttatacaccggaaccagatgaagcattattccccggtgcggcgcatcttaaatcagcggatggtcaggactggtacgggtgccaacaattattttcagaagacacgctgaaaattacctacgacgataacgatgttattacgtgtattacgcgcgatatttccggtttatggcctgctggccagagcgtggcggagctacctgatacggatgaaaaccgtcgagctgatatttcaggcggctggcagtttaaagacggtaaagtcgttcaacgggtttattcgccggaagagctgcgtaaaaaggcggaagctgaaaaagttcgccgcctggctgaggctgaatcagccattgcaccactggcgcgggcagtaaaactaaaaattgccacagatgaagagattaaacggcttgaagcatgggaactctacagcgtaatggtaaaccgcgtggataccgctaacccagactggccagaatcaccaaaaacataa

SEQ ID NO: 379244 - DNA, 630 bp, Salmonella enterica
atgtgtatccactgttaccgtcagaggggtggactgacttacgttcccggctttatccgtcaccgtcacactcagagtgtaactgccgtccgtccagtcgcgatccggcgtaaaacgccaccccccagcttcctgactcgcatcaaatacacttgtcgtaccatcatgcgtcacgcttaccacaacgctagcgacgtcggcatcaatatgttgcaggataaaattcggctggggacggttggtcaggttatcaccccgttcaccggtatcatccgcgttgtccagcgtgatggtcgggaccaacagggtggtgtcaacggtaaagtccagcgtccgcgtcgccgtattgcccgcaatatcggtcacctccaccgccagcgtgtatgtcccttccggcacatcagtcaaccaactgtagtcccagacacctgccgcgctcttcgacgcatgcatccacgtcttgccgccgtcaatgctcagacgtaccgcgttcacatcttccggcacctccacccggaactccggacgcagagcgttggtcaggttgtcatccggcacgccggtatcattgaccagtacaatgttgttaatctccgtctgcgtgtcgatggtcactgccagcggcgctga

SEQ ID NO: 379245 - DNA, 408 bp, Salmonella enterica
atgcaagatatcactgctgacaacccgcagaccaccagtactcagatagcggatgcagacactgatgctatggctgataaattccgcgcacgtatcgattctgctgaaacgctggaagatgcaaccgcgatcggcaacgatataaatgcggcgaaaccctcgttaggaacagctctttttacagagttaaagaataaggccacacgtcgctatcaccttgtcaaacatcgcaatctggttgagacagccatcaattccattccgcgaccaggtgaaccagaatccctagcaggttttgaatctgccgaaaaggcactcactacggcaaaacggcatattggcgatgaactctacgataagtaccgcatcaatctcaatgatatgaaaccggaatatatcaccgcataa

SEQ ID NO: 379246 - DNA, 306 bp, Salmonella enterica
atgagcaaatggaaacgagccgaaatcctgattatccgccagtgcgccggaaaaatgcgggtggcagatattggccggttgattggcagaacccgtgatgcagtccggactaaagccagagagctgaatatctgtcttatcctgcgtggtgactatcaccagtccgcaaaatatcaccagagtgatattgaaaaggcacgcgacctgcaccttgagggtgtgaagcgccaggatattgccgaaatgctggaaataccactcggcatggttaaccagtacgtctatttcgatcggagggttggctaa

SEQ ID NO: 379247 - DNA, 204 bp, Salmonella enterica
atgggcaagcctaaaactcacactggcgtcatcgtcaccaaagacggtgaaaaaacagtaaaaatacgtgagacagcaacaacctggtgtgtcggaccccgcgagacatacgacaaatttaccgggtgtcgtgtaggcgcaccgctcacaaagcgtcgcctgaagctggaaagcattaaaccaattgaaggcggtgcagcatga

SEQ ID NO: 379248 - DNA, 408 bp, Salmonella enterica
atgaccatagtgagcattccggatgattggcagacatgcgaaaagttatccgatgattcttacgttgataacgcgctacgtgaactggttgaggacacaacaggtgataacggtgtgcgtgttgttcaggcggtaatcagagcattgcgagatagcggattgatacgcacttaccccgatctgtcacaaccagtagatccgcagatttccgaatatgagcaaatcatgcttcaagctggttgggttatggtgcccatcgaaccaactgacgaaatgatagcggcggcgatggaatgtgatgatgtggttttcgacagtaaagatccaaccgcattctgtgttcagtatcgggaaatatattgcgcgatggtggatgttgcaccacaaccggagggaaataacagatga

SEQ ID NO: 379249 - DNA, 330 bp, Salmonella enterica
atggcgaccctgtttaatgccgtgtattccggtccggttatgccgtggatagatccgctgaaagaggcgaatgcctggcgagtgctgatacgcggcggggcggcaacagagagtgactgggtgcgtgcccgtggcggcgcacctgctgaagtgaaacgccgccgtaaggcggaaattgacgaaaaccgtaagctgggactggtatttgatactgacccggcacatgacccgggggaacaggataatgccggaagtgaagacaacagtggcggcgataaaaatgccgccggtgatgaccgcagggaacggacacggggagggcggcagtaa

SEQ ID NO: 379250 - DNA, 741 bp, Salmonella enterica
atgctgataaaaaaagacgccatgtacaggagagatactgcagccttgttccgtggtggtgttattgcctgtctgccgacaatccccggttactggagtataggttttgctgccggtgcaatcgggaccttatcgggttttaccctctggcaaactgcatttctggcaaccgcgctgtatgccgggtcggctcagtttttgttctattcactctggtctgccggagcggaactcacgtccgtagtgatgagtgtgtttcttgttaatttacgttatctgctgatgagttcgacaatgagtattttatttcgtgaacagacggtactacagaaaataatcagtggcttactgctgacggacgaaacttttggcgtggcggcgcagtacggtggacgtgagggaaatatcccgtttgcctggatgtcaggcctcaatctggctgcatggctgaactggatcctggcctgcgtggtaggggcatggtttgcctctgttctgccggccgcattgatggaaggattaagtttcagtctggtctctatgttcatcggactggtactgatgctctggttttccagtcaccagaaaatgctggaaacgctcagcgtggcgactgccgtactggtaacgtattttacggcaggtcatgcagatctcagcatcacagttattatcgccgcttcagtatcagcaacgctggcaactctattgtcaggaatatctctaaaagggggagaataa

SEQ ID NO: 379251 - DNA, 324 bp, Salmonella enterica
atggagcacagtatcttgctggctattatggcagcagcactggtcaccgctctgatgcgtgtggttcccgttttgctgctttcccgactccgtctggttccgtttgtacaacggtggctgaatttcatccctgcagctattatggctgccattattacggcggagcttatcgaaaaacccgcactgacgagtaatggtatcagtgtgtcacttctggctgctgctattgctgctgtaaccggactggtaacccgtgggttgtttgttaccgttctagctggtatggtggcctactcgggattgagatattttttcggactgtaa

SEQ ID NO: 379252 - DNA, 162 bp, Salmonella enterica
atggtgccgcccctggggagcctgcctttaaaggctgttctgccggcagaaacccggacgctgtgggtggggtatattgatgattacggtggactgcagatgaaccgctacgcctgcgatgccctgaactgcgcgtttaaggacgcaggggtgacatcatga

SEQ ID NO: 379253 - DNA, 339 bp, Salmonella enterica
atgactgagcatccagcggctgcgggttcggatgcgattcagttgtacccgattccactgtttcaggcgttgctggtttatctgccagttcgcctgccggttgcggtttttcttcatcacactgaaatctccctgcctcaatatcccgcagacatttgcccgcctgacgaagccttgctgcattttcttcatgggttgttggggcattatcaggcgcatattcgtaccagtctggatcgcgaacaccatgaaccgcgagaaaactttcacaccaggcgtggcgcagctccggactaccgctatgaacggcagcgggggctttgcgtaccaggtcaataa

SEQ ID NO: 379254 - DNA, 786 bp, Salmonella enterica
atggacattgagacctatcttctcagccacggcattaagcccaaagcggggcaactggtgcgcctgctgaatgtgccgctggagaaatccacggtgtttcatggcctgccatcgggtaaagcgcacgcggatgcgctgcgggatgcatggacagcccatcatggcgcggcggggcgtgaatgggtgcgctggcttgccgaccaccagcaggaggcaaaagaagccgctatcagtgcgcgggagcgctggcgcggacttatcccggaaagctacggtgagcaggtacaccgggtgggggaaaaattcgccgtgatggaagcggcgctaattcttgctgagcatattactggctgggatgcacaaatgtgccgggacgctatccagcataattttaatgcctgggtgaaagagttcggcaccggaaacaaagagcaccagcagattgttgaacaggcggaggcgtttcttaccaccttcggattcagtcgctatctcccctatccggcgagtgatgaaagggatcttccgattaaagagcttgccgggtaccgaacgggaagcctgagaaatgatgaagatacgttcaaattttacacctttccggctgtgtttgacggtgagatagcgcgaggatttaaccctactcagttcgcaaaggcgctggcgcgagctgggatgctggagaaaggcggggatcgtctgaagaaaaaggcgcttaagaaaataggcggtaagcagcatacgttctatgtgctgatgtactcgccggaggaagaaatcagctag

SEQ ID NO: 379255 - DNA, 1335 bp, Salmonella enterica
atgaaagacatagattctaataaaatgggactttttgctttgatattagttactgcgtcaaatatgatggggtctggtgtttttttattaccaactaatatgggaaaaattggtcctgtttctgtatggggatgggctgcaactattattggttgtgcatgtcttgctttagtttttgtaaagactaattttcttaaccccaaggtcggtgggatcgtagcatttgctaatgatgcttttggggattttgttggttttcaaactggtctatgttattggtttatgtcctggataggtaatgtaggtgtgcttgtcgctggcgttgcatacttaagttattttttcccaatcctgaaagatccaacatatagtgccatattatgcattgtttttttatggggatttatagcacttgcaagcttaggtgcgaaggtcgctggtagtacacaatcgttcactgcaatttgtatgttaattgtggttctgggagttggaatttttggttggttttggttcaggcctgaagtttatggagaagtttacaatgcaacaggagatagtgatggttcagcaataatgagtgcagcgagtattgcactatgggggttccttggaatagagggggctgtagtagcctgtggtcaggttaaaaatccagagcgtaacgtaccaattgcaacagtggttggattattaatagccgcaacatgttatgtatcgagttgtgtagttattatgggtctggttcctcataatcttcttgcaaattctcccgctccatttgcagatgctgctaaatatatgttgggtgactgggctggaaatattgtatcagctttaagtgttattgcatgtctgggaactatgtgtgggtggttaatacttcaatctgaaggccctcgtgcagcagctaatgcgggaatatttccaaagttctttggagaaacaaataaaaatgatgtaccaatgaaaagcctggttttcaccggtatactcatgacaattgtattttttatgacgatgtctccgaatgcttcagagcaattcaaaattctcattctgatgtcggtatatgcatgtctggttccatatatctatgctgtaattgccttaccaataacaatgattgcaaaagggaagtctaaatctaaaagcttctacggttacctttttcttacagctgtcgctctcatatactgcctgtttgccatgttaggatctggtactgatacactattttggggatgtttactcctgcaaataacaataccattatacagttatgttgctaagcgtaaaaaagaacgtggtgaaatcatccttctcaaccaataa

SEQ ID NO: 379256 - DNA, 444 bp, Salmonella enterica
atgacgccacttggtcctaatattgctgatagaggttctgcattttataatttttctgtaagtaagtttaattcagttgatgggaaacgacattataaactttgggttggtgtacctgacaaaaaaactcctatttctggtttttctgttatttatatgttggatggcaatgctgttatggatagattatcggatgattttttgaaaattctgtccagaaaaaatcctcctgttattgttgctattggatatcagactacactaccttttgaatcagaatcgcgagcttatgactatactcctgttgatgaagaatctaacagttttgaacgttatggtcgaaaaggaggtgggaatgatattttccgtcaactgattaaaaataaaattataccgattgcagaacaaaatattaaaatcaatgacaaaaaacgcggtatatag

SEQ ID NO: 379257 - DNA, 216 bp, Salmonella enterica
atgaataaaaagttatacatcatggagggtgatggtgataataaaagagatcgcattaataaatctgatgtgttgaataaaacaaccaatatggtttcaatgcttcgtgaatataatgtccctgcaaagtatattttttatccggggcttactcatgggcagatgtttacaccatcttttaaatcagcgttgttagatattgctgaggaaaaataa

SEQ ID NO: 379258 - DNA, 231 bp, Salmonella enterica
gtggtggaatggttcacccgctacattaacgccaagctgcgtctgagcgcctacagcacgcgcaaaatcgccgcctttaacgttatgtccgctggtggtgagcaggggctgttaattgcctctgagttgttgggccatagcaatccggcaatcactcgcacatatctgcaattaggcagcaaggcgacggctattcagtcccgtatggcgctggaggtatgcaatgcataa

SEQ ID NO: 379259 - DNA, 435 bp, Salmonella enterica
atgcataagcccgaagcacttaaatttaatgagcgtgttgagtgctcatgtcatcgattgccatttgttcgtgtgattaaatcccgtggtgttgatttctggagcgtgccagcgtctggtggcttttctggtggttgtcagaccggggaggcattggcaaggttatatctcaaaaacttacgcgatggcggttacgttggcggcggggcgcttcagtttattgccaaagagatgctcaggaagatggaggtggcacgcggtattagcaaggacgctgaggaatccatttcaggccagcttgtcggattcttttccgtgctggataggtggctaaatattgctgctctttctgatatacgttcccttgattcgttggatgagtcagcattacttttaacggcaaatgcagggatagcggcaacccgccaggaataa

SEQ ID NO: 379260 - DNA, 309 bp, Salmonella enterica
atgaacacaaaaattaatcaggctcgtcctgaggggcttgcacaccctgaaatccgtatcggagatatttggaaggatcgccacggttcccgagtaattattttatcggcatcagtccgttgtattgagtaccgtcgtgttggctatgacgctacatgtagcagttcccttggtcgatttaagcgtgattttgtttacgtggaagggaatacgaacacggttgatgttgagcgatttgtaagtgctgcggatggaaaagaaaagatccgcgtactgcgcgaaattcttcaggaaagattaaaaaaatga

SEQ ID NO: 379261 - DNA, 600 bp, Salmonella enterica
atgcgtaataaaataatacttgccatggcggctgccggtatgatgtgcgccattccggcttttgctggtgttatatccccccccgctaactccggtaacggaacgataaccttcagtggcactgttattgaagccccctgcaccatttcacccgacagtcagaatatcctggtgggcctgggggaggtttccacgaaatcgctggcaacgaccgaaagtgtttcccctgaccccgccaaaatcgagatcagtctgcgcggttgtgcgtttgaagaacacgctgctgagggtaaaccaaaccctgactatggtctgctatcaaaggtcgatgtggaattcagcaatttaattgccgtggatgctaccaaagggactattaaaaatacggccgcagatccggcacaaaatgtgaatatccagcttctgcgaagcgacaagacgaccccctttaatctgacagatggcgcgtctgataagaccgcaacacaactgactcccggaaacaacactgtcacgttctgggcacggatgattgctagcggacaggccactcatggtaatgtcggcgccaccatcacctataaactgaaatatttctga

SEQ ID NO: 379262 - DNA, 378 bp, Salmonella enterica
atgaacattgttagtcatcttgtcaccgacaataccgctgtcattgaccagcacaatactgctaataacagtctgtgtatccaccgttaccgtcagcggcgaggattggctcatatttcctgccttatcctcaacttttaccgtcagggtgtagttgccatccgtccagtcactgtctggtgtaaagtgccaccgaccgctaacctgggtcagcgccaactccttactcttaccgttgtgtgtaaccaccaccattacctgactcgcatccgcgtcgatgccgttaatcgtaaaaccaggcgttttttcgttggtgatattgtcgccagccacaccactgtcatccacggcatccagcgtgatggtcggcgtcgatag

SEQ ID NO: 379263 - DNA, 231 bp, Salmonella enterica
gtggtggattggttcactcgttacatcaacgccaaactgcgcctgagcgcctacagcacacgtaaaatcgccgcctttaacgtcatggcggcaggtggtgagcaggggctgttaatcgcttcagaactgctcggacatagtaaccccgcaatcacccgcacttatctccagttgggtagcaaggccaccgcgatacagtcccgtatggcactggaggtatgtaatgcataa

SEQ ID NO: 379264 - DNA, 192 bp, Salmonella enterica
atgcataacaaagagcatctattaacagtcacgctgcctgttgaagaagatgggtcgggggaatttctggttcaggttgtaaacggaaaggtaaggctccgcgctttgcgtagtgatgagtttgttacctgcttcaatgcgattattgattccctacgtatgaccgggattcaggtaattattccggcgtaa

SEQ ID NO: 379265 - DNA, 309 bp, Salmonella enterica
atgaccaagaaaattaatcaggctcagcctgagggaatcgtacaccctgcaattcgtcccggagatatctggaaagaccaccacggttccagagtaattattttgtctgcatcacctttgcgcgtggaatatcgccgcgttggttatgacgctacctgtattagttcaccggagcgttttaagcgcgactttgtgtatgtggaagggatcacgaacacggtggatgtagggcgttttcttacagcggcagacggcaaggaaaaaatccgcgtattacgtgaaatcctccaggaaagattaaaaaaatga

SEQ ID NO: 379266 - DNA, 366 bp, Salmonella enterica
gtgaaatatgaacaatattttggtgatgatgtcgcattatttggtaccgaccatctgcaaacgaatccaaatgccatcactgtaggactcagttatacaccaattcctttagtcacctttgcagcagattataaaaagggaagtgattcactggacgatacggcaatatcagtgtccttcaactatgcatttggtattccctggtcacaacaaatttccccagatgcagtacaaattcgtcgttctttaatggggtcacgcttcgatttcgttgagcgtaacaatgatattgttatgcaatatcgcaaacaaggcatcattaagcggggagatatcaaagcaggtaccattgacagcatcggttga

SEQ ID NO: 379267 - DNA, 180 bp, Salmonella enterica
atgattgttaatgtgggtcttgggcaacgttattttctgaaaaataataccatgttaggttataatctattctatgatcaaaatatgagtagcaatgtaacccgtacgggtgttggccttgaactctggcgtgactatttcaaattcagtggcaacggatattttgcacttagtgactag

SEQ ID NO: 379268 - DNA, 330 bp, Salmonella enterica; identical to SEQ ID NO: 379249

SEQ ID NO: 379269 - DNA, 438 bp, Salmonella enterica
atgggctggatgattatggcgctgggaatggtgttcatgctcatcacgggacacgtggtggaaagccagagaatgcagacgcaggccaggacgcaggtgaccaccgccagagtgccggcgcagcagatgctggggctggcgtcggccatcaacgactggcgccatggccatccgctgcgtgacggggaagtgccgctgtccgcgctggcgctggtgagtccccccgatggtcgtattcaccaccgtattgtcagcgaccgtctgtgggtgtggcgggcagacacgccggggcttatcagttcgctgcgcatgctgtcggacggctccgcgctggttggtacggtcagccgcgggcgtctggtgtggctgtcgggcacggacaccggcctgacgttaccgccgggcgtgaataacggggacgtggtgtacctcaactga

SEQ ID NO: 379270 - DNA, 438 bp, Salmonella enterica
atgggctggatgattatggcgttgggaatggtgttcatgctggtcacggggcacgtgttggagcgtcagcgcctgcagacgcagacgggagtgcagatggcttccgtcaggctaccggcacagcagatgctgggtctggcagcagctattaacgactggcgccacgaccatccgctgcgtgacggcatggcaccgctgtcttccctggctctggtaagtccacctgacagccgtatccatcaccgtattgtcagcgaccgcctctgggtgtggcgggcagacacacctgggctgatcagctcactacgcatgctgtcggacggttccgcgctggtaggcacggtctgccgcgggcgtctggtgtggctgtcgggcacggacaccggcctggcgttgccgccgggagttaaggacggggatgtggtgtacctcaactga

SEQ ID NO: 379271 - DNA, 420 bp, Salmonella enterica
atgcctgttgtcgcaaaaaaagatgttgaatccgcaactattgaaaatggtggtgtaggacgaacgcctttcgatattgagcttagtggttgtgccaccgggatttccagagcacaagtgtcattttcctctgaagagtttgcgaacttaacagatggtactctaaataatgatacgacgattgatgatgcagcaaaaaatgtcaatgttgtccttttcaataatggaaattcacaaagttcacaagtttttatcgggcgtcaggatgatactccccagattgtaacacttgacaatggcagtggcgttttttcattcgcggctgcttatgtacctggtccacagtttaattctgattcaaatcaaattgttcccggtaaggttcacaccaatgcaacgtttagtattacgtattattag

SEQ ID NO: 379272 - DNA, 198 bp, Salmonella enterica
atggctaagccgcagtgtaaccaaactcaccctaaaaaagtagttttaccaaagctgaaggcgctgaccccggaagaagatcgggcgcttgctccgtatcagcagggcatatatcacggcatgtctgaaatgctggaaatggtgaaaacctgcctgatgcgtgctggtgtggaatatcaggaggctgataatgcataa

SEQ ID NO: 379273 - DNA, 282 bp, Salmonella enterica
atgcataagttcacctggctttttctcgccacctacgccgacccgaaagcacttcctgtagttctgcgtactcaggccgatacggaagccgatgcacgtcaaaagctggtgggcgatcacactctgacgttcgccgccaaaattaatacagcgtgtccggtgaaccatagtttttactgtgaaagagaggaatcttgctggagcgttattggtactcgtttaacgagtgctgatattaagtcctggggagattctatttttggaggtgcggcccatgcttaa

SEQ ID NO: 379274 - DNA, 501 bp, Salmonella enterica
gtgtttcacatcggcgcggctcacctggtcgaatacgatcttctgttcatcatcggtcatatccgccgccagttcgtcacaggacgcgctatcccacttcatataggccagatggtcgccagcaatacgcgcggcgtccttgcgctgcttacgcacgatttcgatacctttgcgggtcgcgcgcgcttcggcggctttggtctgcttcgccactatgatggtgcactggcctgtttcccagttgacgcaggagtaacgcaggttgcaaacatcgctggtgcgccagccggtgataacggaaatatcccaccacagcaaaacccaatctgcttgcgtctgctggatacgctcgcgaagtttgcgttgttcgtcacggtcgtaaacaggctgcatggtgcgtgtgcctttggtggatacggccttcaccacgttgccgcgcagttctcgcgctttggcggtcagagtctggaggttaagcatgggccgcacctccaaaaatag

SEQ ID NO: 379275 - DNA, 414 bp, Salmonella enterica
gtgcaacttgggcaaatttcttatcgccacctgaaagctgttgatgatgtttcagactcaaaaccgttcactattcatctccagaactgtgcatttgatacggatgatgcacagtccaatccgaacccggttggcaaaatgtccagagtcaccgtgtccttctccggtaatgcggactcaaacaataaaggatacgtcaataccggcaacgcacagaacgtcgcagtccagttgctgaaaagcgacaaccatacaattatcgtgcccaacaccccgatgccggatggcgacgctcagcaactgcaaaatggtaataacgaacttactttcttcgcccgcgttgtagcgctaactacaggtgtaactccgggaaatattgagagttctgtcacctacaccctgaaatacctgtga

SEQ ID NO: 379276 - DNA, 420 bp, Salmonella enterica
atgaataatcttatccttaagacccagcatggccaccatatcggttgtcacacagatgacggccgcatcgcgtccggcagccggtacaaccctgaccggatactgttcccgtaccgtctggtcattgagccagatatcgagaatatagttaccgggcgccacatacccctcgcggctgaaggccgtgaggtccacattggacaggttcccgctgtccagcaggctggcattaaactccgtggcctgcgacttcaggacggaaaatgtcagggtaatcagaatggcaagccgggtaattttcatggcatggcgctttcgtgttgtcgtccgtgtaacagacagcccgcaggcgtggtcagatataaaagccgtccgaaaccctccgtggacggcttatccctgtcgttatttaccgcgtaa

SEQ ID NO: 379277 - DNA, 393 bp, Salmonella enterica
atgtatgatattcatgttgttttaaatgacacacccggtgaattagctgcgttgggaaaggtgttaagccaaaacggtattggtcttgagggtggtggcgtatttaccattggtgacaaggcacatgctcattttcttgtagaaaagggggatgaagctaaagctgtgcttgaaaagagagattttaaggttgagcatgtacgcaggccattgatccgaaagcttaagcaagagcgtcccggtgaattaggtgagatagctgcagtgctgactgaaaatggtgttaatatcctgtgccaatacagcgatcatgcaaaccaactgatccttgtgactgataatgatatggttgccagtaaagtcacagaaaaatgggctgtactgaatgagtag

SEQ ID NO: 379278 - DNA, 156 bp, Salmonella enterica
atggaaatcgctgtaattcacggtctgctgcatactgccctggttatccttctgcaggctgtaactcacctggcgactgtccccccaggggacactgacctggaaataaacctggttttgtgtccggttgtacgccgactggttacgggacagtga

SEQ ID NO: 379279 - DNA, 399 bp, Salmonella enterica
atgcgtcccgccgtacagcggacgtccggcggccaccttgtagcgaacctgtccctgacgggccataaaaggcacgctggccgtgttgacctgccaggcccggacgctgccgtcgctttcgcgcaccgtcacgtcaagattgccgctgatgttctggctcaggtccggcagtacgaacggtccgggagacacccgggtctggtacagcatgcggccgttctggctgacggtcacctgcgcgttactgttcgcaatgccgctgatttgcggggcatatccctgcagggaggacggcagcatgcgctcatcgctggccagggtgagtccggcaaagcggaaggagtcaaaaatggcggagctgagatacgtctgtcccagcgtcagtttcgagcgcagtga

SEQ ID NO: 379280 - DNA, 240 bp, Salmonella enterica
atgccagcacaggatattggggagttatttgttaatgcttgcagcagtgcaatggaatccgaattttacttccaaaaccaaaaagcaaaaatatatataataatggacgctgatgaattcaaatttaagatagtcaataccagagataataaaacaatatatgaaggttcagtgttagcagaactgttagatatacttgaaagtagtaataaaaaacaaattcacggtaaaaatatatga

SEQ ID NO: 379281 - DNA, 408 bp, Salmonella enterica
atgcctgcccgaacattatgccagaaatttttccgtggcgctctgagcccgtttcatcaatatcgtcagaatgctcttcttgatgctaccgtggctttgacccgtggtgcatcacttactctgacaagcatcggtcgctaccttcctggttcagcacaagtcaaaaacaggataaaacgcgttgaccgcctgtcaggtaatacctctttgcatgaggatatccctttgatattccgtaatattacatcactccttactcgccagttttcctggtgtgttatcgctgtcgactggagcggttacccgtccaggaatatcacatccttcgtgccagtcttatctgtgatgggcgttcaatccctctgcttagtcggcttgtaccttcagcaaagcaaaataattcgctga

SEQ ID NO: 379282 - DNA, 753 bp, Salmonella enterica
atgactggaagtttgaacatgggtaatcagaatattaataatgtcaggaatataatagcagcaggtacaacaacttctgggatattacattctattggagatacaaccattggaggtaatgctcaggttaatggtaatattaactcaaacaataccgtttcaggtacgacagtcagctcccgtggagaaacctatactcaaaactggttcagaacattaggtgatggtggcatatacttccaaaaatatggtggtggatggaatatgtctgatgctaatacaatacaggcatatggagggaaaaatattcgtactgctgctggtgtttacggcggatatattcattcatccggtaatatagattctgcggcagatatgaactcgaacagggtattttctaattatattcagtcaaacgggcgagtggtagctggggagtatgttcagatcaatggacaagtccaaataggtggaggttgttcaccaaatgggcttcaaggcagaacggcagaaggtgctattttatcctgtgttaatggtgtatggactggtggtagtaaagtaaatagaaatcaatgtatgtggttatcagcttctaatgctttttctttttttggtaaacgtgcttgggagttgcatgaaaagccagttatttgtccagataattatataatggttggaacaaaaatgtggggatgggctgaaggtgttgatgatgaacatgttgatgcttattgttgtccactaacctaa

SEQ ID NO: 379283 - DNA, 276 bp, Salmonella enterica
gtggatgtcattggtcatattatcgccaacgacgccactgtcattaaccagttcgatcttattgatcgtgatgtcggtatcgactgtgaccgacagtggcgcagagtagcgaatattacccgcctcatcttccactttcactgtcagtgtatagcgaccatcaccccagacgttgtccggcgtgaaatgccagcggccatccgtgcctcgggttgccgtcaatacctccttgatgctgccatgctggatttctaccgtgacgaagcgcgcatctga

SEQ ID NO: 379284 - DNA, 537 bp, Salmonella enterica
atggtgtatttgaaacctattgaggctatgcaagtaacagtgcagattattttttggctttggggagtggtagtgttatgctatattgttttttttcttgctgattattcttaccaacgctatgaattgctgaaaaatctaaaaatgtcacatgaagaagttaaaaaagaaattaaggaaatggaggggaatgaggaaataaaaagacatcgccattccctacaccaggagatacaaagtggcagtttagcggtgatggttaagaaatctagtgccgtgataaaaaatcctacccacctggcaatatgcatttattacaatgaagatactacacctttaccaaaggttgttgctaaaggcgctgattatcaggctttaaaaataatagaaattgcagagaaagaaggtgttcctgtaattgaaaatatacctcttgctcgtggattgaataaagatattgctatcggtcaatacatcacgccgccattttttcatgcgatttctgaaattttagcaatgattaaaattagagggtaa

SEQ ID NO: 379285 - DNA, 243 bp, Salmonella enterica
gtgctcggtcatatccggctggctgatggcgccagtccgccgtttggcgctctggtagtgtccgggaaaagcggcagaaccgcggggatggtcggagatgacggtctggcctacctgacaggtctcagcggggaagaccgccggaccctaaacgtgtcctgggatggccgggtgcagtgcaaactcaccctgccggaaacggtgacactcagtcgggggccgctgttactgccctgcagataa

SEQ ID NO: 379286 - DNA, 243 bp, Salmonella enterica
gtgctcggtcatatccggctggtggacggcgccagtccgccgtttggctccctggtggtgtccgggaaaaccggcagaaccgcagggatggtcggggatgacggtctggcttacctgaccggactcagcggggaagaccgccggaccctaaacgtgtcctgggatggccgggtgcagtgcaggctcaccctgccggaaacggtgacactcagccgggggccactgttactgccctgcagataa

SEQ ID NO: 379287 - DNA, 279 bp, Salmonella enterica
gtggctgttcatatcattgaaaatgaaaagtgtgtagaacagacttttcaaattcaaataaataatcttttcgatgattttgattattacaagaaaattaatggatcaggaaatgaaaagctggaagatatagatatggaagacctcaaagagaaagttatgtcagcacatgaccaagtagtaaaagcattaatcatgaggaatcttgacgctaatattagagagaaagtagatgggcctgagtactggaaacttaaaataatcaataaatcgatttaa

SEQ ID NO: 379288 - DNA, 561 bp, Salmonella enterica
atgaagctgggacgtgcggcaaaagccaccattgccgatctggtttatgacgttctcatcagtaaccagaaactgtccagtgataatgtggcgctgtttgacaaggcgaaacacgcaaacgcccttgaaaaagccgttatggatgtggcgtccctggataaagcgcgccagctaatgcggatgcagaaagagggcgatcgccacctcaatatccgtccggcatttgtactggtgccgacggcgctggagtctgtttcaaatcaggtgattaaatctgtcagtgtcaagggggcggatattaatgccgggatcattaacccggtgaaagatttcgccacggtgatcgcggagcctcgtcttgatgacgccagtcagtccactttctatcttactgcagcaaaaggcagcgataccattgaggtggcttaccttaacggcgtggatgagccgtatatcgatcagcaggaaggattcacggtggatggcgtaaccacgaaagttcgtattgatgcgggcgtggcgccggtggattatcgcggactggtgaagtgctccgcataa

SEQ ID NO: 379289 - DNA, 156 bp, Salmonella enterica
atggaaatcgctgtagttcacggtctgctgcatactgccctggttatccttctgcaggctgtaactcacctggcgactgtccccccaggggacactgacctggaaataaacctggttttgtgtccggttatacgccgactggttacgggacagtga

SEQ ID NO: 379290 - DNA, 552 bp, Salmonella enterica
atgattatacaggctgttgaagcaggtgtatcagaagagagattaagtatagcattaaatatatcggtgcaaatacttaaggcaaaatttaaattacttgatggtattagtcctgaggtcattgctctattatctgagaaaattgttcctcaagcaatattcagcattttaaagaaaatgaagccagaaagacaacttgaggccgtatcaacgatgatgagtataaatgattttagtcgtaagtttgctcttttattattacattatacccctaatgagatgctaaaaaatccaaatgattcaaaacttaaacagcaagacattgctaaaaactttgccagaatggaacgagaaatggctgcaatggaaatggaaactaagcaacttgaagatatctatggtacaaataatctaaagctagcagttattatcagtcacataaaaaagttgcttagtaattatacagtattgaattggctggttgataataatccagactatttagctcagcttaagaaaatttccgctattgattccttaccaatgtcataa

SEQ ID NO: 379291 - DNA, 426 bp, Salmonella enterica
atgaactggcatgccgatcaccggcgctggtctgaagccgtgactgcagatctcttttcgggtgtcgtagcccatcacgcgcaatgctttgttgatggtgttgtcgctcatgcacttgtcctggtcgtattcgccggggaaaataaacgccagatgtccggagagcgcttcagtttgtttcaggatcgccatcgcctgctcagacaatggaacaatgtgctgcgttttcatctttgtgccacggtgagagaagcgcacgttttcgatctgctcccgttcttccgggattatccagagcttctgctgccagtcgatttcactccagcgggcaaagcgcagttcgctggagcgcacaaagaacagcagcgacagcttaagcgcataccgtgtcagcagcctgccggagtagttatccgtccgggataa

SEQ ID NO: 379292 - DNA, 384 bp, Salmonella enterica
atggtgtgcctgtgcttcgtttgcgatgcccagcgcagtgccgtaccacgtcaggcgcaaggcatcgggattaccgtaaatgctgctgccgatattggcggttgtcgtcttaccggcgctcgactgctggaagaaatgcacgccgaacccatcagcgccaaccaaccccaccagcggagccgccagcgctgccgccacgcccagcatcatggagtggttacccgctaccagcgcggcgacattctcccgccagctctccgccgttccggcgacgctgtagcctgctgccgtggcgctgcgcccattgaataccacgcgcttatcagcatcgccgataatgtccccgtccggcatgatataaacgccatgctgccagccagataa

SEQ ID NO: 379293 - DNA, 270 bp, Salmonella enterica
atggtgtgcctgtgcttcgttcgcaatgcccagcgcggttccgtaccacgtcaggcgcaaggcatccgggttaccgtaaagactgctgccgatattggcggttgtcgtcttacccgcgctcgactgctggaagaaatgcacaccgaacccatcagcgccaaccagaccaaccaacggagccgccagcgccgccgctacgcccagcatcatcgaatgattgcccgctaccagcgcggcgacgttctcccgccagctctgaaccgttcctga

SEQ ID NO: 379294 - DNA, 633 bp, Salmonella enterica
atgaccgagcacctgctccccctggctggcgtcaatcttccggtagcccaccgcgccttccgtcagcacctggctgatgacggagctgctgacgtccacgtcctccggcagggcggccacatcaaccgaaatatcgctgcggcggtagctgctgccggcgctcaccacgcccaccccgaagcggttggtcaccccgctgttgccgttcaccggcacaccggccacgtctccggtatctatcatcatgcggggctcattcccggccatcgactggctgaaagcggcaccgtgggcggtggcagtcaccgagccgtaccagctcaggcccaggctgcggtactgtccgggctgcagggtggcgtccgctgccgcctggccccacggcagacggctctgcacactgccgctgaagctgctgttgctgccggtgtcataacggttatggccggcgctgatgttccatgtggtgtccgggttatggaaatcgctgtaattcacgttctgctgcaggccgccccggttatccttctgcacgctgtagctcacctggcgactgtcgccccacgggatactgatggtggcgtagacctgattctggctgcccccgccggtgtactggttacgggcaaatga

SEQ ID NO: 379295 - DNA, 486 bp, Salmonella enterica
atgaccatgcttgaggaaacatttggcattcaggagtttaagcttttctcttttcttgaatgctacatcggaggtaagaaacagtcattatattataaaagccgcaacagtaccgtagccatattcaaattgaagagtatggaatctccagagaatacagcaaaactcatctcaaaagaaaataaccagcgcattatttactttgataaaaaactggatatagagagaatatctaacacggtccatcgtatacaaacctgcaatccttatcaggatttttctgagaagatccgggttgttccggcttgtattatcagcaaaacgatccaagaggaaaatatgagaaatcaggacgaacaagaccgactctaccgcctcgaacaacagcgcaagaaagaagaactaatacgtaaagccaaagaaaaagacgaatatgatcgtcccttaaaagcttttatttctgctaaaagaaagtggtttatctga

SEQ ID NO: 379296 - DNA, 426 bp, Salmonella enterica
atgaactggcatgccgatcaccggcgctggtctgaagccgtgactgcagatctcttttcgggtgtcgtagcccatcacgcgcaatgctttgttgatggtgttgtcgctcatgcacttgtcctggtcgtattcgccggggaaaataaacgccagatgcccggagagcgcttcagtttgtttcaggatcgccatcgcctgctcagacaatggaacaatgtgctgcgttttcatctttgtgccacggtgagagaagcgcacgttttcgatctgctcccgttcttccgggattatccagagcttctgctgccagtcgatttcactccagcgggcaaagcgcagttcgctggagcgcacaaagaacagcagcgacagcttaagcgcataccgtgtcagcagcctgccggagtagttatccgtccgggataa

SEQ ID NO: 379297 - DNA, 339 bp, Salmonella enterica
atgtgggatgtgaaggaggatgccctcaaatcccggcttcaccgtgaaataacgatgcgcgattaccacctcagcgccggtatgtactgcaacgttgccgacctggacaaattcgcgtggatcttcgtgaataaagacgagggctatcactggatagccgtggtatgggcttctgaatcactactggaactcggaaaacttgagtatcaccggaccattcgcgctatcgccaacgctatggatacagacgaatggcctgcgccagtcaccgctgactacaccgacgagctgaacgattacgacctgcgccgcctcgatgcgctgcgtgaaatggcataa

SEQ ID NO: 379298 - DNA, 123 bp, Salmonella enterica
atgaaccagacactaaataaatccattaaagagaaaatcgtagataacgcactggcaaaagctggtattccgcaacgtaaaaagccctgcgtgatgcccgtgcagactgggcggaacgtgtaa

SEQ ID NO: 379299 - DNA, 456 bp, Salmonella enterica
atgcattatccgggccagacaaaccatgatgcctgctatgtacctgaatgcgtacgacagtatagcagcgaacctctttatatacttgttgcacactggtgccagcaacagaaggactgggttcagcgaagccagatatctgaggcctttcgcatcaccccgaggcgggccagctacctgatttcctacctgaggaataaagcgtcccgggtagtttgtgtttgccgttaccagacgttgcccaataaagcacagcgctatgaaatttatgtcgtgcgtgttcttgaaaacactgcgccggtccggcgtgaaagggctgtaacaccgccaccggtttcacgccggcgggtgggtaatggagacaggacgcaggcgaatgaactgtggaaccggctgcgcagtaaccgacatgcagggaaaatcctgaaaaaggaggatgaagatggcggagtataa

SEQ ID NO: 379300 - DNA, 426 bp, Salmonella enterica
gtgccgttgtatctgttacagaccaatgccctgaaagaccggattgccgctgcgctggagcgtgaggagccgggggcgaattacattcattttcctgactggctggggccgtggttctacgaggaactgacctatgaagagcgcagcgcagacggaaagtggaaaaaaccggggcgcggtaataacgaggcgctcgatctgatgtgttacgcccacgcactggctattctccgtggctatgagcgaatcaactgggaaaaaccaccaggatgggctcgcttaccggaaaaaggcacagcaaaaaccacgcagcctgttgaggttcgccagcaggagcaacacgaaggaggagagaaagccgtgaaagccaggaagaaaaaaattttacccgcctggggaggtggttctggtggagggtggttatga

SEQ ID NO: 379301 - DNA, 426 bp, Salmonella enterica
gtgccgttgtatctgttacagaccaatgccctgaaagacaggatagctgccgcgctggagcgtgaggagccgggagcgaattacattcattttcctgactggctggggccgtggttctacgaggagttgacctatgaagagcgaggcgcggacgggaagtggaaaaagccagggcgcggtaataacgaggcgctggatctgatgtgctatgcccatgcactggccataatcagaaagtatgagcagatcaactgggaaaaaccgccaggatgggcgcgactaccggaaaaaggcaccgtaaaaactacgcagcctgttgaggttcaacggcaggagcaacacgaagggggagagaaaaccgtgaaagccaggaagaaaaaaattttgcccgcctggggcggcggttctggcggagggtggttatga

SEQ ID NO: 379302 - DNA, 312 bp, Salmonella enterica
atgacggtgattatgcccggaggcattgttaacagtgaagaaatgatgtttgagggtggcaaaacagaagaaaatttaaaagaataccgggtagaaaacgcaattatcgaggttgataattttgttcccgaagaaggtttttttgcggcccatgaaaatgatgtaaggttcttaagaacattacgtactattgcgaaaaaacttatacttattgtacgaaatgagaatctgtcacaaaccgccaatttctggattggcgatgcagacttcgctgaacactttatttacgcctcaaaaataaagagtctctga

SEQ ID NO: 379303 - DNA, 240 bp, Salmonella enterica
atgcgtttgaatcgtctcaagaccaaagagaaatctttgtccaagagtgctgagacacgcctgaagatcattcttggagcagaagttgctaaagcagtaggttgtaaagtggaagatgtcgataaggagtttgttcttggactattattatattttcaaaatgtaagtgctgaagagaagataaattttcagatgcttggaaaaagatttcttgcagatatgatggggagacaagaataa

SEQ ID NO: 379304 - DNA, 294 bp, Salmonella enterica
gtggtctggctggatgcgccggaacaattacagcagtcgctgtttggctctctgacgtcagaccccagagaagcagaacgccgggcgcaggcggtgatccactctgccggctggcagcagaaacaggctgaactggctcaggcttaccggggggtgctgcaggcgtggtcgctggggctgcaaaaatatccggccgtggtgtctgacgaccagtacgtggtttatggtactgccgatgtggtggtggccgaaggactgctccacagtcacaggacgcgggagggggggcgatga

SEQ ID NO: 379305 - DNA, 165 bp, Salmonella enterica
atggaaaatgctattttatataaaaaacgcaattcaaaaaaaatttacgtcggcgatgtcgctgtaggtggtgatgctccgataactgcacaatcaatgactgaagatatccgttgttcattacctatatttcccgggttaattcgcaaacaatcagcaccgtaa

SEQ ID NO: 379306 - DNA, 291 bp, Salmonella enterica
atgtctatcgatgctgttgattatgcagaaaccctaagcgaattattaccaccagcgaatgttcaagctgcccttaagcgtcttgaatcagctaaacaacatgcttcagaattatatcgtaataatcgggtcataagtaattggcaagatcctgacattgaaatttattataacaacgaactgctagattatgaaaataaagtaaacagaggcatcagttatccacaaaatgccaatctcgatctatctttatatcttagggacttccactatagtgtattattggtttga

SEQ ID NO: 379307 - DNA, 150 bp, Salmonella enterica
atgaactaccagataattcccaatgctttacttaatctctcagtaatgaatgttactgacaaaaaaagtgaagaaataaacaaagtagacggcaactggcaggttgatgaaggccgtcgctattgggcaaatgtcagactaagtttctag

SEQ ID NO: 379308 - DNA, 321 bp, Salmonella enterica
atgccgggtcaggttgacgccgtgcgtaccgttaatagcctcaaaggcgtcgcaaaacgcgcggcgtttttctgcagtgacggggtctcccggcgcttcaaaagttcgcatcaaatgtgcggcgatgctctgattctggtacttatcgtacaaaaacgacgaatcggctctctccatgatataacgcatataggcattcattgccctgtcgctggcaataagttcgtaaatcaggaaggacgatgtcaaaacgatgacgcttgccgagataaagtgcctgagcgctttatgatgcaaattcatgatgaactacagccctga

SEQ ID NO: 379309 - DNA, 225 bp, Salmonella enterica
atggactgtcttatccggtgcaataatttgcaggttacgaataatacgctccggcagatggatagccaaatccgccgcgtaatcaacaagaataatacagaactcatcgccgccgaggcgaatggcgtaatcgcttttacgaatcgatgttttaatcgctttcgccaacagggtaataattcggtcgccttcctggtgcccctgggtatcgttgatcagttttaa

SEQ ID NO: 379310 - DNA, 255 bp, Salmonella enterica
atgatttttaccaaaatcattaggggattcatcagcgcacagcgtcgttgcagcgaccttaactctgccgtttataagtattacgacaatattaagaagcgttgtctgaacggagaaaaggtgccgtattcggatttggacgtccttaatttacgccagtgttttcgcgagttcagtcttgaagcctacccggcattggtcgcgctggtatggccggaatatcagcgcccgcaggttaacccggatgagatttag

SEQ ID NO: 379311 - DNA, 495 bp, Salmonella enterica
atgcaggggcagtccttcgataaatctgcttacccgttactggctatagcgtatccgtccggcgttatccctgacatgagaggctggacaataaagggtaagcccatcagtggacgtgccgtattgtcgcaagaaatggacggcaataaatcgcactcgcacaccgcgcgggcgcaggttactgacttagggacaaaatctacctcatcctttgattacggcacgaaatcgaccaataccacgggcaatcatactcaccagttcggcggttatatcaattcatactggggagattccaatcacacctcatttcagccaggaggtggtgcatggacacaggccgctggcgaccatgcacatacagtttatatcggaggacatgagcacaccatgtatataggtccacacggacacgtcgttattgtggacgcagacggtaatgcggaaaccacggttaaaaacattgcatttaactacatagtgaggctggcataa

SEQ ID NO: 379312 - DNA, 141 bp, Salmonella enterica
atggccatgcaatcgccgcccctactggatgcgaatccggaggtgggtttagtgtggtgtaaagcattgcccattcggaccactcagcatcggcggtatctcgatggctgcgaatatatgcaggtgcaggagcaccattaa

SEQ ID NO: 379313 - DNA, 246 bp, Salmonella enterica
atgtacgggaaatcgctccgcaagacgattgccgccaagaaaaacgtagcgtgtctcttcgagtccattgtcattagaaaaatagacatcatcaaaatctcgggaaacaggtgtaccctcagcgttaaattcgagtgtggcgggttgtatggcgtattgtttcacgtaagttactcgtctgacgggcggtatcgcgatcttaacgatgtgtgcctgatggcgcaaatttccgtactaaatggctga

SEQ ID NO: 379314 - DNA, 2361 bp, Salmonella enterica; identical to SEQ ID NO: 370392

SEQ ID NO: 379315 - DNA, 297 bp, Salmonella enterica
ttgggcgcaacgccgaaaatggcctccgccgggcttatccgcgatagcatccgcgcatcgcttatcccgacgatcgactcggcaaagaccgttgggctggtgagcctgccggggatgatgtccgggctgatttttgccgggatcgatccggtaaaagcgattaaatatcaaattatggtaacgtttatgctgttgtcgacagccagcctgtctaccatcattgcctgctatttaacctaccggaagttctataattcgcgtcatcagttggtagtaatgccgctcaagaaatcatga

SEQ ID NO: 379316 - DNA, 2415 bp, Salmonella enterica; identical to SEQ ID NO: 369113

SEQ ID NO: 379317 - DNA, 894 bp, Salmonella enterica
atgaaccacactgagatccgcgtcgttaccggcccggcgaattatttttcccatgcaggaagcctcgaaagactgaccgactttttcacgccggaacagctttcccacgccgtttgggtgtacggcgaacgcgcgattgccgccgcccggccttacctgccggaagcgtttgaacgtgctggcgcaaagcatctgccgtttaccggccattgtagcgaacgccatgttgcccaactggcgcacgcctgcaacgacgatcgtcaggtggtgataggcgtcggcggcggcgcgctgctcgataccgccaaagcgctcgcccgccgtctggcgctgccgtttgtcgctatcccgacaatcgcggcaacctgcgccgcctggacaccgctttccgtctggtataacgacgcgggacaggcgttacagttcgaaatttttgatgatgccaattttctggtgctggtcgaaccgcgcattattctgcaggcgcccgatgactatctgttagctggcattggcgatacgctggcgaaatggtatgaagccgttgtgcttgcgccgcagcctgaaacgttgccattgaccgtaagactgggcattaacagcgcgtgcgctattcgcgatctcctgctgaccagcagcgaacaagcattagcggataaacagcagcgtcggctgacccaggcattttgcgacgtggtggatgcgattatcgctggcggcggtatggtcggcggcctcggggaacgctatacccgtgtcgccgccgcccatgcggtacacaacggtctgaccgttctgccgcaaacggaaaaattcctgcacggaacgaaagtggcttatggcattctggtgcaaagcgctgagagatcccctcataatttccccaaagcgtaa

SEQ ID NO: 379318 - DNA, 618 bp, Salmonella enterica; identical to SEQ ID NO: 369198

SEQ ID NO: 379319 - DNA, 492 bp, Salmonella enterica
atgaagtatgtcttcatcgaaaaccatcaggctgagttcaatatcaaagccatgtgccgtgtacttcagattgcccgtagcggctggtacgtctggcatcagcgtcgtcatcagataaaccggcgtcagcggttccgccttgtctgtgataacgtcgtccgggaagcattcagtgacgcaaaacaacgctatggtgcgtcacgcctgacggatgagcttcgtgctcaggattaccagttcaacgtgaaaaccgtggcggccagcctgcgtcggcaggggctgcgggcgaaagcctcgcgccggttccgtccggtcagttaccgcaaacatggtctgccagtctcagagaatctgctgaagcaggacttttacgccagcggcccgaatcagaagtgggtgggtgacatcacgtatcttcgcactggtatctggccgtggttatcgatctgtggtcgcggtcagtcattggctggtcgatgtcttcgcggatga

SEQ ID NO: 379320 - DNA, 954 bp, Salmonella enterica
atgttgaaagataaccaaaaacacaacgagtctgttgccccgaatagcgcctttctgtctgagttacaacgtgcattaccggaattttttaccgccgatcgctataacgagcagggcgaactgatcgcgaaaggcggatttgatctcgccagatttgagcgcgcgctgaaagcgcgtaatattgatgagctgactagcggttatcagattgattttattggtaaagattacgcaaaaaaacaggcgggtgaaaaatccgttaccgttatcgttcctgacgtggaacacaatactctggcagaaaataaaaacagccataatctttttctgaccggagataatctggatgtgttacgccatctgcaaaataattacgccgataccgtcgatatgatctatatcgatcccccttataacaccggatcggacgggtttgtctatcccgatcattttgaatatagcgatcgggcgttgcaggatatgtttggtcttaatgatactgaactggcacgtttaaaatccattcagggtaaatcgacgcactccgcgtggttatctttcatgtatccgcgtcttttcctggccaggaagctcctgaaagataccggatttatttttatctctatcgacgataatgagtacgccaatcttaaattaatgatggatgagatttttggcgaaggcggatttgtcaccaatgtgatgtggaagcgcaaaaaagagatttctaacgactctgataacgtttccatccagggggaatacattcttgtttacgccaaaaccggtcagggcgctttacgtttagaaccgctttctaaagagtatattcagaaatcctataaagaaccgaccgaacagtttccagaagggaaatggcgaccggtgccgttaacggtgtcaaaagggctgagcgctgatgaatcccctaatgattttggtaaaaatcattaa

SEQ ID NO: 379321 - DNA, 915 bp, Salmonella enterica; identical to SEQ ID NO: 370647

SEQ ID NO: 379322 - DNA, 204 bp, Salmonella enterica
atgattcagaaatcaaaagaaatggttcggcttccggagattattaacgatctggcgtttcatgcgtcgcaggtacttattgaaagcatgaatattgatagcgcgtcagccgaaaatgccggtcaggcaattgctgacagaatgatgcgcaactggggcgggcaaagcactgagagatcccctcataatttccccaaagcgtaa

SEQ ID NO: 379323 - DNA, 1296 bp, Salmonella enterica
atgccggataagtgtaacgtattaaaaaatataaaaatatttttactggccttctgcctgaccgttccggctattctgctatctcgtctcatttctccccgcgccacaattgattccagctatatctttctggcctggctaccgctctgcgtcatgttttccgtgctgtttttatttggccgccgtggcgtcgcgccgatggtaggcggaatgatgttgactaatgaatggaattttcatttacctctgccacaggcgatggtgctgctattttgccagacgtttcccgtgttgctggtttgcgctatcgtacgctggcagctgggcgcgcgctggcgctacggaatacccaaccaaggcatctggctacgcgttttctggttagggttaatgacgccgtttggcataaaaatcagtatgcatctggcggggcactacctggctttcccggtgacaatctctaccttctttggcaccggcaccgctattttctcgattgttgatttattgagtctgatttctgccgcgcttatttttaccctctttttctattatccgctgcggatgatagtcagcccgcactatattcgtattttctggcggagggatgtcgctccttatctcgccaaagaaaaacgcctgtttacgcttctctggtttgccactctggcgacgctattagcggtgctgtgtacgcctttcgagacaaagtatattgctggctatctggtgccagttctgttcattggatttaccatcggcgtggggaaaatcagctatccgctgttgaattttagttgggctctcactgcgctattcctgcttagctataaccgcaattttctgcagggcgtgggctcagaatattcgctggcatttatcctttcagttctcatttcttttagtatttgtttgttgtacatggcgcggattaatcagcgtagcgaatggttgaatcgacagtggcactcgcaggcattaaccgatccgttgacgcaactgcctaacctgcgtgcgctggagcagtttcttttacaggatgccgggcaaagcgtgtgttatctacgcatggaaaacctggaatttctgagccgtcattacggtatgcagatgcgcgtgcattgcgaacgcgaggtgtttcgcgtgttgcagccgctgctgctggaaaaggagaaaattttccatctgccgggcagtgagttattgctggtattgacgggaccggagacggaagcccgcctgcaatatatgctcaatgctgatgaatcccctaatgattttggtaaaaatcattaa

SEQ ID NO: 379324 - DNA, 1017 bp, Salmonella enterica
atgaagcttttaattaccggtggatgtggctttcttgggagtaatcttgcctcctttgctttaagtcaagggattgatttaattgtattcgataatctatcacgtaaaggtgcaacagataatttacattggttatcctccttaggaaactttgagtttgtacatggtgatattcgcaacaaaaatgatgttacaagattaataactaagtatatgcctgatagctgttttcatcttgcaggtcaagtggcaatgactacatctattgacaatccttgtatggattttgaaattaatgtaggtggaactttaaatttacttgaggcagtacggcagtataattcaaattgtaatataatttattcatcaacaaataaagtatacggcgatcttgagcaatataaatacaatgaaacagaaactagatatacttgtatagataagcctaatggatatgatgagagcacacaattagatttccactcaccatatggttgttcaaaaggtgctgcagatcaatacatgcttgattatgcaaggatttttggtttgaatacagtggtgttcaggcattcatcaatgtatggtgggagacagtttgctacttatgatcaaggctgggtaggttggttttgtcaaaaagcggttgaaattaaaaatggtattaacaaacccttcactatttctggtaatggtaagcaagttagggatgttttgcatgctgaagatatgatttcgttatatttcactgccttggcaaatgtatcaaaaattagggggaacgcttttaatattggtggtaccattgtcaacagcctatcattacttgaattattcaaattgcttgaagattattgcaacattgatatgaggttcactaatttaccagtaagggaaagtgatcagcgtgtttttgttgcagatattaaaaaaatcactaatgcaattgactggagcccgaaagtctcggcaaaagatggtgtccagaaaatgtatgattggactagttctatatga

SEQ ID NO: 379325 - DNA, 714 bp, Salmonella enterica
  misc_feature (666)..(675): n is a, c, g, or t
atggaaggtcagttaattttttgttccgattcaatactacggtttcagtccgattacgatgaaaccgctgccgttccattgctatccatccagaacgtcatagccgataccgatccgttctttcttctccgtttcttccaccataccgttctgattgaagaaggaacaacgctggcaagtatctttctggcaatagaaccgtggaaggctttgttagcggcttatctggacagagatgttggtgcttatatagatgaggtaagaaaaccgtccgggccaacgacatgggatattgaatggattgggattgatcgccgtagcatggtttaccgcgcttataaacgtcaggagatgcaggatggagaggatttttctgactatttaaaccgggaacgcgttctgacagatgaatttgagattgaaagtggctgtgaggcttctggcttcattaaaggtgataaagaacgatggagcatcagtggtgatgttcacgagataaagaatctgcctgtaatcctctatagcaaacagacattgatgacttcaccgaaagacggtttgttgaagaaaaacatatcgggtgtgaagagttcgaagcacagttgcttcatttatggcgatacctcgttttctttcagtgaggttatggaagccatcttctttagnnnnnnnnnngttcttctatgcaccaaaagacgccgccagcagtcttga

SEQ ID NO: 379326 - DNA, 957 bp, Salmonella enterica
  misc_feature (242)..(251): n is a, c, g, or t
atgaaggtatcattttgtatcccaacgtataatcgagtaaaattcattgaagaccttcttgaaagtattaataatcaatcttctcactccttaattgtagaagtatgtatttcagataatgcatcaactgatggaacggaagagtcaataaatatctggagagatagatttaattttccaattttgtatcaaaggcataacgaaaatattgggccagataggaattatttatctgcagttannnnnnnnnnaaattcccttgcattgatggaagataaattggctgccggaagtgacatttatttatgtgacagacgagaattagatatttcaatgacgaaaatatctaatccacatcggcgatggttaaatggtggcagtagattattttcttttagcaatgaagctgatttgatagagtactttagtaaatgtaactcagtcggcggactttttagctacttaagctctattatagtgaaaaggaataaatggtctgacgtcatatttgacgagtcatacattggtacagcttatgcgcatgtatatattttattaagaataattaacaatatgaattcgaccctgcagtacatatcactgccactggttgattgcagaggagataacgatacattcgaaagtaatgggaaggctcgtcgaataaaaattgatttcatcggttatttaaaactgagggaggatttttataataacaatacaaaaatatatatctcatttggacgggttcttacaaaagagcgtccttggttttatacttctttagctatggcatgttatggtgattccaccgatagggctgaacttgcatcattttataagaagttgggatatccgaaaatagccaccaatttaatatttcgtcttaaagggctggctagctacactaaaaaaataaaattagcaaaaatggtaataaaaaaaatattttcatag

SEQ ID NO: 379327 - DNA, 543 bp, Salmonella enterica
atgtctcagaaattatctgctgcagatattataaaatatactgtaacgatgaaaatatttggtttaatgttttttatttatactgcggtattacaagcattatggccagtatgtgctgaattacgagtgaaaatgcagtggagaaagttgcatagaatcattttcctaaatattattggtggggtattttttgttggtcttggtacgttattcatttatgttttaaaggattatatctatagcataattgctaacggtatagattataatattagtggggctgtttttgttttactggctgtgtattttagtataagagtttggtgtgatacatttgctatgttacttcaaagtatgaaccaattaaaaattctttggctcatagttccgtgtcaggcattaattggtggtgtgactcaatggtattttgcagagcattatggaatagttggtattttatacggactaattttatcgttctcgctaactgttttttggggattgccagtgtattatatgtataagagtaaaaggctagcataa

SEQ ID NO: 379328 - DNA, 369 bp, Salmonella enterica; identical to SEQ ID NO: 370640

SEQ ID NO: 379329 - DNA, 129 bp, Salmonella enterica; identical to SEQ ID NO: 370641

SEQ ID NO: 379330 - DNA, 141 bp, Salmonella enterica; identical to SEQ ID NO: 379312

SEQ ID NO: 379331 - DNA, 291 bp, Salmonella enterica; identical to SEQ ID NO: 372378

SEQ ID NO: 379332 - DNA, 162 bp, Salmonella enterica
ttgcatgaactgattttgcatgaactgattggacatctttcctgtgcagtggtcaacgtaaagtcaatgcaggcaaataacgtaaaccatgtttgtactaaaacagaaaaagcgcatctacaccctatgctggaagaaatgtttgtagtggcaggtaaatga

SEQ ID NO: 379333 - DNA, 1551 bp, Salmonella enterica; identical to SEQ ID NO: 372061

SEQ ID NO: 379334 - DNA, 1041 bp, Salmonella enterica
atggttacgctttggggaaattatgaggggatctctcagcgcttggctactatgaaagatgttgcccgcctggcgggagtctctacatcgacggtctctcacgttattaacaaagatcgctttgtgagtgagacgattactgaaaaagttgaagcggcgattaaatcacttaactatgcgccttccgcgctggcgcgaagcctcaagttaaaccagacccgcacgattggtatgctaattaccgccagtaccaaccctttttattccgaactggtgcgcggcgttgagcgaagctgttttgagcgcggttatagtctggtgctgtgcaataccgaaggcgacgagcaacggatgaaccgcaacctggagacgctgatgcaaaaacgggtagacggtttactgctgctgtgtaccgaaacgcatcagccttctcgtgaaatcatggagcgttatccgtctattcctaccgtcatgatggactggtcgccgtttgatggtgagggcgatagcgatctcattcaggataattcgttgttaggcggtgatcttgccacccaacaccttatcgataaaggatttacccgaatagcctgtattaccggcccgctggacaaaacgccagcgcgtttgcggctggaagggtatcgggcggcgatgaaacgcgcagggctggctattccgcaaggctatgagatcaccggcgattttgaatttggcggcggctttgacgccatgcaggcgttactcgcccatcaacagcgaccgcaagcggtttttaccggaaacgatgcgatggctgtcggcgcctatcaggcgctatatcaggcggggcttcgtatcccgcaggatatggcagtcattggctatgatgatattgagctggcgcgctatatgacgccgccgctgacgactatccatcagccgaaagatgaattgggcgagctggctattgatgtgttgattcatcggatggcgcagcccgccttgcaacaacagcgacttcagcttactccggttttgacggtgcgtgggtcggtttag

SEQ ID NO: 379335 - DNA, 1191 bp, Salmonella enterica; identical to SEQ ID NO: 372056

SEQ ID NO: 379336 - DNA, 246 bp, Salmonella enterica; identical to SEQ ID NO: 372055

SEQ ID NO: 379337 - DNA, 735 bp, Salmonella enterica
atgtcccaactcgatctcaacgcattgaatgaactgccaaaagtcgatcgcgtaatggctctggcggaaaccaacgcccaactggaaaaactgagcgccgaagaacgcgtggcatgggcgctggaaaatctgcccggcgaatacgtgctctcctcaagctttggcatccaggcggcggtgagcctgcacctggtgaaccagattcgcccggatatcccggtgatcctcaccgataccggctatttgttcccggaaacctaccagtttattgatgagctaacggacaaactcaaactcaacctgaaagtttaccgcgcgggcgaaagtccggcctggcaggaagcgcgctacggcaagctgtgggagcagggcgttgagggcattgagaaatacaatgagatcaacaaagtcgagccgatgaaccgggcgctcaaagagttaaacgcgcagacctggtttgcgggtctgcgtcgcgagcagtccggtagccgcgcgcatttacccgttctcgctatccagcgcggcgtgtttaaagtgctgccgattatcgactgggataaccgcacggtttaccagtatctgcaaaagcacggtctgaaataccatccgctgtgggatcagggctatctgtcggtgggcgatatacatactacccgcaagtgggagccgggcatggcggaagaagagacgcggttcttcgggctgaagcgcgagtgcgggctgcatgaagggtga

SEQ ID NO: 379338 - DNA, 147 bp, Salmonella enterica
atgccgtctgtgactcatccattaccttgcattgtttattttctctatgtgaatttcgatgagtgtataaaagcgctgataaatttttccatagcgatgcacggatcacgctattttggtaaatttaaagaaaaaatcattctatga

SEQ ID NO: 379339 - DNA, 1143 bp, Salmonella enterica
atgaaaagaaaagtattggcacttgtcatcccggctctgctggctgctggcgcggcacacgccgctgaagtttataacaaagacggcaataagctggacctttacgggaaagtagacggcctgcactatttctctgacaatagtggctctgacggcgaccaaacctatgttcgtttcggttttaaaggcgaaacgcagattaacgaccaactgactggttacggccagtgggaatataacgttcaggctaacactaccgaaggcgagggcgctaattcctggactcgtctggcattcgccggcctgaaattcggcgactacggctcattcgactatggtcgtaactacggcgtcctgtacgacgtggaaggctggaccgatatgctgcctgagttcggcggcgactcctatacttacgctgacaactacatgaccggtcgtgctaacggcgtggccacctaccgtaacactgatttcttcggtctggtagacggtctgagttttgctctacaataccagggcaataatgaaaatagcggtaacggtaatgaaggtacaaataaccgtactgatgatgacgatttccgtagagaaaacggagatggttttggtatttctaccacttacgattttggcatgggctttagcgcaggtgctgcttacacaacatctgaccgtacaaacgatcaggtttcgcgtggcgaacagtatgcaaaaggcgataaagcagatgcatggactgctggcttgaaatatgatgccaacaacatctatttagccactatgtattctgaaacccggaatatgacgccatatggctctttggattctgatgctcatggtggtgtggctaataaaacacaaaactttgaagttactgcgcagtaccaatttgatttcggtttacgtccggcaatttccttcctgatgtctaaaggtaaagaccttgtcaataacggcgtaaatgatgacaaagatttggtcaaatatgctgatgtcggcgccacctactatttcaacaaaaacttctccacctatgttgattataaaatcaacctgctggatgacgacgataacttctatgcagataacggcattaataccgatgacgttgtcgcgctgggtatggtttaccagttctaa

SEQ ID NO: 379340 - DNA, 141 bp, Salmonella enterica
atgacgaaaataggcaacttatactccgcgagcaagatgatttttatttttgacgccactaagaataaaaattgcgagacagtttccgaaaatagagttgatctttcatcgctacaggggtactgtatgaatatacagtaa

SEQ ID NO: 379341 - DNA, 498 bp, Salmonella enterica
atgaaaagcataaaaaaattgattatcgcaagtgcgttgagcatgatggctgctagttgttatgctggctcatttttgccgaacacaatgcaagagaaatcagtggatattaactttgccgctcccgaacatttaaccgtatcgttggatcaagtgccggatttagttgctggggatgagcctacaggtacggctattgcgaagcttacagttgattctacttctgttaaagaattcggggccaggggggcttctggcgtgatgatggacaatgctggcgttgtatggagaataactggtaaaaatagtggcaactcaatcactgtgggcttatcacctaaggatgtgaccaagagtcagggcaggcaaacgtggaatgggagagagtggctcacctttgataccaatgtcccactttatattactacgatgggggagcagaatatctcacctgatacgtacccactgactttagatgtagtgggatatcaggcgtaa

SEQ ID NO: 379342 - DNA, 537 bp, Salmonella enterica
atggaacctcatcaccgtatgcggctgaatgatggagatacgattgaatggggtctgtcatcctggtgccttgcccgcaccaatgatgagtcccgtcccgatgtttcgtttcctcagttggttcagtcatctgaatctgttgctgagtacctggatctggactggtttaaacaacaacagctcaatccgcagaacccgttcgatattattcccgtccgggaaaccgcatcctcttacactggccatgaagcggatagcacgctacaccagctttaccaggaatatcagcaggcattgcggccctccgggcaggaaaagcccctccgtgctaaaccgtttccccgaaatgaagacgctgtcacccaggatttgacgtcgttatacgataaaaagggcgacaccgacacgttacaggatatggtggcaggcgcgcccggtattgatgccattctggatacgctggacacgaccggtgaaggtgaaatgcactggctggcgatggaatcaatgcccgatacccgtagcagaaagtcataa

SEQ ID NO: 379343 - DNA, 273 bp, Salmonella enterica
atgaagtcaccttatgatttagctgagagagagtttaaatttctgctgcaggaagctgaagataaatatgattcgagaatatcacgccatatgcttcgtcgatcgcctgctgtaatatctaattatctggaaaactataaccggatattcgctctgcgcgctgacctgaggtttgctcagtcccatgtgccaggagagccggacttgccgatatgctttcagaaggatgatgagaaagccattactcgggctatggaatcccttaaaagctag
